United States Patent Application Publication US 2026/0337666 A1 - sequence listing, part 15

SEQ ID NO: 21166 - DNA, 2372 bp, Homo sapiens
  misc_feature 1..2372: note = ENST00000566552
  source 1..2372: mol_type = unassigned DNA
gttgaaaacccatgctcttccccacggaagaccccttgtgttaattaactaggggccaggctgagccccagctctcaccctctctccttccccaggtcagccgtcagatccaggagcatgagcaggactctgcgctgcgggagcagctgagcggctataagcggatgcgacgacagcaccagaagcagctgctggccctggagtcacggctgaggggtgaacgggaggagcacagtgcacggctgcagcgggagcttgaggcgcagcgggctggctttggggcagaggcagaaaagctggcccggcggcaccaggccataggtgagaaggaggcacgagctgcccaggccgaggagcggaagttccagcagcacatccttgggcagcagaagaaggagctggctgccctgctggaggcacagaagcggacctacaaacttcgcaaggaacagctgaaggaggagctccaggagaaccccagcactcccaagcgggagaaggccgagtggctgctgcggcagaaggagcagctccagcagtgccaggcggaggaggaagcagggctgctgcggcggcagcgccagtactttgagctgcagtgtcgccagtacaagcgcaagatgttgctggctcggcacagcctggaccaggacctgctgcgggaggacctgaacaagaagcagacccagaaggacttggagtgtgcactgctgcttcggcagcacgaggccacgcgggagctggagctgcggcagctccaggccgtgcagcgcacgcgggctgagctcacccgcctgcagcaccagacggagctgggcaaccagctggagtacaacaagcggcgtgagcaagagttgcggcagaagcatgcggcccaggttcgccagcagcccaagagcctcaaagtacgtgcaggccagcgccccccgggccttccactccccattcctggggctctgggcccacccaacacaggcacccctatagaacagcagccctgctcacctggccaggaggcagtcctggaccaaagaatgcttggcgaggaggaggaagcagttggagagagaaggattctgggaaaggaaggggccactttggagcccaagcagcagaggattctgggggaagaatcaggagcccctagtcccagtccacaaaaacatgggagcctggttgatgaggaagtttggggtctgcctgaggagatagaggagcttagggtgccctcccttgtaccccaggagaggagcattgttggccaggaggaggctgggacatggagcttgtgggggaaggaggatgagagtcttctggatgaggagtttgagcttggctgggtccagggcccagcactgactcccgtccctgaggaggaggaagaagaggaagagggggctccgattgggacccctagggatcctggagatggttgtccttcccccgacatccctcctgaaccccctccaacacacctgaggccctgccctgccagccagctccctggactcctgtcccatggcctcctggccggcctctcctttgcagtggggtcctcctctggcctcctgcccctcctgctgctgctgctgcttccattgctggcagcccagggtgggggtggcctgcaggcagcgctgctggcccttgaggtggggctggtgggtctgggggcctcctacctgctcctttgtacagccctgcacctgccctccagtcttttcctactcctggcccagggtaccgcactgggggccgtcctgggcctgagctggcgccgaggcctcatgggtgttcccctgggccttggagctgcctggctcttagcttggccaggcctagctctacctctggtggctatggcagcggggggcagatgggtgcggcagcagggcccccgggtgcgccggggcatatctcgactctggttgcgggttctgctgcgcctgtcacccatggccttccgggccctgcagggctgtggggctgtgggggaccggggtctgtttgcactgtaccccaaaaccaacaaggatggcttccgcagccgcctgcccgtccctgggccccggcggcgtaatccccgcaccacccaacacccattagctctgttggcaagggtctgggtcctgtgcaagggctggaactggcgtctggcacgggccagccagggtttagcatcccacttgcccccgtgggccatccacacactggccagctggggcctgcttcggggtgaacggcccacccgaatcccccggctactaccacgcagccagcgccagctagggccccctgcctcccgccagccactgccagggactctagccgggcggaggtcacgcacccgccagtcccgggccctgcccccc

SEQ ID NO: 21167 - DNA, 1721 bp, Homo sapiens
  misc_feature 1..1721: note = ENST00000570844
  source 1..1721: mol_type = unassigned DNA
cttgggaaactcacatactctccctctgttcgtgttctccacaatgatttatttcatattctcctcagtggttttattctttctcttagtattttcttaaggtcttgacaaagccatgtgcctattcccaagaaccaccaaggaaaagagtggctattatttttttcctgggcctgagttagtttaatgggtaaacagggtgcagattaaagtgagtgtggccctcaagcccatttactcagacttctggaggattttgaaagttgctgttctaaaaaaatgatcacacctaacactggaatgggccacttaaaatgtgcggagagggtggagagtggaaacgccccacccaaggctgttctctcacccagtcccacctctcccaggtaacttgttaataattaactgtattttgtgttttttcagtgcacattttgaaaaattatatgaattttaaacacagatggaatcatactttacatttactttctgtaacttcttttttccacttaatatttcttggacatcttcccctgtcagtacacctgtctcattttttttacagcatagaattttccatggtatggctgtaccataatttatttaacccatcccttattggtggacatttaggttgtttccagtattttgctatcacaacgcttccgtgaacacctcgagcacatgtgcaagtatacctgggggatagattctgcagtgtaattgctgtgccacagggtatgaccatcttccattctgatagatgttgagaccgctgcttcttgaaaccttagggcccaggcctacctggggcaggggaggatagtgggggtgggggaggagatccctacaactggttgttcatcttccccagctgcggcttgatgagacccaggaggcagagttccaggcccttcggcagcagcttcaacaggagctggagctgctcaacgcttaccagagcaagatcaagatccgcacagagagccagcacgagagggagctgcgggagctggagcagagggtcgcgctgcggcgggcactgctggagcagcgggtggaagaggagctgctggccctgcagacaggacgctccgagcgaatccgcagtctgcttgagcggcaggcccgtgagatcgaggccttcgatgcggaaagcatgaggctgggcttctccagcatggctctggggggcatcccggctgaagctgctgcccagggctatcctgctccaccccctgccccagcctggccctcccgtcccgttccccgttctggggcacactggagccatggccctcctccaccaggcatgccccctccagcctggcgtcagccgtctctgctggctcccccaggccccccaaactggctggggccccccacacaaagtgggacaccccgtggcggagccctgctgctgctaagaaacagcccccagcccctgcggcgggcagcctcggggggcagtggcagtgagaatgtgggcccccctgctgccgcggtgcccgggcccctgagccgcagcaccagtgtcgcttcccacatcctcaatggttcttcccacttctattcctgaggtgcagcggggaggagcagatgagctgggcagggcaggggtgggtggagcctgaccctggagggcactgagctggaggcccctgcaagggtaggggacaagatgtaggctccagctcccctcagacctcctcatctcatga

SEQ ID NO: 21168 - DNA, 4301 bp, Homo sapiens
  misc_feature 1..4301: note = ENST00000419821
  source 1..4301: mol_type = unassigned DNA
gttgtaacaggaaatacttcagcttgcaatactgatagtaatgtgtggcacccagatcacgctgtttttatctgcagttcctttttagtattgtacaaagtttcttgaagatttttaaatacataagtttaaaagagaattaactttcaatttgcaaattaaaatgagaatggttgccttttcttcattatcaagagatggtgagttgtcctcctgttgcatcataaatacaaaggactgaagttataaaagagaaaagagaagtttgctgctaaaatgaatctgagcaatatggaatattttgtgccacacacaaaaaggtactgaagatttaccccccaaaaaaaattgtcaatgagaaataaagctaactgatatcaaaaagcagagcctgctctactggccatcatgcgtaaaggggtgctgaaggacccagagattgccgatctattctacaaagatgatcctgaggaactttttattggtttgcatgaaattggacatggaagttttggagcagtttattttgctacaaatgctcacaccagtgaggtggtggcaattaagaagatgtcctatagtgggaagcagacccatgagaaatggcaagatattcttaaggaagttaaatttttacgacaattgaagcatcctaatactattgagtacaaaggctgttacttgaaagaacacactgcttggttggtgatggaatattgcttaggctcagcctctgatttattagaagttcataaaaaaccacttcaggaagtggagatcgctgccattactcatggagccttgcatggactagcctacctacattctcatgcattgattcatagggatattaaagcaggaaatattcttctaacagagccaggtcaggtaaaactagctgattttggatctgcttcaatggcttctcctgccaactccttcgtgggcacaccttactggatggctccagaggtgatcttagctatggatgaaggacagtatgatgggaaagttgatatttggtcacttggcatcacttgtattgaattggcggaacggaagccgccccttttcaacatgaatgcaatgagtgccttatatcacattgcccagaatgactccccaacgttacagtctaatgaatggacagactcctttaggagatttgttgattactgcttgcagaaaatacctcaggaaaggccaacatcagcagaactattaaggcatgactttgttcgacgagaccggccactacgtgtcctcattgacctcatacagaggacaaaagatgcagttcgtgagctagataacctacagtaccgaaaaatgaaaaaaatacttttccaagagacacggaatggacccttgaatgagtcacaggaggatgaggaagacagtgaacatggaaccagcctgaacagggaaatggacagcctgggcagcaaccattccattccaagcatgtccgtgagcacaggcagccagagcagcagtgtgaacagcatgcaggaagtcatggacgagagcagttccgaacttgtcatgatgcacgatgacgaaagcacaatcaattccagctcctccgtcgtgcataagaaagatcatgtattcataagggatgaggcgggccacggcgatcccaggcctgagccgcggcctacccagtcagttcagagccaggccctccactaccggaacagagagcgctttgccacgatcaaatcagcatctttggttacacgacagatccatgagcatgagcaggagaacgagttgcgggaacagatgtcaggttataagcggatgcggcgccagcaccagaagcagctgatcgccctggagaacaagctgaaggctgagatggacgagcaccgcctcaagctacagaaggaggtggagacgcatgccaacaactcgtccatcgagctggagaagctggccaagaagcaagtggctatcatagaaaaggaggcaaaggtagctgcagcagatgagaagaagttccagcaacagatcttggcccagcagaagaaagatttgacaactttcttagaaagtcagaagaagcagtataagatttgtaaggaaaaaataaaagaggaaatgaatgaggaccatagcacacccaagaaagagaagcaagagcggatctccaaacataaagagaacttgcagcacacacaggctgaagaggaagcccaccttctcactcaacagagactgtactacgacaaaaattgtcgtttcttcaagcggaaaataatgatcaagcggcacgaggtggagcagcagaacattcgggaggaactaaataaaaagaggacccagaaggagatggagcatgccatgctaatccggcacgacgagtccacccgagagctagagtacaggcagctgcacacgttacagaagctacgcatggatctgatccgtttacagcaccagacggaactggaaaaccagctggagtacaataagaggcgagaaagagaactgcacagaaagcatgtcatggaacttcggcaacagccaaaaaacttaaaggccatggaaatgcaaattaaaaaacagtttcaggacacttgcaaagtacagaccaaacagtataaagcactcaagaatcaccagttggaagttactccaaagaatgagcacaaaacaatcttaaagacactgaaagatgagcagacaagaaaacttgccattttggcagagcagtatgaacagagtataaatgaaatgatggcctctcaagcgttacggctagatgaggctcaagaagcagaatgccaggccttgaggctacagctccagcaggaaatggagctgctcaacgcctaccagagcaaaatcaagatgcaaacagaggcacaacatgaacgtgagctccagaagctagagcagagagtgtctctgcgcagagcacaccttgagcagaagattgaagaggagctggctgcccttcagaaggaacgcagcgagagaataaagaacctattggaaaggcaagagcgagagattgaaacttttgacatggagagcctcagaatgggatttgggaatttggttacattagattttcctaaggaggactacagatgagattaaattttttgccatttacaaaaaaaaaaaaaaaaaagaaaacagaaaaaaattcagaccctgcaaaaccacattccccattttaacgggcgttgctctcactctctctctctcttactcttactgacatcgtgtcggactagtgcctgtttattcttactccatcaggggcccccttcctccccccgtgtcaactttcagtgctggccaaaacctggccgtctcttctattcacagtacacgtcacagtattgatgtgattcaaaatgtttcagtgaaaactttggagacagttttaacaaaaccaataaaccaacaacaaaaaaagtggatgtatattgctttaagcaatcactcattaccaccaatctgtgaaagtaaagcaaaaaataataataataaatgccaagggggagagagacacaatatccgcagccttacaccttaactagctgctgcattattttattttattttatttttttggtatttattcatcaggaataaaaaaaacaaagttttattaaagattgaaaatttgatacattttacagaaactaattgtgatgtacatatcagtggtgacatattattacttttttggggacggggggtgggtggggtgaagagatcttgtgatttttaagaacctgctggcaagagtttaacttgtcttcagcatattctgattgtatcataatcattttctgctgttgcagaggatgtgaatacacttaaggagctcacagaatcccagtagcacaaattgggctttggcaaatcgtgtattttgtgtatagaaggaatttaaggagaggtattacttattttcatattgtattttaactgtttctctgatcaaatttttttacttcctcctcctgttcctccccacctccctccttttccagttcagtatttggagttcaacactgtctctcaatcagatcatcttgatctttttctttatctcccttccccttcctaagtcccatttcttggtcataaatattgcattattcacactttcaaactgtgtattttcttacaataaaaaatgatgaaaaaaaaaaaggctttacttcttttgcatgcactttaaaaacaaaacaaaacatttttcaggttccaaggaagagcatgataactgtcagagcttttaattatatttgtaaataaaagtgttcatcaca

SEQ ID NO: 21169 - DNA, 4384 bp, Homo sapiens
  misc_feature 1..4384: note = ENST00000392533
  source 1..4384: mol_type = unassigned DNA
gtgctcggcgcagtccggtgcgattggccacccctggcaggagccgcacctcggacagcagcagcggcggcggccgcgggagggtccttgtggcgccgggcggcggggtcctgcgtggagagtgggacgcaacgccgagaccgcgagcagaggctgcgcacagccggatccggcactcagcgaccggacccaaggatccgccggggaacaagccacaggagagcgactcaggaacaagtgtgggagaggaagcggcggcggcggcgccgggcccgggggtggtgacagcaggtctgaggttgcatcataaatacaaaggactgaagttataaaagagaaaagagaagtttgctgctaaaatgaatctgagcaatatggaatattttgtgccacacacaaaaaggtactgaagatttaccccccaaaaaaaattgtcaatgagaaataaagctaactgatatcaaaaagcagagcctgctctactggccatcatgcgtaaaggggtgctgaaggacccagagattgccgatctattctacaaagatgatcctgaggaactttttattggtttgcatgaaattggacatggaagttttggagcagtttattttgctacaaatgctcacaccagtgaggtggtggcaattaagaagatgtcctatagtgggaagcagacccatgagaaatggcaagatattcttaaggaagttaaatttttacgacaattgaagcatcctaatactattgagtacaaaggctgttacttgaaagaacacactgcttggttggtgatggaatattgcttaggctcagcctctgatttattagaagttcataaaaaaccacttcaggaagtggagatcgctgccattactcatggagccttgcatggactagcctacctacattctcatgcattgattcatagggatattaaagcaggaaatattcttctaacagagccaggtcaggtaaaactagctgattttggatctgcttcaatggcttctcctgccaactccttcgtgggcacaccttactggatggctccagaggtgatcttagctatggatgaaggacagtatgatgggaaagttgatatttggtcacttggcatcacttgtattgaattggcggaacggaagccgccccttttcaacatgaatgcaatgagtgccttatatcacattgcccagaatgactccccaacgttacagtctaatgaatggacagactcctttaggagatttgttgattactgcttgcagaaaatacctcaggaaaggccaacatcagcagaactattaaggcatgactttgttcgacgagaccggccactacgtgtcctcattgacctcatacagaggacaaaagatgcagttcgtgagctagataacctacagtaccgaaaaatgaaaaaaatacttttccaagagacacggaatggacccttgaatgagtcacaggaggatgaggaagacagtgaacatggaaccagcctgaacagggaaatggacagcctgggcagcaaccattccattccaagcatgtccgtgagcacaggcagccagagcagcagtgtgaacagcatgcaggaagtcatggacgagagcagttccgaacttgtcatgatgcacgatgacgaaagcacaatcaattccagctcctccgtcgtgcataagaaagatcatgtattcataagggatgaggcgggccacggcgatcccaggcctgagccgcggcctacccagtcagttcagagccaggccctccactaccggaacagagagcgctttgccacgatcaaatcagcatctttggttacacgacagatccatgagcatgagcaggagaacgagttgcgggaacagatgtcaggttataagcggatgcggcgccagcaccagaagcagctgatcgccctggagaacaagctgaaggctgagatggacgagcaccgcctcaagctacagaaggaggtggagacgcatgccaacaactcgtccatcgagctggagaagctggccaagaagcaagtggctatcatagaaaaggaggcaaaggtagctgcagcagatgagaagaagttccagcaacagatcttggcccagcagaagaaagatttgacaactttcttagaaagtcagaagaagcagtataagatttgtaaggaaaaaataaaagaggaaatgaatgaggaccatagcacacccaagaaagagaagcaagagcggatctccaaacataaagagaacttgcagcacacacaggctgaagaggaagcccaccttctcactcaacagagactgtactacgacaaaaattgtcgtttcttcaagcggaaaataatgatcaagcggcacgaggtggagcagcagaacattcgggaggaactaaataaaaagaggacccagaaggagatggagcatgccatgctaatccggcacgacgagtccacccgagagctagagtacaggcagctgcacacgttacagaagctacgcatggatctgatccgtttacagcaccagacggaactggaaaaccagctggagtacaataagaggcgagaaagagaactgcacagaaagcatgtcatggaacttcggcaacagccaaaaaacttaaaggccatggaaatgcaaattaaaaaacagtttcaggacacttgcaaagtacagaccaaacagtataaagcactcaagaatcaccagttggaagttactccaaagaatgagcacaaaacaatcttaaagacactgaaagatgagcagacaagaaaacttgccattttggcagagcagtatgaacagagtataaatgaaatgatggcctctcaagcgttacggctagatgaggctcaagaagcagaatgccaggccttgaggctacagctccagcaggaaatggagctgctcaacgcctaccagagcaaaatcaagatgcaaacagaggcacaacatgaacgtgagctccagaagctagagcagagagtgtctctgcgcagagcacaccttgagcagaagattgaagaggagctggctgcccttcagaaggaacgcagcgagagaataaagaacctattggaaaggcaagagcgagagattgaaacttttgacatggagagcctcagaatgggatttgggaatttggttacattagattttcctaaggaggactacagatgagattaaattttttgccatttacaaaaaaaaaaaaaaaaaagaaaacagaaaaaaattcagaccctgcaaaaccacattccccattttaacgggcgttgctctcactctctctctctcttactcttactgacatcgtgtcggactagtgcctgtttattcttactccatcaggggcccccttcctccccccgtgtcaactttcagtgctggccaaaacctggccgtctcttctattcacagtacacgtcacagtattgatgtgattcaaaatgtttcagtgaaaactttggagacagttttaacaaaaccaataaaccaacaacaaaaaaagtggatgtatattgctttaagcaatcactcattaccaccaatctgtgaaagtaaagcaaaaaataataataataaatgccaagggggagagagacacaatatccgcagccttacaccttaactagctgctgcattattttattttattttatttttttggtatttattcatcaggaataaaaaaaacaaagttttattaaagattgaaaatttgatacattttacagaaactaattgtgatgtacatatcagtggtgacatattattacttttttggggacggggggtgggtggggtgaagagatcttgtgatttttaagaacctgctggcaagagtttaacttgtcttcagcatattctgattgtatcataatcattttctgctgttgcagaggatgtgaatacacttaaggagctcacagaatcccagtagcacaaattgggctttggcaaatcgtgtattttgtgtatagaaggaatttaaggagaggtattacttattttcatattgtattttaactgtttctctgatcaaatttttttacttcctcctcctgttcctccccacctccctccttttccagttcagtatttggagttcaacactgtctctcaatcagatcatcttgatctttttctttatctcccttccccttcctaagtcccatttcttggtcataaatattgcattattcacactttcaaactgtgtattttcttacaataaaaaatgatgaaaaaaaaaaaggctttacttcttttgcatgcactttaaaaacaaaacaaaacatttttcaggttccaaggaagagcatgataactgtcagagcttttaattatatttgtaaataaaagtgttcatcaca

SEQ ID NO: 21170 - DNA, 597 bp, Homo sapiens
  misc_feature 1..597: note = ENST00000543709
  source 1..597: mol_type = unassigned DNA
gccatggaaatgcaaattaaaaaacagtttcaggacacttgcaaagtacagaccaaacagtataaagcactcaagaatcaccagttggaagttactccaaagaatgagcacaaaacaatcttaaagacactgaaagatgagcagacaagaaaacttgccattttggcagagcagtatgaacagagtataaatgaaatgatggcctctcaagcgttacggctagatgaggctcaagaagcagaatgccaggccttgaggctacagctccagcaggaaatggagctgctcaacgcctaccagagcaaaatcaagatgcaaacagaggcacaacatgaacgtgagctccagaagctagagcagagagtgtctctgcgcagagcacaccttgagcagaagattgaagaggagctggctgcccttcagaaggaacgcagcgagagaataaagaacctattggaaagtatttggagttcaacactgtctctcaatcagatcatcttgatctttttctttatctcccttccccttcctaagtcccatttcttggtcataaatattgcattattcacactttcaaactgtgtattttcttacaat

SEQ ID NO: 21171 - DNA, 3932 bp, Homo sapiens
  misc_feature 1..3932: note = ENST00000537305
  source 1..3932: mol_type = unassigned DNA
taaatttttacgacaattgaagcatcctaatactattgagtacaaaggctgttacttgaaagaacacactgcttggttggtgatggaatattgcttaggctcagcctctgatttattagaagttcataaaaaaccacttcaggaagtggagatcgctgccattactcatggagccttgcatggactagcctacctacattctcatgcattgattcatagttctgtctgccaatgcctaatgtcaccatgaggaaggaaactgaattttcaagggaagtttttataaaagttattttgaagcatttgaaccttatcattttcagcttgacataaatttcctcatcttctctgttttatcttttcactgaccatcaacttccaattcatggtttctagtgctcattacacctcatgccttttttaaaaagaataaggagtacatccacaccttctcattctaaattaccataatgaaaaatgaattttttgaattatatttttaaaactttttgctatataatacctctattagctttagtagtaaccacgtgcaattctttgtagtaatacaatagaaatgtaatttcctaacccctaatccttgtttgttttgatctttcagggtcttctttttactgtacagagttatttttaaaatatcaccttctatataacatgtacctcaaatgccttagagttgcagttacaattaaagacagagagaaagggtcacaggcaagaaagaaaaggtatgtgtgtagttgaggtttattggtaggtggtcaatacggaatcattgcaggtttgtttaggctccaaaaatgtcacataatttggaaaagcagaaaaagcagttaaaattggcaccaattttctcagcacagggaatactattgataactggatttagcctttaagaatatgcctttgtaagtgtagcagctgaataggttttcttgttcgccatgtctgccttttttctcatttgtattccctccctctgaagaaagctctacctttaagtaactagtatgacctacctgcaagtacacccaggaatctgggcccccttacaacatgcagtaattactaaatctccttctggctatctgagcaagggatattaaagcaggaaatattcttctaacagagccaggtcaggtaaaactagctgattttggatctgcttcaatggcttctcctgccaactccttcgtgggcacaccttactggatggctccagaggtgatcttagctatggatgaaggacagtatgatgggaaagttgatatttggtcacttggcatcacttgtattgaattggcggaacggaagccgccccttttcaacatgaatgcaatgagtgccttatatcacattgcccagaatgactccccaacgttacagtctaatgaatggacagactcctttaggagatttgttgattactgcttgcagaaaatacctcaggaaaggccaacatcagcagaactattaaggcatgactttgttcgacgagaccggccactacgtgtcctcattgacctcatacagaggacaaaagatgcagttcgtgagctagataacctacagtaccgaaaaatgaaaaaaatacttttccaagagacacggaatggacccttgaatgagtcacaggaggatgaggaagacagtgaacatggaaccagcctgaacagggaaatggacagcctgggcagcaaccattccattccaagcatgtccgtgagcacaggcagccagagcagcagtgtgaacagcatgcaggaagtcatggacgagagcagttccgaacttgtcatgatgcacgatgacgaaagcacaatcaattccagctcctccgtcgtgcataagaaagatcatgtattcataagggatgaggcgggccacggcgatcccaggcctgagccgcggcctacccagtcagttcagagccaggccctccactaccggaacagagagcgctttgccacgatcaaatcagcatctttggttacacgacagatccatgagcatgagcaggagaacgagttgcgggaacagatgtcaggttataagcggatgcggcgccagcaccagaagcagctgatcgccctggagaacaagctgaaggctgagatggacgagcaccgcctcaagctacagaaggaggtggagacgcatgccaacaactcgtccatcgagctggagaagctggccaagaagcaagtggctatcatagaaaaggaggcaaaggtagctgcagcagatgagaagaagttccagcaacagatcttggcccagcagaagaaagatttgacaactttcttagaaagtcagaagaagcagtataagatttgtaaggaaaaaataaaagaggaaatgaatgaggaccatagcacacccaagaaagagaagcaagagcggatctccaaacataaagagaacttgcagcacacacaggctgaagaggaagcccaccttctcactcaacagagactgtactacgacaaaaattgtcgtttcttcaagcggaaaataatgatcaagcggcacgaggtggagcagcagaacattcgggaggaactaaataaaaagaggacccagaaggagatggagcatgccatgctaatccggcacgacgagtccacccgagagctagagtacaggcagctgcacacgttacagaagctacgcatggatctgatccgtttacagcaccagacggaactggaaaaccagctggagtacaataagaggcgagaaagagaactgcacagaaagcatgtcatggaacttcggcaacagccaaaaaacttaaaggccatggaaatgcaaattaaaaaacagtttcaggacacttgcaaagtacagaccaaacagtataaagcactcaagaatcaccagttggaagttactccaaagaatgagcacaaaacaatcttaaagacactgaaagatgagcagacaagaaaacttgccattttggcagagcagtatgaacagagtataaatgaaatgatggcctctcaagcgttacggctagatgaggctcaagaagcagaatgccaggccttgaggctacagctccagcaggaaatggagctgctcaacgcctaccagagcaaaatcaagatgcaaacagaggcacaacatgaacgtgagctccagaagctagagcagagagtgtctctgcgcagagcacaccttgagcagaagattgaagaggagctggctgcccttcagaaggaacgcagcgagagaataaagaacctattggaaaggcaagagcgagagattgaaacttttgacatggagagcctcagaatgggatttgggaatttggttacattagattttcctaaggaggactacagatgagattaaattttttgccatttacaaaaaaaaaaaaaaaaaagaaaacagaaaaaaattcagaccctgcaaaaccacattccccattttaacgggcgttgctctcactctctctctctcttactcttactgacatcgtgtcggactagtgcctgtttattcttactccatcaggggcccccttcctccccccgtgtcaactttcagtgctggccaaaacctggccgtctcttctattcacagtacacgtcacagtattgatgtgattcaaaatgtttcagtgaaaactttggagacagttttaacaaaaccaataaaccaacaacaaaaaaagtggatgtatattgctttaagcaatcactcattaccaccaatctgtgaaagtaaagcaaaaaataataataataaatgccaagggggagagagacacaatatccgcagccttacaccttaactagctgctgcattattttattttattttatttttttggtatttattcatcaggaataaaaaaaacaaagttttattaaagattgaaaatttgatacatttta

SEQ ID NO: 21172 - DNA, 777 bp, Homo sapiens
  misc_feature 1..777: note = ENST00000536979
  source 1..777: mol_type = unassigned DNA
agaggtaggtaatgtgccaaggtgtgacacacacaaagtggatggtgtagctgtaattcaagcccaggagcctacctccaaagcccacaggtgtagccttcctgacgcctgctgctgtggtttcagatcatactgaaaagaatgtgtttggtattgtagcccattgggcagacttgactgtttttgattcccaactctgaatgtacccagagcatctgtgtttttgagggggcaaccaatttcaatccaaatgaggaaacctcttccagtagtcaccaagggctgtaggccaccaagggctgtaggcaagggtgcatgaccgtgtgtgtcttctgtgtccgcagttacggctagatgaggctcaagaagcagaatgccaggccttgaggctacagctccagcaggaaatggagctgctcaacgcctaccagagcaaaatcaagatgcaaacagaggcacaacatgaacgtgagctccagaagctagagcagagagtgtctctgcgcagagcacaccttgagcagaagattgaagaggagctggctgcccttcagaaggaacgcagcgagagaataaagaacctattggaaaggcaagagcgagagattgaaacttttgacatggagagcctcagaatgggatttgggaatttggttacattagattttcctaaggaggactacagatgagattaaattttttgccatttacaaaaaaaaaaaaaaaaaagaaaacagaaaaaaattcagaccctgcaaaaccacattccccatttta

SEQ ID NO: 21173 - DNA, 2147 bp, Homo sapiens
  misc_feature 1..2147: note = ENST00000537952
  source 1..2147: mol_type = unassigned DNA
agaaggtgctagaactgtgtacgatcatgactggaaagcaggatccctcagtgactgccgaatcttcccagcacaagatagagaggcagttcagcacaagcctacattggttctaggcagaacgatgatcctaccgaacagatctcaaataaaattaaattgagaaagcagatctttcaagggaatgaggcggaggctcgcttttatgttaaaagccaccagcatcctccttgctagacatggacatgacatttttaaaggaattatctggttacagcgttttaagcaaactgttctaaggagtctgtacattgcattattttttctattctttttttcttttgcatatatgtaattctggaggtaaagaaaaagcctgccagggattcagaaggcatcccactagcgatcagctgacattcctaactgaaggctgcaatgtgttgcttattcattttgtaccgtgggagctgcggggactagcagagagctaaactatgcatttcaaacagcagtgcttgtgcagaaagaggggtgagagagaggcagccggcgaggaaagagcacagctggactttctccttgtttttatccatttctgcaggatcatgtattcataagggatgaggcgggccacggcgatcccaggcctgagccgcggcctacccagtcagttcagagccaggccctccactaccggaacagagagcgctttgccacgatcaaatcagcatctttggttacacgacagatccatgagcatgagcaggagaacgagttgcgggaacagatgtcaggttataagcggatgcggcgccagcaccagaagcagctgatcgccctggagaacaagctgaaggctgagatggacgagcaccgcctcaagctacagaaggaggtggagacgcatgccaacaactcgtccatcgagctggagaagctggccaagaagcaagtggctatcatagaaaaggaggcaaaggtagctgcagcagatgagaagaagttccagcaacagatcttggcccagcagaagaaagatttgacaactttcttagaaagtcagaagaagcagtataagatttgtaaggaaaaaataaaagaggaaatgaatgaggaccatagcacacccaagaaagagaagcaagagcggatctccaaacataaagagaacttgcagcacacacaggctgaagaggaagcccaccttctcactcaacagagactgtactacgacaaaaattgtcgtttcttcaagcggaaaataatgatcaagcggcacgaggtggagcagcagaacattcgggaggaactaaataaaaagaggacccagaaggagatggagcatgccatgctaatccggcacgacgagtccacccgagagctagagtacaggcagctgcacacgttacagaagctacgcatggatctgatccgtttacagcaccagacggaactggaaaaccagctggagtacaataagaggcgagaaagagaactgcacagaaagcatgtcatggaacttcggcaacagccaaaaaacttaaaggccatggaaatgcaaattaaaaaacagtttcaggacacttgcaaagtacagaccaaacagtataaagcactcaagaatcaccagttggaagttactccaaagaatgagcacaaaacaatcttaaagacactgaaagatgagcagacaagaaaacttgccattttggcagagcagtatgaacagagtataaatgaaatgatggcctctcaagcgttacggctagatgaggctcaagaagcagaatgccaggccttgaggctacagctccagcaggaaatggagctgctcaacgcctaccagagcaaaatcaagatgcaaacagaggcacaacatgaacgtgagctccagaagctagagcagagagtgtctctgcgcagagcacaccttgagcagaagattgaagaggagctggctgcccttcagaaggaacgcagcgagagaataaagaacctattggaaaggcaagagcgagagattgaaacttttgacatggagagcctcagaatgggatttgggaatttggttacattagattttcctaaggaggactacagatgagattaaattttttgccatttacaaaaaaaaaaaaaaaaaa

SEQ ID NO: 21174 - DNA, 675 bp, Homo sapiens
  misc_feature 1..675: note = ENST00000537569
  source 1..675: mol_type = unassigned DNA
tggaaaaccagctggagtacaataagaggcgagaaagagaactgcacagaaagcatgtcatggaacttcggcaacagccaaaaaacttaaaggccatggaaatgcaaattaaaaaacagtttcaggacacttgcaaagtacagaccaaacagtataaagcactcaagaatcaccagttggaagttactccaaagaatgagcacaaaacaatcttaaagacactgaaagatgagcagacaagaaaacttgccattttggcagagcagtatgaacagagtataaatgaaatgatggcctctcaagcggtaagtggttaggtttggtgccacggcttcgagagctttgggaatcaagaaaatccaagatccagcctgttgttcccaagatgattcttgcacaaatttaggatattgatgtttttctgcccaaaggactgaggaaaggacgacgttgaataaagccaagccaatgtggatacttgctggagtgtcttataagatggaactcaaggagtgacatgccacatcagacctgtggcacatagggactttgagggcaaatgtgatagataccacatatgataccatgtgttcatttatgaaagattttactgactgccctccccgcaactaatatcaggcacaaatgaataagagtccctgcccttagggagcc

SEQ ID NO: 21175 - DNA, 580 bp, Homo sapiens
  misc_feature 1..580: note = ENST00000540561
  source 1..580: mol_type = unassigned DNA
atcatgactggaaagcaggatccctcagtgactgccgaatcttcccagcacaagatagagaggcagttcagcacaagcctacattggttctaggcagaacgatgatcctaccgaacagatctcaaataaaattaaattgagaaagcagatctttcaagggaatgaggcggaggctcgcttttatgttaaaagccaccagcatcctccttgctagacatggacatgacatttttaaaggaattatctggttacagcgttttaagcaaactgttctaaggagatcatgtattcataagggatgaggcgggccacggcgatcccaggcctgagccgcggcctacccagtcagttcagagccaggccctccactaccggaacagagagcgctttgccacgatcaaatcagcatctttggttacacgacagatccatgagcatgagcaggagaacgagttgcgggaacagatgtcaggttataagcggatgcggcgccagcaccagaagcagctgatcgccctggagaacaagctgaaggctgagatggacgagcaccgcctcaagctacagaaggaggtggaga

SEQ ID NO: 21176 - DNA, 597 bp, Homo sapiens
  misc_feature 1..597: note = ENST00000537822
  source 1..597: mol_type = unassigned DNA
gtagagagaaggtgctagaactgtgtacgatcatgactggaaagcaggatccctcagtgactgccgaatcttcccagcacaagatagagaggcagttcagcacaagcctacattggttctaggcagaacgatgatcctaccgaacagatctcaaataaaattaaattgagaaagcagatctttcaagggaatgaggcggaggctcgcttttatgttaaaagccaccagcatcctccttgctagacatggacatgacatttttaaaggaattatctggttacagcgttttaagcaaactgttctaaggagtctgtacattgcattattttttctattctttttttcttttgcatatatgtaattctggaggatcatgtattcataagggatgaggcgggccacggcgatcccaggcctgagccgcggcctacccagtcagttcagagccaggccctccactaccggaacagagagcgctttgccacgatcaaatcagcatctttggttacacgacagatccatgagcatgagcaggagaacgagttgcgggaacagatgtcaggttataagcggatgcggcgccagcaccagaagcag

SEQ ID NO: 21177 - DNA, 3229 bp, Homo sapiens
  misc_feature 1..3229: note = ENST00000536584
  source 1..3229: mol_type = unassigned DNA
atttctctgtctgcctggtttccttcaagaactactttattgtgtttctttcctcttccagcggaacggaagccgccccttttcaacatgaatgcaatgagtgccttatatcacattgcccagaatgactccccaacgttacagtctaatgaatgcatgactttgttcgacgagaccggccactacgtgtcctcattgacctcatacagaggacaaaagatgcagttcgtgagctagataacctacagtaccgaaaaatgaaaaaaatacttttccaagagacacggaatggacccttgaatgagtcacaggaggatgaggaagtaggttcaatttattttagcaggcacttatagaatgcccactatgtgaaaaagttctagactgggcactatgaaaaacttttgaagataaaaattaattgatgctgtccgccttaagaaacatgaagggttgtacaagagacattcataaaataacacttatataaggcaaaatatgaaaagtgctacagaggtgtaaccccattgcaggggtccatcatggggagaaaataagtctgctggtgggattagtgaaggtttcctggaggacatgatgtgggtagtttctgacaaatgggcatagggtgttctagactcagaaaggtgttgtgctttaggaagattatcctagcaacagagtgtaacatggatttgaatgggcaacatcctggctaatagtccatgcaagaggtaataaggtcagtgtcgatgcaaatggggaaaagggagcactttagagaaacatcgtagaggtagatttcataatccatggcttctcattgacagtgacagataaggaggagtttaaggtgactctgagcattggagcctgggtggctaggagtatgtcaataccaagaacagagaaaaagaaccagggagaaagagtagatttaggatgatttcagtttcgtgccttttgagtttaaggtcctggcattataaactcttgccagtatacagatagaagttttcagttagagaatccttgatgaccttagtaaaagcagttttacaggactaggtagaatgaatagtagattactggagttgtataattcatgggagttgataagagggagacaggaaaaaataattatgttaagattcagaaattgggttaagaaggaaaagtaagagtgggcagcatgtagagagatccataaatataaggcaggcttcttcatctttaaatgcagtagagatggagccagggcagagtcagaggcaccgaagatagaagaaagggatatagttaaagaggcaggatttcagaacgtagacataacaagaacaggagtattttagctttttaacagaaaataaaataaacataaaagtattttatcaataattttaaaaatgaagctcggaaagttgcattgaactataaaatttcttgattgcatatatagaaatgatcccctttaattgggaaaataagtctgttaaaaataatgtattatcttccattttatattacccagtaattttttatattgccatggctaagtaacagtttattaaagttatatgtgtaccatatggttttttgagaacaaggtttatttgtagctaaatggatttaattttattattcaatcttatatcaaaagatatcccactgtgatggataaattatatgttctgattattttaccacttttcaaatagtagtctttgggccagtaatgatgaataccagtattatttaacagatatatataataagattacagagataagcatgatagaatcgcttgagggaggcagactttaattacctgtccaggaaagtagaattaatatttctgcttagatatgaagttactcaataatgacttgcagagggagcatattgcttgtcaaatatctgaaaactctttccactctactttttcaagtgaccactgctgtatttgaagatatcctagagctcacctgtttagtggccagcagtcttcctctagctccttgatgttccagaaggtcccttacaaacctggcttgattttgcttactgaatagcaacacgataatatgatagtgtgtatgacaggggaaagccctgggatggcagcatttggagccttatgacccacgtccagaatggcccctggggaaggcataggaagcaaatatgagatgtatgaaaatggtggaggagtagtggagccagtacataaaaagtttgtctttgcagattggcagaaaagcaacttgacactgcaaaattgagtgtgcttgacacttttgtcaatggattgactctttatcttcagtctttttttctaacctcagtgccccatttttacaggacagtgaacatggaaccagcctgaacagggaaatggacagcctgggcagcaaccattccattccaagcatgtccgtgagcacaggcagccagagcagcagtgtgaacagcatgcaggaagtcatggacgagagcagttccgaacttgtcatgatgcacgatgacgaaagcacaatcaattccagctcctccgtcgtgcataagaaagtaggtttcttggtaccctccacagaggtgagctttgtcaatcatagcgaatccagttcaagtcacttagcttccagatgtttcagttacctttttgcaactgcagtgtggtactaaacctggcatgtgacagttttcttacagtcaaaaagtaacaaaggactacacaggctacatctgtgcctatttcttcatctccctctctcattactctgatgtccatcatcatcaataaataagttgaagaatttgataagtccttctctaaaccaataatcttaatactgtagaccttcaagtcttcctgagtgtacctgttggttgtgcccttttagaagtatgctctttcaaaagtatgtttcttggctgggcgtggtggctcacatctgtaatcccagccctttgggaggcctaggcgggtggatcacttgaggtcaggagtttgagaccagcctggccaacatggcgaaaccccgtctttactaaaaatacaaaaaatagccgggcctggtgacatatgcctgtaatcccagctactcgagaggctgaggcaggagaattgcttgaacccaggaggcagaggttgtagtgagccgagatcgcgccattgcactccagcctgggcaacagagtgagactcaaaaaaaaaaaaaaaaaaaaa

SEQ ID NO: 21178 - DNA, 555 bp, Homo sapiens
  misc_feature 1..555: note = ENST00000538601
  source 1..555: mol_type = unassigned DNA
caaaggctgttacttgaaagaacacactgcttggttcataaaaaaccacttcaggaagtggagatcgctgccattactcatggagccttgcatggactagcctacctacattctcatgcattgattcatagggatattaaagcaggaaatattcttctaacagagccaggtcaggtaaaactagctgattttggatctgcttcaatggcttctcctgccaactccttcgtgggcacaccttactggatggctccagaggtgatcttagctatggatgaaggacagtatgatgggaaagttgatatttggtcacttggcatcacttgtattgaattggcggaacggaagccgccccttttcaacatgaatgcaatgagtgccttatatcacattgcccagaatgactccccaacgttacagtctaatgaatggacagactcctttaggagatttgttgattactgcttgcagaaaatacctcaggaaaggccaacatcagcagaactattaaggcatgactttgttcgacgagaccggccactacgtgtcctcatt

SEQ ID NO: 21179 - DNA, 597 bp, Homo sapiens
  misc_feature 1..597: note = ENST00000535570
  source 1..597: mol_type = unassigned DNA
caggctggagtgcaatggctcaatctcggctcaccgcaacctcagcctcccgggttcaagcgattctcctgcctcagcctccctagtagctgggattacaggtactgaagatttaccccccaaaaaaaattgtcaatgagaaataaagctaactgatatcaaaaagcagagcctgctctactggccatcatgcgtaaaggggtgctgaaggacccagagattgccgatctattctacaaagatgatcctgaggaactttttattggtttgcatgaaattggacatggaagttttggagcagtttattttgctacaaatgctcacaccagtgaggtggtggcaattaagaagatgtcctatagtgggaagcagacccatgagaaatggcaagatattcttaaggaagttaaatttttacgacaattgaagcatcctaatactattgagtacaaaggctgttacttgaaagaacacactgcttggttggtgatggaatattgcttaggctcagcctctgatttattagaagttcataaaaaaccacttcaggaagtggagatcgctgccattactcatggagccttgcatggactagcc

SEQ ID NO: 21180 - DNA, 881 bp, Homo sapiens
  misc_feature 1..881: note = ENST00000541186
  source 1..881: mol_type = unassigned DNA
tgctgatagcctggggtgttcttataacttaagttcagttttttctttcctgtgaggaagaggcagttttttaaatgaagccatctctggggaaatcgtattgattgttgtagctaaatacggaatttttaaagtctttagtatgttgaactggaaatataggacatgcgtttgagatctactgtgaggcaacttttaccttgatctcttctgatatgactgaggcctatatccatcctttaaaaaattcttattaatcatgcggaagaagaaatctttccaggagcagcaaactcaggaccggagagataagataaatatataaagcttcagggtatgaagccatacacatagtagaaactgaggcaaaggaaagagttcatgtcccgcctgaaggcagtcaaatcaggttgcatcataaatacaaaggactgaagttataaaagagaaaagagaagtttgctgctaaaatgaatctgagcaatatggaatattttgtgccacacacaaaaaggtactgaagatttaccccccaaaaaaaattgtcaatgagaaataaagctaactgatatcaaaaagcagagcctgctctactggccatcatgcgtaaaggggtgctgaaggacccagagattgccgatctattctacaaagatgatcctgaggaactttttattggtttgcatgaaattggacatggaagttttggagcagtttattttgctacaaatgctcacaccagtgaggtggtggcaattaagaagatgtcctatagtgggaagcagacccatgagaaatggcaagatattcttaaggaagttaaatttttacgacaattgaagcatcctaatactattgagtacaaaggctgttacttgaaa

SEQ ID NO: 21181 - DNA, 578 bp, Homo sapiens
  misc_feature 1..578: note = ENST00000541878
  source 1..578: mol_type = unassigned DNA
gttgtaacaggaaatacttcagcttgcaatactgatagtaatgtgtggcacccagatcacgctgtttttatctgcagttcctttttagtattgtacaaagtttcttgaagatttttaaatacataagtttaaaagagaattaactttcaatttgcaaattaaaatgagaatggttgccttttcttcattatcaagagatggttgcatcataaatacaaaggactgaagttataaaagagaaaagagaagtttgctgctaaaatgaatctgagcaatatggaatattttgtgccacacacaaaaaggtactgaagatttaccccccaaaaaaaattgtcaatgagaaataaagctaactgatatcaaaaagcagagcctgctctactggccatcatgcgtaaaggggtgctgaaggacccagagattgccgatctattctacaaagatgatcctgaggaactttttattggtttgcatgaaattggacatggaagttttggagcagtttattttgctacaaatgctcacaccagtgaggtggtggcaattaagaagatgtcctatagtgggaagcagac

SEQ ID NO: 21182 - DNA, 613 bp, Homo sapiens
  misc_feature 1..613: note = ENST00000542902
  source 1..613: mol_type = unassigned DNA
ctctttaagcctcacttaaaaaactaagtgtctgtaataacttcctttctcgggatgaaggtgctgatagcctggggtgttcttataacttaagttcagttttttctttcctgtgaggaagaggcagttttttaaatgaagccatctctggggaaatcgtattgattgttgtagctaaatacggaatttttaaagtctttagtatgttgaactggaaatataggacatgcgtttgagatctactgtgagttgcatcataaatacaaaggactgaagttataaaagagaaaagagaagtttgctgctaaaatgaatctgagcaatatggaatattttgtgccacacacaaaaaggtactgaagatttaccccccaaaaaaaattgtcaatgagaaataaagctaactgatatcaaaaagcagagcctgctctactggccatcatgcgtaaaggggtgctgaaggacccagagattgccgatctattctacaaagatgatcctgaggaactttttattggtttgcatgaaattggacatggaagttttggagcagtttattttgctacaaatgctcacaccagtgaggtggtggcaattaagaagatgtcctata

SEQ ID NO: 21183 - DNA, 641 bp, Homo sapiens
  misc_feature 1..641: note = ENST00000542532
  source 1..641: mol_type = unassigned DNA
agcagcagcggcggcggccgcgggagggtccttgtggcgccgggcggcggggtcctgcgtggagagtgggacgcaacgccgagaccgcgagcagaggctgcgcacagccggatccggcactcagcgaccggacccaaggatccgccggggaacaagccacaggagagcgactcaggaacaagtgtgggagaggaagcggcggcggcggcgccgggcccgggggtggtgacagcaggtctgaggctggagtgcagtggcatgattttggctgactgcaacctctgcctcccaggttcaagcaattctccggcctcagcctcccgaggagctgggactacaggttgcatcataaatacaaaggactgaagttataaaagagaaaagagaagtttgctgctaaaatgaatctgagcaatatggaatattttgtgccacacacaaaaaggtactgaagatttaccccccaaaaaaaattgtcaatgagaaataaagctaactgatatcaaaaagcagagcctgctctactggccatcatgcgtaaaggggtgctgaaggacccagagattgccgatctattctacaaagatgatcctgaggaactttttattggtttgcatgaaattggacatggaagttttgga

SEQ ID NO: 21184 - DNA, 590 bp, Homo sapiens
  misc_feature 1..590: note = ENST00000541786
  source 1..590: mol_type = unassigned DNA
gtggcacccagatcacgctgtttttatctgcagttcctttttagtattgtacaaagtttcttgaagatttttaaatacataagtttaaaagagaattaactttcaatttgcaaattaaaatgagaatggttgccttttcttcattatcaagagatggttgcatcataaatacaaaggactgaagttataaaagagaaaagagaagtttgctgctaaaatgaatctgagcaatatggaatattttgtgccacacacaaaaagcatctggcacaatgtttttgtttggtttggtttggtgttgtaaagagagaggatcttgctatgtttgccagactggtctcaaactcctggtctcaagtcatcctctcaccttggcctcccaaagcattaggattacagacatgagacatcacacccagccccagcacaatgttgaatgtactgaagatttaccccccaaaaaaaattgtcaatgagaaataaagctaactgatatcaaaaagcagagcctgctctactggccatcatgcgtaaaggggtgctgaaggacccagagattgccgatctattctacaaagatgatcctgagg

SEQ ID NO: 21185 - DNA, 594 bp, Homo sapiens
  misc_feature 1..594: note = ENST00000539872
  source 1..594: mol_type = unassigned DNA
tttctcgggatgaaggtgctgatagcctggggtgttcttataacttaagttcagttttttctttcctgtgaggaagaggcagttttttaaatgaagccatctctggggaaatcgtattgattgttgtagctaaatacggaatttttaaagtctttagtatgttgaactggaaatataggacatgcgtttgagatctactgtgagaaaccaaggcttaaagggatgaagtaataaaaagctagtagaggccgggcacggtggctcacgcctgtaatcccagcactttgggaggctgaggcagacggatcacgaggtcaagagattgagaccatcccggccaacatggttgcatcataaatacaaaggactgaagttataaaagagaaaagagaagtttgctgctaaaatgaatctgagcaatatggaatattttgtgccacacacaaaaaggtactgaagatttaccccccaaaaaaaattgtcaatgagaaataaagctaactgatatcaaaaagcagagcctgctctactggccatcatgcgtaaaggggtgctgaaggacccagagattgccgatctattctacaaagatga

SEQ ID NO: 21186 - DNA, 588 bp, Homo sapiens
  misc_feature 1..588: note = ENST00000542692
  source 1..588: mol_type = unassigned DNA
ggacagcagcagcggcggcggccgcgggagggtccttgtggcgccgggcggcggggtcctgcgtggagagtgggacgcaacgccgagaccgcgagcagaggctgcgcacagccggatccggcactcagcgaccggacccaaggatccgccggggaacaagccacaggagagcgactcaggaacaagtgtgggagaggaagcggcggcggcggcgccgggcccgggggtggtgacagcaggtctgaggttgcatcataaatacaaaggactgaagttataaaagagaaaagagaagtttgctgctaaaatgaatctgagcaatatggaatattttgtgccacacacaaaaagcatctggcacaatgtttttgtttggtttggtttggtgttgtaaagagagaggatcttgctatgtttgccagactggtctcaaactcctggtctcaagtcatcctctcaccttggcctcccaaagcattaggattacagacatgagacatcacacccagccccagcacaatgttgaatgtactgaagatttaccccccaaaaaaaattgtcaatgagaaataaagctaactgatatca

SEQ ID NO: 21187 - DNA, 4119 bp, Homo sapiens
  misc_feature 1..4119: note = ENST00000508802
  source 1..4119: mol_type = unassigned DNA
ctcttcggctgctgctcctggtgccgccaccgtccgccggtgcctgttgctgccgccgccgcgggacctgctgtgtcctcagctgggtggagaagaggcgggcgccgagccgaggggagccccctccccgtccccccgcggcgggaagagcgcagccagccgggtgcgatggactccccgcccgcccaggccgtccccaggatgcccccaagcacctgcgcgtcccggcccggccccgggctctgagcgcgccgcggcacaggtttctgcatatgaagtgtgtaaaatagattgcttgatccaaaacagaaaaacagtgataactgttttgctgagttcccagacccttcccaagatggaaccaataacattcacagcaaggaaacatctgctttctaacgaggtctcggtggattttggcctgcagctggtgggctccctgcctgtgcattccctgaccaccatgcccatgctgccctgggttgtggctgaggtgcgaagactcagcaggcagtccaccagaaaggaacctgtaaccaagcaagtccggctttgcgtttcaccctctggactgagatgtgaacctgagccagggagaagtcaacagtgggatcccctgatctattccagcatctttgagtgcaagcctcagcgtgttcacaaactgattcacaacagtcatgacccaagttactttgcttgtctgattaaggaagacgctgtccaccggcagagtatctgctatgtgttcaaagccgatgatcaaacaaaagtgcctgagatcatcagctccatccgtcaggcggggaagatcgcccggcaggaggagctgcactgcccgtccgagttcgacgacacgttttccaagaagttcgaggtgctcttctgcggccgcgtgacggtggcgcacaagaaggctccgccggccctgatcgacgagtgcatcgagaagttcaatcacgtcagcggcagccgggggtccgagagcccccgccccaacccgccccatgccgcgcccacagggagccaggagcctgtgcgcaggcccatgcgcaagtccttctcccagcccggcctgcgctcgctggcctttaggaaggagctgcaggatgggggcctccgaagcagcggcttcttcagctccttcgaggagagcgacattgagaaccacctcattagcggacacaatattgtgcagcccacagatatcgaggaaaatcgaactatgctcttcacgattggccagtctgaagtttacctcatcagtcctgacaccaaaaaaatagcattggagaaaaattttaaggagatatccttttgctctcagggcatcagacacgtggaccactttgggtttatctgtcgggagtcttccggaggtggcggctttcattttgtctgttacgtgtttcagtgcacaaatgaggctctggttgatgaaattatgatgaccctgaaacaggccttcacggtggccgcagtgcagcagacagctaaggcgccagcccagctgtgtgagggctgccccctgcaaagcctgcacaagctctgtgagaggatagagggaatgaattcttccaaaacaaaactagaactgcaaaagcacctgacgacattaaccaatcaggagcaggcgactatttttgaagaggttcagaaattgagaccgagaaatgagcagcgagagaatgaattgattatttcttttctgagatgtttatatgaagagaaacagaaagaacacatccatattggggagatgaagcagacatcgcagatggcagcagagaatattggaagtgaattaccacccagtgccactcgatttaggctagatatgctgaaaaacaaagcaaagagatctttaacagagtctttagaaagtattttgtcccggggtaataaagccagaggcctgcaggaacactccatcagtgtggatctggatagctccctgtctagtacattaagtaacaccagcaaagagccatctgtgtgtgaaaaggaggccttgcccatctctgagagctcctttaagctcctcggctcctcggaggacctgtccagtgactcggagagtcatctcccagaagagccagctccgctgtcgccccagcaggccttcaggaggcgagcaaacaccctgagtcacttccccatcgaatgccaggaacctccacaacctgcccgggggtccccgggggtttcgcaaaggaaacttatgaggtatcactcagtgagcacagagacgcctcatgaacgaaatgtggatccttcacctgtgggtgagtctaagcaccgcccaggtcagtcttcagctcctgctcctccacctcgtcttaacccctccgcctcctcgccaaacttttttaagtacctaaaacataattccagtggagaacaaagtgggaatgctgtgccaaagagcatctcctaccgtaatgccctgcggaaaaaacttcattcttcttcctctgtgccaaattttctaaaatttctggctcctgtagatgaaaataacacctctgattttatgaacacaaaaagggactttgaatccaaagcaaaccatcttggtgattctggtgggactcctgtgaagacccggaggcattcctggaggcagcagatattcctccgagtagccaccccgcagaaggcgtgcgattcttccagcagatatgaagattattcagagctgggagagcttcccccacgatctcctttagaaccagtttgtgaagatgggccctttggccccccaccagaggaaaagaaaaggacatctcgtgagctccgagagctgtggcaaaaggctattcttcaacagatactgctgcttagaatggagaaggaaaatcagaagctccaagcctctgaaaatgatttgctgaacaagcgcctgaagctcgattatgaagaaattactccctgtcttaaagaagtaactacagtgtgggaaaagatgcttagcactccaggaagatcaaaaattaagtttgacatggaaaaaatgcactcggctgttgggcaaggtgtgccacgtcatcaccgaggtgaaatctggaaatttctagctgagcaattccaccttaaacaccagtttcccagcaaacagcagccaaaggatgtgccatacaaagaactcttaaagcagctgacttcccagcagcatgcgattcttattgaccttgggcgaacctttcctacacacccatacttctctgcccagcttggagcaggacagctatcgctttacaacattttgaaggcctactcacttctagaccaggaagtgggatattgccaaggtctcagctttgtagcaggcattttgcttcttcatatgagtgaggaagaggcgtttaaaatgctcaagtttctgatgtttgacatggggctgcggaaacagtatcggccagacatgattattttacagatggaaaagaccatcaatcaggtatttgaaatggacatcgctaaacagttacaagcttatgaagttgagtaccacgtccttcaagaagaacttatcgattcctctcctctcagtgacaaccaaagaatggataaattagagaaaaccaacagcagcttacgcaaacagaaccttgacctccttgaacagttgcaggtggcaaatggtaggatccaaagccttgaggccaccattgagaagctcctgagcagtgagagcaagctgaagcaggccatgcttaccttagaactggagcggtcggccctgctgcagacggtggaggagctgcggcggcggagcgcagagcccagcgaccgggagcctgagtgcacgcagcccgagcccacgggcgactgacagctctgcaggagagattgcaacaccatcccacactgtccaggccttaactgagagggacagaagacgctggaaggagagaaggaagcgggaagtgtgcttctcagggaggaaaccggcttgccagcaagtagattcttacgaactccaacttgcaattcagggggcatgtcccagtgttttttttgttgtttttagatactaaatcgtcccttctccagtcctgattactgtacacagtagctttagatggcgtggacgtgaataaatgcaacttatgtttt

SEQ ID NO: 21188 - DNA, 5700 bp, Homo sapiens
  misc_feature 1..5700: note = ENST00000261439
  source 1..5700: mol_type = unassigned DNA
ctcttcggctgctgctcctggtgccgccaccgtccgccggtgcctgttgctgccgccgccgcgggacctgctgtgtcctcagctgggtggagaagaggcgggcgccgagccgaggggagccccctccccgtccccccgcggcgggaagagcgcagccagccgggtgcgatggactccccgcccgcccaggccgtccccaggatgcccccaagcacctgcgcgtcccggcccggccccgggctctgagcgcgccgcggcacaggtttctgcatatgaagtgtgtaaaatagattgcttgatccaaaacagaaaaacagtgataactgttttgctgagttcccagacccttcccaagatggaaccaataacattcacagcaaggaaacatctgctttctaacgaggtctcggtggattttggcctgcagctggtgggctccctgcctgtgcattccctgaccaccatgcccatgctgccctgggttgtggctgaggtgcgaagactcagcaggcagtccaccagaaaggaacctgtaaccaagcaagtccggctttgcgtttcaccctctggactgagatgtgaacctgagccagggagaagtcaacagtgggatcccctgatctattccagcatctttgagtgcaagcctcagcgtgttcacaaactgattcacaacagtcatgacccaagttactttgcttgtctgattaaggaagacgctgtccaccggcagagtatctgctatgtgttcaaagccgatgatcaaacaaaagtgcctgagatcatcagctccatccgtcaggcggggaagatcgcccggcaggaggagctgcactgcccgtccgagttcgacgacacgttttccaagaagttcgaggtgctcttctgcggccgcgtgacggtggcgcacaagaaggctccgccggccctgatcgacgagtgcatcgagaagttcaatcacgtcagcggcagccgggggtccgagagcccccgccccaacccgccccatgccgcgcccacagggagccaggagcctgtgcgcaggcccatgcgcaagtccttctcccagcccggcctgcgctcgctggcctttaggaaggagctgcaggatgggggcctccgaagcagcggcttcttcagctccttcgaggagagcgacattgagaaccacctcattagcggacacaatattgtgcagcccacagatatcgaggaaaatcgaactatgctcttcacgattggccagtctgaagtttacctcatcagtcctgacaccaaaaaaatagcattggagaaaaattttaaggagatatccttttgctctcagggcatcagacacgtggaccactttgggtttatctgtcgggagtcttccggaggtggcggctttcattttgtctgttacgtgtttcagtgcacaaatgaggctctggttgatgaaattatgatgaccctgaaacaggccttcacggtggccgcagtgcagcagacagctaaggcgccagcccagctgtgtgagggctgccccctgcaaagcctgcacaagctctgtgagaggatagagggaatgaattcttccaaaacaaaactagaactgcaaaagcacctgacgacattaaccaatcaggagcaggcgactatttttgaagaggttcagaaattgagaccgagaaatgagcagcgagagaatgaattgattatttcttttctgagatgtttatatgaagagaaacagaaagaacacatccatattggggagatgaagcagacatcgcagatggcagcagagaatattggaagtgaattaccacccagtgccactcgatttaggctagatatgctgaaaaacaaagcaaagagatctttaacagagtctttagaaagtattttgtcccggggtaataaagccagaggcctgcaggaacactccatcagtgtggatctggatagctccctgtctagtacattaagtaacaccagcaaagagccatctgtgtgtgaaaaggaggccttgcccatctctgagagctcctttaagctcctcggctcctcggaggacctgtccagtgactcggagagtcatctcccagaagagccagctccgctgtcgccccagcaggccttcaggaggcgagcaaacaccctgagtcacttccccatcgaatgccaggaacctccacaacctgcccgggggtccccgggggtttcgcaaaggaaacttatgaggtatcactcagtgagcacagagacgcctcatgaacgaaaggactttgaatccaaagcaaaccatcttggtgattctggtgggactcctgtgaagacccggaggcattcctggaggcagcagatattcctccgagtagccaccccgcagaaggcgtgcgattcttccagcagatatgaagattattcagagctgggagagcttcccccacgatctcctttagaaccagtttgtgaagatgggccctttggccccccaccagaggaaaagaaaaggacatctcgtgagctccgagagctgtggcaaaaggctattcttcaacagatactgctgcttagaatggagaaggaaaatcagaagctccaagcctctgaaaatgatttgctgaacaagcgcctgaagctcgattatgaagaaattactccctgtcttaaagaagtaactacagtgtgggaaaagatgcttagcactccaggaagatcaaaaattaagtttgacatggaaaaaatgcactcggctgttgggcaaggtgtgccacgtcatcaccgaggtgaaatctggaaatttctagctgagcaattccaccttaaacaccagtttcccagcaaacagcagccaaaggatgtgccatacaaagaactcttaaagcagctgacttcccagcagcatgcgattcttattgaccttgggcgaacctttcctacacacccatacttctctgcccagcttggagcaggacagctatcgctttacaacattttgaaggcctactcacttctagaccaggaagtgggatattgccaaggtctcagctttgtagcaggcattttgcttcttcatatgagtgaggaagaggcgtttaaaatgctcaagtttctgatgtttgacatggggctgcggaaacagtatcggccagacatgattattttacagatccagatgtaccagctctcgaggttgcttcatgattaccacagagacctctacaatcacctggaggagcacgagatcggccccagcctctacgctgccccctggttcctcaccatgtttgcctcacagttcccgctgggattcgtagccagagtctttgatatgatttttcttcagggaacagaggtcatatttaaagtggctttaagtctgttgggaagccataagcccttgattctgcagcatgaaaacctagaaaccatagttgactttataaaaagcacgctacccaaccttggcttggtacagatggaaaagaccatcaatcaggtatttgaaatggacatcgctaaacagttacaagcttatgaagttgagtaccacgtccttcaagaagaacttatcgattcctctcctctcagtgacaaccaaagaatggataaattagagaaaaccaacagcagcttacgcaaacagaaccttgacctccttgaacagttgcaggtggcaaatggtaggatccaaagccttgaggccaccattgagaagctcctgagcagtgagagcaagctgaagcaggccatgcttaccttagaactggagcggtcggccctgctgcagacggtggaggagctgcggcggcggagcgcagagcccagcgaccgggagcctgagtgcacgcagcccgagcccacgggcgactgacagctctgcaggagagattgcaacaccatcccacactgtccaggccttaactgagagggacagaagacgctggaaggagagaaggaagcgggaagtgtgcttctcagggaggaaaccggcttgccagcaagtagattcttacgaactccaacttgcaattcagggggcatgtcccagtgttttttttgttgtttttagatactaaatcgtcccttctccagtcctgattactgtacacagtagctttagatggcgtggacgtgaataaatgcaacttatgttttcttgttggttcctttttgagtgtcactgtgtttgtaaagagcattcacaatacggtggaatttcaaaagctggaagagctcgagatcatgcctcaggcaaaggcgtgggtccatcgttcttccgagagggtttgtgtggcgactacaccctcagcgtccctggcaaggtgcagttggctctcgcccattcttgttatggaaacctaagatgatcattgggaagatcagtgatcttgggtcattgatccctggctcagaggatagcggtttccatcataaaccaagatgatgagttcagcctttatccctcgtggttccactagatgtaacttaaaggagttaacatttgaggactttgttctacatcagattttactatttgaatgtttaagatcactttattgaatttgaagatcatcaaattaaataaaatgatttatttaatttggatatcctgatcactgtcaagtgaaatggatctctctctttggtatttaaggaagtttgtctttaaaaaaaaaatagagtgttttcatacatttttgcttatcccataagtacagttgatcaaagtcatagtaggtaaatgctttatgggacagctgacaccttttagaccctaccaggtattgctagcatgtgagctgcagttgtggggtctgagatatttctttgtggtagtttcatacccatactatagagtcatgtatttatttttgcctgttgtgtgatgtaatgcaatcatgttcctttgagtctccatcccttggaaatctgacttcttgcagaaggagtaggcacatcaagatattcaggggtgccccaagagtctgggactttcaaaaaaaaaagatcaggctgaaactgcagtcagatttatgacagctgacagtttttcagaggtcgcacacagtgactctcctctctcaggatgacgaggacctgtgccttcaacaagcaaaatgctgctcacggttgtcctgcttgcagccagtcactgtgtaaagcctctctgatgtgcacttaagagtgggttgctttctcacaaagatggggttctgtgcagtcacaggtcacttccttgacaacacaatcatttctgatctttatcactgtaaccacgtcttctattccataggagtttcttttgattctctcagttgcggggggcatctcttaatcctggggtaaaaggagagattgccatacttagactcactgtgagtctccccggccatttcacgaggagaccacagtgctgccaccagtgcctaaacaggtggctggcattcgagacttcctcctgttccctgggtcagaggatagcggtttccatcataaaccaagatgatgagttcagcctttatccctcgtggttccgctagatgtaacttataggagttaacatttgaggactttgttctgcatcagatcttactatttgaatgtttactgttggattttgggcatcttattactgttactcaaaaacattgactctgcatcaagaaagaaacaagaaagcaataaaacaagaaataattcatgctcaca

SEQ ID NO: 21189 - DNA, 1567 bp, Homo sapiens
  misc_feature 1..1567: note = ENST00000402522
  source 1..1567: mol_type = unassigned DNA
tgctcctggtgccgccaccgtccgccggtgcctgttgctgccgccgccgcgggacctgctgtgtcctcagctgggtggagaagaggcgggcgccgagccgaggggagccccctccccgtccccccgcggcgggaagagcgcagccagccgggtgcgatggactccccgcccgcccaggccgtccccaggatgcccccaagcacctgcgcgtcccggcccggccccgggctctgagcgcgccgcggcacaggtttctgcatatgaagtgtgtaaaatagattgcttgatccaaaacagaaaaacagtgataactgttttgctgagttcccagacccttcccaagatggaaccaataacattcacagcaaggaaacatctgctttctaacgaggtctcggtggattttggcctgcagctggtgggctccctgcctgtgcattccctgaccaccatgcccatgctgccctgggttgtggctgaggtgcgaagactcagcaggcagtccaccagaaaggaacctgtaaccaagcaagtccggctttgcgtttcaccctctggactgagatgtgaacctgagccagggagaagtcaacagtgggatcccctgatctattccagcatctttgagtgcaagcctcagcgtgttcacaaactgattcacaacagtcatgacccaagttactttgcttgtctgattaaggaagacgctgtccaccggcagagtatctgctatgtgttcaaagccgatgatcaaacaaaatgctcatcatcactgtaggggacctttgaaagagctgccggagaaggtgaggaagaaagccctgcctggaaagcaacagtgaaccaccagtgtcagcaacgtgaagcttgctgcaaggcctgcagtcatgatgaacccagcagcttctagttcatcccagtggccctgagactatttatcctgtgacttcacacgcgcttggaagttttgttgtgatcttcgctgagtctgtgcggaaatcacaggctagattttagattttttacttttcagcatgtgacttaaagttctgttgacttggggaaagggctgataatcttgtgctaaatcactgatggaatataaattaaaatctccatctctcagtcaatccaagtgtccatcaatggtagactggataaagaaaatgtggtacatacacaccatggaatactatgcagccataaaaagaaacgagatcacgtcctttctaggaacatggatggagctggaaaccattatcctcagcaaactaacaaaggaagagaaaaccaaacaccacatgttctcatttataagtgggagctgaacaatgagaacacgtggacacagggaggagaacaacacacactggggcctgtcacggggcggggtgaggggagggagagcattaggaaaaacagctaatacatgctaggcttgatatctaggcgatgggttggtaggtgcagcaaaccaccatggcacacatttacctatgtaacaaacctgcacatcctgcacatgtaccctgaaacttagaaataaaaatttttcaaaagggaaaaa

SEQ ID NO: 21190 - DNA, 1987 bp, Homo sapiens
  misc_feature 1..1987: note = ENST00000446803
  source 1..1987: mol_type = unassigned DNA
gccccgcgggcgcgacctctcggggcagtgacgaactgggtggagcccgccgccgccgccgccgccgccggggagagcgatgccccggccccgccgctccccaagcccgcccccggccgcccgcgggcccacgggccggcggcgggagtgagcgggagccggcgggcgaagagccgccgcccggcccgcgatgtcaccattgttcagctgggtggccaaggtgcctgagatcatcagctccatccgtcaggcggggaagatcgcccggcaggaggagctgcactgcccgtccgagttcgacgacacgttttccaagaagttcgaggtgctcttctgcggccgcgtgacggtggcgcacaagaaggctccgccggccctgatcgacgagtgcatcgagaagttcaatcacgtcagcggcagccgggggtccgagagcccccgccccaacccgccccatgccgcgcccacagggagccaggagcctgtgcgcaggcccatgcgcaagtccttctcccagcccggcctgcgctcgctggcctttaggaaggagctgcaggatgggggcctccgaagcagcggcttcttcagctccttcgaggagagcgacattgagaaccacctcattagcggacacaatattgtgcagcccacagatatcgaggaaaatcgaactatgctcttcacgattggccagtctgaagtttacctcatcagtcctgacaccaaaaaaatagcattggagaaaaattttaaggagatatccttttgctctcagggcatcagacacgtggaccactttgggtttatctgtcgggagtcttccggaggtggcggctttcattttgtctgttacgtgtttcagtgcacaaatgaggctctggttgatgaaattatgatgaccctgaaacaggccttcacggtggccgcagtgcagcagacagctaaggcgccagcccagctgtgtgagggctgccccctgcaaagcctgcacaagctctgtgagaggatagagggaatgaattcttccaaaacaaaactagaactgcaaaagcacctgacgacattaaccaatcaggagcaggcgactatttttgaagaggttcagaaattgagaccgagaaatgagcagcgagagaatgaattgattatttcttttctgagatgtttatatgaagagaaacagaaagaacacatccatattggggagatgaagcagacatcgcagatggcagcagagaatattggaagtgaattaccacccagtgccactcgatttaggctagatatgctgaaaaacaaagcaaagagatctttaacagagtctttagaaagtattttgtcccggggtaataaagccagaggcctgcaggaacactccatcagtgtggatctggatagctccctgtctagtacattaagtaacaccagcaaagagccatctgtgtgtgaaaaggaggccttgcccatctctgagagctcctttaagctcctcggctcctcggaggacctgtccagtgactcggagagtcatctcccagaagagccagctccgctgtcgccccagcaggccttcaggaggcgagcaaacaccctgagtcacttccccatcgaatgccaggaacctccacaacctgcccgggggtccccgggggtttcgcaaaggaaacttatgaggtatcactcagtgagcacagagacgcctcatgaacgaaaggactttgaatccaaagcaaaccatcttggtgattctggtgggactcctgtgaagacccggaggcattcctggaggcagcagatattcctccgagtagccaccccgcagaaggcgtgcgattcttccagcagatatgaagattattcagagctgggagagcttcccccacgatctcctttagaaccagtttgtgaagatgggccctttggccccccaccagaggaaaagaaaaggacatctcgtgagctccgagagctgtggcaaaaggctatt

SEQ ID NO: 21191 - DNA, 455 bp, Homo sapiens
  misc_feature 1..455: note = ENST00000491553
  source 1..455: mol_type = unassigned DNA
cgaggagagcgacattgagaaccacctcattagcggacacaatattgtgcagcccacagatatcgaggaaaatcgaactatgctcttcacgattggccagtctgaagtttacctcatcagtcctgacaccaaaaaaatagcattggagaaaaattttaaggagatatccttttgctctcagggcatcagacacgtggaccactttgggtttatctgtcgggagtcttccggaggtggcggctttcattttgtctgttacgtgtttcagtgcacaaatgaggctctggtgagagaggacaagcaattcttaccttggaaccttctttacaaggaattttagctccactgatttttctgtccttagggaaaaccagatggtcattgacatatcattatttgtctttagttatttacttatgactatttagtaagcagctaatacacatctgaagctt

SEQ ID NO: 21192 - DNA, 2977 bp, Homo sapiens
  misc_feature 1..2977: note = ENST00000510573
  source 1..2977: mol_type = unassigned DNA
gtgcacaaatgaggctctggttgatgaaattatgatgaccctgaaacaggccttcacggtggccgcagtgcagcagacagctaaggcgccagcccagctgtgtgagggctgccccctgcaaagcctgcacaagctctgtgagaggatagagggaatgaattcttccaaaacaaaactagaactgcaaaagcacctgacgacattaaccaatcaggagcaggcgactatttttgaagaggttcagaaattgagaccgagaaatgagcagcgagagaatgaattgattatttcttttctgagatgtttatatgaagagaaacagaaagaacacatccatattggggagatgaagcagacatcgcagatggcagcagagaatattggaagtgaattaccacccagtgccactcgatttaggctagatatgctgaaaaacaaagcaaagagatctttaacagagtctttagaaagtattttgtcccggggtaataaagccagaggcctgcaggaacactccatcagtgtggatctggatagctccctgtctagtacattaagtaacaccagcaaagagccatctgtgtgtgaaaaggaggccttgcccatctctgagagctcctttaagctcctcggctcctcggaggacctgtccagtgactcggagagtcatctcccagaagagccagctccgctgtcgccccagcaggccttcaggaggcgagcaaacaccctgagtcacttccccatcgaatgccaggaacctccacaacctgcccgggggtccccgggggtttcgcaaaggaaacttatgaggtatcactcagtgagcacagagacgcctcatgaacgaaacatctcctaccgtaatgccctgcggaaaaaacttcattcttcttcctctgtgccaaattttctaaaatttctggctcctgtagatgaaaataacacctctgattttatgaacacaaaaagggactttgaatccaaagcaaaccatcttggtgattctggtgggactcctgtgaagacccggaggcattcctggaggcagcagatattcctccgagtagccaccccgcagaaggcgtgcgattcttccagcagatatgaagattattcagagctgggagagcttcccccacgatctcctttagaaccagtttgtgaagatgggccctttggccccccaccagaggaaaagaaaaggacatctcgtgagctccgagagctgtggcaaaaggctattcttcaacagatactgctgcttagaatggagaaggaaaatcagaagctccaagcctctgaaaatgatttgctgaacaagcgcctgaagctcgattatgaagaaattactccctgtcttaaagaagtaactacagtgtgggaaaagatgcttagcactccaggaagatcaaaaattaagtttgacatggaaaaaatgcactcggctgttgggcaaggtgtgccacgtcatcaccgaggtgaaatctggaaatttctagctgagcaattccaccttaaacaccagtttcccagcaaacagcagccaaaggatgtgccatacaaagaactcttaaagcagctgacttcccagcagcatgcgattcttattgaccttgggcgaacctttcctacacacccatacttctctgcccagcttggagcaggacagctatcgctttacaacattttgaaggcctactcacttctagaccaggaagtgggatattgccaaggtctcagctttgtagcaggcattttgcttcttcatatgagtgaggaagaggcgtttaaaatgctcaagtttctgatgtttgacatggggctgcggaaacagtatcggccagacatgattattttacagatccagatgtaccagctctcgaggttgcttcatgattaccacagagacctctacaatcacctggaggagcacgagatcggccccagcctctacgctgccccctggttcctcaccatgtttgcctcacagttcccgctgggattcgtagccagagtctttgatatgatttttcttcagggaacagaggtcatatttaaagtggctttaagtctgttgggaagccataagcccttgattctgcagcatgaaaacctagaaaccatagttgactttataaaaagcacgctacccaaccttggcttggtacagatggaaaagaccatcaatcaggtatttgaaatggacatcgctaaacagttacaagcttatgaagttgagtaccacgtccttcaagaagaacttatcgattcctctcctctcagtgacaaccaaagaatggataaattagagaaaaccaacagcagcttacgcaaacagaaccttgacctccttgaacagttgcaggtggcaaatggtaggatccaaagccttgaggccaccattgagaagctcctgagcagtgagagcaagctgaagcaggccatgcttaccttagaactggagcggtcggccctgctgcagacggtggaggagctgcggcggcggagcgcagagcccagcgaccgggagcctgagtgcacgcagcccgagcccacgggcgactgacagctctgcaggagagattgcaacaccatcccacactgtccaggccttaactgagagggacagaagacgctggaaggagagaaggaagcgggaagtgtgcttctcagggaggaaaccggcttgccagcaagtagattcttacgaactccaacttgcaattcagggggcatgtcccagtgttttttttgttgtttttagatactaaatcgtcccttctccagtcctgattactgtacacagtagctttagatggcgtggacgtgaataaatgcaacttatgttttcttgttggttcctttttgagtgtcactgtgtttgtaaagagcattcacaatacggtggaatttcaaaagctggaagagctcgagatcatgcctcaggcaaaggcgtgggtccatcgttcttccg

SEQ ID NO: 21193 - DNA, 530 bp, Homo sapiens
  misc_feature 1..530: note = ENST00000513936
  source 1..530: mol_type = unassigned DNA
gaatgaattcttccaaaacaaaactagaactgcaaaagcacctgacgacattaaccaatcaggagcaggcgactatttttgaagaggttcagaaattgagaccgagaaatgagcagcgagagaatgaattgattatttcttttctgagatgtttatatgaagagaaacagaaagaacacatccatattggggagatgaagcaggagccatctgtgtgtgaaaaggaggccttgcccatctctgagagctcctttaagctcctcggctcctcggaggacctgtccagtgactcggagagtcatctcccagaagagccagctccgctgtcgccccagcaggccttcaggaggcgagcaaacaccctgagtcacttccccatcgaatgccaggaacctccacaacctgcccgggggtccccgggggtttcgcaaaggaaacttatgaggtatcactcagtgagcacagagacgcctcatgaacgaaaggactttgaatccaaagcaaaccatcttggtgattctggtgggact

SEQ ID NO: 21194 - DNA, 580 bp, Homo sapiens
  misc_feature 1..580: note = ENST00000509761
  source 1..580: mol_type = unassigned DNA
agacaccaaagggaggttgtattcaccaactttgaaaagccggctctcgccttgtcttccatcactaaattgagaccgagaaatgagcagcgagagaatgaattgattatttcttttctgagatgtttatatgaagagaaacagaaagaacacatccatattggggagatgaagcagacatcgcagatggcagcagagaatattggaagtgaattaccacccagtgccactcgatttaggctagatatgctgaaaaacaaagcaaagagatctttaacagagtctttagaaagtattttgtcccggggtaataaagccagaggcctgcaggaacactccatcagtgtggatctggatagctccctgtctagtacattaagtaacaccagcaaagagccatctgtgtgtgaaaaggaggccttgcccatctctgagagctcctttaagctcctcggctcctcggaggacctgtccagtgactcggagagtcatctcccagaagagccagctccgctgtcgccccagcaggccttcaggaggcgagcaaacaccctgagtcacttccccatcgaatgccagg

SEQ ID NO: 21195 - DNA, 755 bp, Homo sapiens
  misc_feature 1..755: note = ENST00000443855
  source 1..755: mol_type = unassigned DNA
aaagtattttgtcccggggtaataaagccagaggcctgcaggaacactccatcagtgtggatctggatagctccctgtctagtacattaagtaacaccagcaaagagccatctgtgtgtgaaaaggaggccttgcccatctctgagagctcctttaagctcctcggctcctcggaggacctgtccagtgactcggagagtcatctcccagaagagccagctccgctgtcgccccagcaggccttcaggaggcgagcaaacaccctgagtcacttccccatcgaatgccaggaacctccacaacctgcccgggggtccccgggggtttcgcaaaggaaacttatgaggtatcactcagtgagcacagagacgcctcatgaacgaaatgtggatccttcacctgtgggtgagtctaagcaccgcccaggtcagtcttcagctcctgctcctccacctcgtcttaacccctccgcctcctcgccaaacttttttaagtacctaaaacataattccagtggagaacaaagtgggaatgctgtgccaaagagggactttgaatccaaagcaaaccatcttggtgattctggtgggactcctgtgaagacccggaggcattcctggaggcagcagatattcctccgagtagccaccccgcagaaggcgtgcgattcttccagcagatatgaagattattcagagctgggagagcttcccccacgatctcctttagaaccagtttgtgaagatgggcccttt

SEQ ID NO: 21196 - DNA, 679 bp, Homo sapiens
  misc_feature 1..679: note = ENST00000421339
  source 1..679: mol_type = unassigned DNA
tccctgtctagtacattaagtaacaccagcaaagagccatctgtgtgtgaaaaggaggccttgcccatctctgagagctcctttaagctcctcggctcctcggaggacctgtccagtgactcggagagtcatctcccagaagagccagctccgctgtcgccccagcaggccttcaggaggcgagcaaacaccctgagtcacttccccatcgaatgccaggaacctccacaacctgcccgggggtccccgggggtttcgcaaaggaaacttatgaggtatcactcagtgagcacagagacgcctcatgaacgaaaggactttgaatccaaagcaaaccatcttggtgattctggtgggactcctgtgaagacccggaggcattcctggaggcagcagatattcctccgagtagccaccccgcagaaggcgtgcgattcttccagcagatatgaagaacctcactgtggatcgccatcgttggcctgtactgaagattattcagagctgggagagcttcccccacgatctcctttagaaccagtttgtgaagatgggccctttggccccccaccagaggaaaagaaaaggacatctcgtgagctccgagagctgtggcaaaaggctattcttcaacagatactgctgcttagaatggagaaggaaaatcagaagctccaag

SEQ ID NO: 21197 - DNA, 627 bp, Homo sapiens
  misc_feature 1..627: note = ENST00000469803
  source 1..627: mol_type = unassigned DNA
tcaggaggcgagcaaacaccctgagtcacttccccatcgaatgccaggaacctccacaacctgcccgggggtccccgggggtttcgcaaaggaaacttatgaggtatcactcagtgagcacagagacgcctcatgaacgaaatgtggatccttcacctgtgggtgagtctaagcaccgcccaggtcagtcttcagctcctgctcctccacctcgtcttaacccctccgcctcctcgccaaacttttttaagtacctaaaacataattccagtggagaacaaagtgggaatgctgtgccaaagagcatctcctaccgtaatgccctgcggaaaaaacttcattcttcttcctctgtgccaaattttctaaaatttctggctcctgtagatgaaaataacacctctgattttatgaacacaaaaagggactttgaatccaaagcaaaccatcttggtgattctggtgggactcctgtgaagacccggaggcattcctggaggcagcagatattcctccgagtagccaccccgcagaaggcgtgcgattcttccagcagatatgaagtctagcattcctagaggaacgtcatgcaccaggtaaattccgccatgttgcctcttaatgcgc

SEQ ID NO: 21198 - DNA, 572 bp, Homo sapiens
  misc_feature 1..572: note = ENST00000511238
  source 1..572: mol_type = unassigned DNA
attccaccttaaacaccagtttcccagcaaacagcagccaaaggatgtgccatacaaagaactcttaaagcagctgacttcccagcagcatgcgattcttattgaccttgggcgaacctttcctacacacccatacttctctgcccagcttggagcaggacagctatcgctttacaacattttgaaggcctactcacttctagaccaggaagtgggatattgccaaggtctcagctttgtagcaggcattttgcttcttcatatgagtgaggaagaggcgtttaaaatgctcaagtttctgatgtttgacatggggctgcggaaacagtatcggccagacatgattattttacagatccagatgtaccagctctcgaggttgcttcatgattaccacagagacctctacaatcacctggaggagcacgagatcggccccagcctctacgctgccccctggttcctcaccatgtttgcctcacagttcccgctgggattcgtagccagagtctttgatgccttcatcttgtgggatgtggatccgatccgtgtagatccgatcgctcaccatg

SEQ ID NO: 21199 - DNA, 1713 bp, Homo sapiens
  misc_feature 1..1713: note = ENST00000401554
  source 1..1713: mol_type = unassigned DNA
agatgggctctgaatagaggaaggcaggacactcttgagatgggatggggtttctcacagcaccgtacagggaccacctgcaagatctcttgaggggcttgtgaaaaacacatccctgaggtcaccattcttgacctgctgcttattgagtttctgatgcctgggatgtgcaggtttaacaagcccccagatgatcctaataggattcctgcctgaaaattgctgggtgaaggctcttccccctccaagtgataaagaaggaaaagattgatcctggaagaacatccgttagatgagcaaaattttgtggagcacttcatgaagaggaattactaggtcatttagaaatatgtttgaattgtggatcatcttgtaggcctttctggcatatttctccacttagatccacaagacacatcgaatgtctttttataaaggggttttttaatgcccatgtttgaccctctccacttaacagtcccattctcattttatatgtgaaggtaatctgctttacagaaaaatgtaaaggacctgcacttctctgctttgtgggcgaacctttcctacacacccatacttctctgcccagcttggagcaggacagctatcgctttacaacattttgaaggcctactcacttctagaccaggaagtgggatattgccaaggtctcagctttgtagcaggcattttgcttcttcatatgagtgaggaagaggcgtttaaaatgctcaagtttctgatgtttgacatggggctgcggaaacagtatcggccagacatgattattttacagatccagatgtaccagctctcgaggttgcttcatgattaccacagagacctctacaatcacctggaggagcacgagatcggccccagcctctacgctgccccctggttcctcaccatgtttgcctcacagttcccgctgggattcgtagccagagtctttgatatgatttttcttcagggaacagaggtcatatttaaagtggctttaagtctgttgggaagccataagcccttgattctgcagcatgaaaacctagaaaccatagttgactttataaaaagcacgctacccaaccttggcttggtacagatggaaaagaccatcaatcaggtatttgaaatggacatcgctaaacagttacaagcttatgaagttgagtaccacgtccttcaagaagaacttatcgattcctctcctctcagtgacaaccaaagaatggataaattagagaaaaccaacagcagcttacgcaaacagaaccttgacctccttgaacagttgcaggtggcaaatggtaggatccaaagccttgaggccaccattgagaagctcctgagcagtgagagcaagctgaagcaggccatgcttaccttagaactggagcggtcggccctgctgcagacggtggaggagctgcggcggcggagcgcagagcccagcgaccgggagcctgagtgcacgcagcccgagcccacgggcgactgacagctctgcaggagagattgcaacaccatcccacactgtccaggccttaactgagagggacagaagacgctggaaggagagaaggaagcgggaagtgtgcttctcagggaggaaaccggcttgccagcaagtagattcttacgaactccaacttgcaattcagggggcatgtcccagtgttttttttgttgtttttagatactaaatcg

SEQ ID NO: 21200 - DNA, 2990 bp, Homo sapiens
  misc_feature 1..2990: note = ENST00000407365
  source 1..2990: mol_type = unassigned DNA
acagctgttccccagcctggtagtgaacccagaggcctgtcttgctgtgcagtgggacaggaagttgcatttgggagtctcatagaacacactggaagatgtgttttagcttggccagtttcatgcaggacagattttctgcataaagaaaatcaatgacagtttctgaaactgcatcctggaagccttgaccagtttggggcgaacctttcctacacacccatacttctctgcccagcttggagcaggacagctatcgctttacaacattttgaaggcctactcacttctagaccaggaagtgggatattgccaaggtctcagctttgtagcaggcattttgcttcttcatatgagtgaggaagaggcgtttaaaatgctcaagtttctgatgtttgacatggggctgcggaaacagtatcggccagacatgattattttacagatccagatgtaccagctctcgaggttgcttcatgattaccacagagacctctacaatcacctggaggagcacgagatcggccccagcctctacgctgccccctggttcctcaccatgtttgcctcacagttcccgctgggattcgtagccagagtctttgatatgatttttcttcagggaacagaggtcatatttaaagtggctttaagtctgttgggaagccataagcccttgattctgcagcatgaaaacctagaaaccatagttgactttataaaaagcacgctacccaaccttggcttggtacagatggaaaagaccatcaatcaggtatttgaaatggacatcgctaaacagttacaagcttatgaagttgagtaccacgtccttcaagaagaacttatcgattcctctcctctcagtgacaaccaaagaatggataaattagagaaaaccaacagcagcttacgcaaacagaaccttgacctccttgaacagttgcaggtggcaaatggtaggatccaaagccttgaggccaccattgagaagctcctgagcagtgagagcaagctgaagcaggccatgcttaccttagaactggagcggtcggccctgctgcagacggtggaggagctgcggcggcggagcgcagagcccagcgaccgggagcctgagtgcacgcagcccgagcccacgggcgactgacagctctgcaggagagattgcaacaccatcccacactgtccaggccttaactgagagggacagaagacgctggaaggagagaaggaagcgggaagtgtgcttctcagggaggaaaccggcttgccagcaagtagattcttacgaactccaacttgcaattcagggggcatgtcccagtgttttttttgttgtttttagatactaaatcgtcccttctccagtcctgattactgtacacagtagctttagatggcgtggacgtgaataaatgcaacttatgttttcttgttggttcctttttgagtgtcactgtgtttgtaaagagcattcacaatacggtggaatttcaaaagctggaagagctcgagatcatgcctcaggcaaaggcgtgggtccatcgttcttccgagagggtttgtgtggcgactacaccctcagcgtccctggcaaggtgcagttggctctcgcccattcttgttatggaaacctaagatgatcattgggaagatcagtgatcttgggtcattgatccctggctcagaggatagcggtttccatcataaaccaagatgatgagttcagcctttatccctcgtggttccactagatgtaacttaaaggagttaacatttgaggactttgttctacatcagattttactatttgaatgtttaagatcactttattgaatttgaagatcatcaaattaaataaaatgatttatttaatttggatatcctgatcactgtcaagtgaaatggatctctctctttggtatttaaggaagtttgtctttaaaaaaaaaatagagtgttttcatacatttttgcttatcccataagtacagttgatcaaagtcatagtaggtaaatgctttatgggacagctgacaccttttagaccctaccaggtattgctagcatgtgagctgcagttgtggggtctgagatatttctttgtggtagtttcatacccatactatagagtcatgtatttatttttgcctgttgtgtgatgtaatgcaatcatgttcctttgagtctccatcccttggaaatctgacttcttgcagaaggagtaggcacatcaagatattcaggggtgccccaagagtctgggactttcaaaaaaaaaagatcaggctgaaactgcagtcagatttatgacagctgacagtttttcagaggtcgcacacagtgactctcctctctcaggatgacgaggacctgtgccttcaacaagcaaaatgctgctcacggttgtcctgcttgcagccagtcactgtgtaaagcctctctgatgtgcacttaagagtgggttgctttctcacaaagatggggttctgtgcagtcacaggtcacttccttgacaacacaatcatttctgatctttatcactgtaaccacgtcttctattccataggagtttcttttgattctctcagttgcggggggcatctcttaatcctggggtaaaaggagagattgccatacttagactcactgtgagtctccccggccatttcacgaggagaccacagtgctgccaccagtgcctaaacaggtggctggcattcgagacttcctcctgttccctgggtcagaggatagcggtttccatcataaaccaagatgatgagttcagcctttatccctcgtggttccgctagatgtaacttataggagttaacatttgaggactttgttctgcatcagatcttactatttgaatgtttactgttggattttgggcatcttattactgttactcaaaaacattgactctgcatcaagaaagaaacaagaaagcaataaaacaagaaataattcatgctcacatt

SEQ ID NO: 21201 - DNA, 608 bp, Homo sapiens
  misc_feature 1..608: note = ENST00000475531
  source 1..608: mol_type = unassigned DNA
gatgtttgacatggggctgcggaaacagtatcggccagacatgattattttacagatccagatgtaccagctctcgaggttgcttcatgattaccacagagacctctacaatcacctggaggagcacgagatcggccccagcctctacgctgccccctggttcctcaccatgtttgcctcacagttcccgctgggattcgtagccagagtctttggtgagcattagtaaatctgtttgccagaaccagccttctcttattagaggggaaacatttcctgtctctccgtggtgattcttatttttatacctgtagctcttaccagaacagggtattgtttgatagtctaagattagtcaggggtgggttttgtgactttggagtcctccttaacttctgataatcacggggcttccctagatgccttcatcttgtgggatgtggatccgatccgtgtagatccgatcgctcaccatgagggtctccctagagcagacatttggaggacttggctgaggagccacaggtgtatgtttctcatgaattgccttcctcagccactctgggttgtgagtattgactgatgctgactgtgggcctctgggccct

SEQ ID NO: 21202 - DNA, 992 bp, Homo sapiens
  misc_feature 1..992: note = ENST00000406664
  source 1..992: mol_type = unassigned DNA
gagaaatttttccttcggctcataaatgggtaaaaagacgttaacaaacaagcagactccactttggaaatgatagcccttctattgcagagtaatttgaagctctctgaagctcactctaatgacttcataaatcaaagctgcagcttgtaaagatatgatttttcttcagggaacagaggtcatatttaaagtggctttaagtctgttgggaagccataagcccttgattctgcagcatgaaaacctagaaaccatagttgactttataaaaagcacgctacccaaccttggcttggtacagatggaaaagaccatcaatcaggtatttgaaatggacatcgctaaacagttacaagcttatgaagttgagtaccacgtccttcaagaagaacttatcgattcctctcctctcagtgacaaccaaagaatggataaattagagaaaaccaacagcagcttacgcaaacagaaccttgacctccttgaacagttgcaggtggcaaatggtaggatccaaagccttgaggccaccattgagaagctcctgagcagtgagagcaagctgaagcaggccatgcttaccttagaactggagcggtcggccctgctgcagacggtggaggagctgcggcggcggagcgcagagcccagcgaccgggagcctgagtgcacgcagcccgagcccacgggcgactgacagctctgcaggagagattgcaacaccatcccacactgtccaggccttaactgagagggacagaagacgctggaaggagagaaggaagcgggaagtgtgcttctcagggaggaaaccggcttgccagcaagtagattcttacgaactccaacttgcaattcagggggcatgtcccagtgttttttttgttgtttttagatactaaatcgtcccttctccagtcctgattactgtacacagtagctttagatggcgtggacgtgaataaatgcaacttatgttttcttgttgg

SEQ ID NO: 21203 - DNA, 566 bp, Homo sapiens
  misc_feature 1..566: note = ENST00000405444
  source 1..566: mol_type = unassigned DNA
aacccatagttgatgtatctaacctaacagaattttcagagaaaagaagtgaaataagaactaaaaataaatttttatgtctttaaaaatgagaggttttttttttttttttggcttttggaaggtatttgaaatggacatcgctaaacagttacaagcttatgaagttgagtaccacgtccttcaagaagaacttatcgattcctctcctctcagtgacaaccaaagaatggataaattagagaaaaccaacagcagcttacgcaaacagaaccttgacctccttgaacagttgcaggtggcaaatggtaggatccaaagccttgaggccaccattgagaagctcctgagcagtgagagcaagctgaagcaggccatgcttaccttagaactggagcggtcggccctgctgcagacggtggaggagctgcggcggcggagcgcagagcccagcgaccgggagcctgagtgcacgcagcccgagcccacgggcgactgacagctctgcaggagagattgcaacaccatcccacactgtccaggccttaactgagagggacagaaga

SEQ ID NO: 21204 - DNA, 613 bp, Homo sapiens
  misc_feature 1..613: note = ENST00000492180
  source 1..613: mol_type = unassigned DNA
ataagaactaaaaataaatttttatgtctttaaaaatgagaggttttttttttttttttggcttttggaaggtgagtatcaaaaacctgtacttaatgttaccttggaattatttctagatgtttcttatatccttttgtcccaagtaaaattattaccttctcagtgcgtagtttttcttatttattacttctagtaccaagtgtagagctaagcgtagaggagacgcttcacaggtgcgcattgtcgtgattgcagacgcctgcctgtacttgtggggtttttctcagttttagtacgtgatgacttttctttctataacaggtatttgaaatggacatcgctaaacagttacaagcttatgaagttgagtaccacgtccttcaagaagaacttatcgattcctctcctctcagtgacaaccaaagaatggataaattagagaaaaccaacagcagcttacgcaaacagaaccttgacctccttgaacagttgcaggtggcaaatggtaggatccaaagccttgaggccaccattgagaagctcctgagcagtgagagcaagctgaagcaggccatgcttaccttagaactggagcggtcggccctgctgc

SEQ ID NO: 21205 - DNA, 2383 bp, Homo sapiens
  misc_feature 1..2383: note = ENST00000615497
  source 1..2383: mol_type = unassigned DNA
cccaggtttctgcatatgaagtgtgtaaaatagattgcttgatccaaaacagaaaaacagtgataactgttttgctgagttcccagacccttcccaagatggaaccaataacattcacagcaaggaaacatctgctttctaacgaggtctcggtggattttggcctgcagctggtgggctccctgcctgtgcattccctgaccaccatgcccatgctgccctgggttgtggctgaggtgcgaagactcagcaggcagtccaccagaaaggaacctgtaaccaagcaagtccggctttgcgtttcaccctctggactgagatgtgaacctgagccagggagaagtcaacagtgggatcccctgatctattccagcatctttgagtgcaagcctcagcgtgttcacaaactgattctggtgggactcctgtgaagacccggaggcattcctggaggcagcagatattcctccgagtagccaccccgcagaaggcgtgcgattcttccagcagatatgaagattattcagagctgggagagcttcccccacgatctcctttagaaccagtttgtgaagatgggccctttggccccccaccagaggaaaagaaaaggacatctcgtgagctccgagagctgtggcaaaaggctattcttcaacagatactgctgcttagaatggagaaggaaaatcagaagctccaagcctctgaaaatgatttgctgaacaagcgcctgaagctcgattatgaagaaattactccctgtcttaaagaagtaactacagtgtgggaaaagatgcttagcactccaggaagatcaaaaattaagtttgacatggaaaaaatgcactcggctgttgggcaaggtgtgccacgtcatcaccgaggtgaaatctggaaatttctagctgagcaattccaccttaaacaccagtttcccagcaaacagcagccaaaggatgtgccatacaaagaactcttaaagcagctgacttcccagcagcatgcgattcttattgaccttgggcgaacctttcctacacacccatacttctctgcccagcttggagcaggacagctatcgctttacaacattttgaaggcctactcacttctagaccaggaagtgggatattgccaaggtctcagctttgtagcaggcattttgcttcttcatatgagtgaggaagaggcgtttaaaatgctcaagtttctgatgtttgacatggggctgcggaaacagtatcggccagacatgattattttacagatccagatgtaccagctctcgaggttgcttcatgattaccacagagacctctacaatcacctggaggagcacgagatcggccccagcctctacgctgccccctggttcctcaccatgtttgcctcacagttcccgctgggattcgtagccagagtctttgatatgatttttcttcagggaacagaggtcatatttaaagtggctttaagtctgttgggaagccataagcccttgattctgcagcatgaaaacctagaaaccatagttgactttataaaaagcacgctacccaaccttggcttggtacagatggaaaagaccatcaatcaggtatttgaaatggacatcgctaaacagttacaagcttatgaagttgagtaccacgtccttcaagaagaacttatcgattcctctcctctcagtgacaaccaaagaatggataaattagagaaaaccaacagcagcttacgcaaacagaaccttgacctccttgaacagttgcaggtggcaaatggtaggatccaaagccttgaggccaccattgagaagctcctgagcagtgagagcaagctgaagcaggccatgcttaccttagaactggagcggtcggccctgctgcagacggtggaggagctgcggcggcggagcgcagagcccagcgaccgggagcctgagtgcacgcagcccgagcccacgggcgactgacagctctgcaggagagattgcaacaccatcccacactgtccaggccttaactgagagggacagaagacgctggaaggagagaaggaagcgggaagtgtgcttctcagggaggaaaccggcttgccagcaagtagattcttacgaactccaacttgcaattcagggggcatgtcccagtgttttttttgttgtttttagatactaaatcgtcccttctccagtcctgattactgtacacagtagctttagatggcgtggacgtgaataaatgcaacttatgttttcttgttggttcctttttgagtgtcactgtgtttgtaaagagcattcacaatacggtggaatttcaaaagctggaagagctcgagatcatgcctcaggcaaaggcgtgggtccatcgttcttccg

SEQ ID NO: 21206 - DNA, 6364 bp, Homo sapiens
  misc_feature 1..6364: note = ENST00000377636
  source 1..6364: mol_type = unassigned DNA
gcggccgcggggaccctcggcgtggtcctctgaccctgcaaacccgcgacggaggaaggggaggtcctgcccgaggcgccagcccaaggaggaggatgcccatttaacccgccctcgcctgccgggcgcttgcctcggtgcccgccgccggagcctccgagccgcgcccgtggaagtgctgcatggggcagggctgctgaagcgcggagttcggggtcgcgccgctcccaggcaggcgcgggagcccggtgcggcagttggcacagtttcggcggcgccttctgcgcgggagtggggggcgcggtgcgcccggccggcctccgcggtgccctggtgaggcgagagttatggagccgcccagctgcattcaggatgagccgttcccgcaccccctggagcccgagccgggcgtctcagctcagcccggccccgggaagccaagcgataagcggttccggctgtggtacgttggggggtcgtgcctggaccacaggaccacgctgcctatgctgccctggctcatggccgagatccgcaggcgcagccagaagcccgaggcgggcggctgcggggcgccggcggcccgagaggtgatcctggtgctcagcgcgcccttcctgcgttgcgtccccgcgccgggcgctggggcctcggggggcactagtccgtcggccacgcagcccaacccggcggtattcatcttcgagcacaaggcgcagcatatctcgcgcttcatccacaacagccacgacctcacctactttgcctacctgatcaaggcgcagcccgacgaccccgagtcgcagatggcctgccacgttttccgcgccacagaccccagccaggttcctgatgttattagcagcataaggcaattatctaaagcggccatgaaagaggatgccaaacccagcaaagataatgaggacgccttttacaactctcagaagttcgaagtcctgtactgtggaaaggtgaccgtgacccacaagaaggccccctcaagcctcatcgatgactgcatggagaagttcagcctgcacgaacagcagcgcctgaagatccaaggggagcagcgcggtccggacccaggagaggacctggctgacttggaggtggtggtgcccgggtcccccggagactgcctgccggaggaggctgacggcaccgacacccaccttggcttacctgccggggccagccagcctgccctgaccagctctcgggtctgcttccctgagcggattttggaagattctggctttgatgagcagcaggagtttcggtctcggtgcagcagtgtcaccggcgtgcaacggagagttcacgagggcagccagaaatcccagccgcgacggagacacgcgagcgcacccagtcacgtccagccctcggactcggagaagaacaggaccatgctcttccaggttgggcgatttgagattaaccttatcagtccagacactaaatcagttgtgctagaaaagaattttaaagatatctcctcttgttctcagggtataaagcatgtggatcactttggctttatctgccgggagtctccagagcctggacttagccagtatatttgttatgtattccagtgtgccagcgaatctctggttgatgaggtaatgctgactctgaaacaggccttcagtacggcggctgccctgcagagtgccaagacgcagattaaactgtgtgaggcctgcccgatgcactctttgcataagctctgtgaaaggattgaaggtctctacccaccaagagccaagctggtgatacagaggcatctctcatcactgacagataatgagcaagctgacatctttgaaagagttcagaaaatgaagccagtcagtgaccaggaagaaaatgaacttgtgattttacacctgaggcagctgtgtgaagccaagcagaagacacacgtgcacatcggggaaggcccttctactatttcaaatagtacaatcccagaaaatgcaacaagcagtggaaggttcaaacttgacattctgaaaaataaagctaagagatccttaactagctccctggaaaatatcttctcaaggggagctaacagaatgagaggtcggcttggaagtgtggacagttttgaacggtccaacagtcttgcttcagagaaggactactcaccaggggattctccaccagggacaccgccagcgtccccaccgtcctcagcttggcaaacgtttcccgaagaggattccgactccccgcagtttcgaagacgggcacacacgttcagccacccaccttcaagcacaaagagaaagctgaatttgcaggatgggagggctcagggtgtgcgttcccctctgctgaggcagagctccagtgaacagtgcagcaatctttcgtcagttcgacgcatgtacaaggagagtaattcttcctccagtcttccaagtcttcacacttccttctctgccccttccttcactgccccctctttcctgaaaagcttttaccagaattcaggtagactgtccccacagtatgaaaatgaaatcagacaagacactgcttcagaatcaagtgatggagaagggagaaaaaggacctcatctacctgcagcaatgagtccctaagtgtgggaggaacctctgtcactcctcgccggatctcctggcggcagcgcattttcctcagggttgcttctcccatgaacaaatctccctcagcaatgcaacagcaagatggattggacaggaacgagctgctgccactgtcccccctctctccaaccatggaggaggaaccgctggttgtattcctgtctggggaggatgacccagaaaagattgaagaaagaaagaaatcaaaagaactgaggagcttgtggagaaaagctatacaccaacaaatcttgttacttcgaatggaaaaagaaaaccagaaacttgaagcaagcagagatgaactccagtccagaaaagttaaattagactatgaagaagttggtgcatgtcagaaagaggtcttaataacttgggataagaagttgttaaactgcagagctaaaatcagatgtgatatggaagatattcatactcttcttaaagaaggagttcccaaaagtcgacgaggagaaatttggcagtttctggctttacagtaccgactcagacacagattgcctaataaacaacagcctcctgacatatcctataaggaacttttgaagcagctcactgctcagcagcatgcgattctcgtggatttaggaaggacgtttcctactcacccttacttttcagtacagcttgggccaggacagctgtcactgtttaacctcctgaaagcctattctttgctggacaaagaagtgggatactgtcaggggatcagctttgtggctggagtcctgcttctgcacatgagtgaagagcaagcctttgaaatgctgaaattcctcatgtatgacctcggcttccgcaagcagtacagacctgacatgatgtcgctgcagattcaaatgtaccagctgtccaggctccttcatgactatcacagagatctctacaatcaccttgaagaaaatgaaatcagccccagtctttatgctgccccctggttcctcacattgtttgcctctcagttttcattaggatttgtagccagagtttttgatattatttttcttcagggaactgaagttatattcaaggttgcactcagcctactgagcagccaagagacacttataatggaatgtgagagctttgaaaatattgttgagtttcttaaaaacacgctacctgatatgaatacctctgaaatggaaaaaattattacccaggtttttgagatggatatttctaagcagttgcatgcctatgaggtggaatatcatgtgctacaggatgagcttcaggaatcttcatattcctgtgaggatagtgaaactttggagaagctggagagggccaatagccaactgaaaagacaaaacatggacctcctagaaaaattacaggtagctcatactaaaatccaggccttggaatcaaacctggaaaatcttttgacgagagagaccaaaatgaagtctttaatccggaccctggaacaagaaaaaatggcttatcaaaagacagtggagcaactccggaagctgctgcccgcggatgctctagtcaattgtgacctgttgctgagagacctaaactgcaaccctaacaacaaagccaagataggaaataagccataattgaagaggcacggcctcagcagaaagtgctccttagaatactacagagaggaagagcctgcatgtcgctggcccaaggctggaccctgaagctgatggaaccacctaatactggtgctgagcgcctagtcacagcaggtggacctcgtgctcatcagagcatgccaatcctaagccattggacatatgtagactggtttttgttgttgctatgtacatataaatatatatataaaatgaacatagttcatgctttcagataaaatgagtagatgtatatttagattaatttttttagtcagaacttcatgaaatccacaccaaaggaaaggtaaactgaaatttcccttggacatatgtgaaatctttttgtctttatagtgaaacaaagccagagcatctttgtatattgcaatatacttgaaaaaaatgaatgtatttttttctccaaagaacagcatgtttcactcaatggtgaaaaggtggaaacatttatgtaactttatgtgtatctgtcttgatatctactgacattgtctatatgaggaaaatgattactggtcatgctcctgtgagttttttgggaaggtagggtcatttctccctgcctgctttgtgccaactagcatgttgcatctacatgcattatgagtctggttaggcattactttaaacatacataaagagacagtaggacattgtggctgagtctacccagctcaaggtaaaggagaatgttgctaattttttagcaaactagaccagcattattactcaaactaaaaatatcacacctgaaaaatttaatttaggacctaaaatgtctagattagctttctgctttttttatttgaataactcattcagttgtgaatgaattcctctttatttggtgccacagtcaccaaatgacaaggatttgccactttcccaccaaattgtgagtgcttgtaatttaggtctctctaccttaaattcagtataaggaaacgtaattatgattgattttttccaaagatgacaagctgtgttgaaatacattttttcttttgaccaattgacagaatctaataagctttaataatcttccccttttatgtgaaaagttttgagaactgtgaaatgtttaggaacaaactgttgaaatccattggaagggaaaaaagaaagtggtaccagtgttaccagctcaactaaaacctgcaattctgcatttcaactcttcacttcctcagcctacaaatagctcattagatgacattcacgcatgctgggtataggcaaggaaagtaattttcaaagtacatttgcagttctctttttcagagatgattctatgatagtgcctctgaaagttgatgcagcatttttgcctttccaaaaagtatttatcctcactgctttttgcagtacttgtattttcacagatggattatctggggtaattttcttcaaagggagtttgttatacacagtgaaaatgtattatagagtagaatagtaaagctctaggggtttcagaaagctttgatgaacagatgacaaacatctgaaaccccctccgcactgttacccagtgtgtatataatgacttgttatagctcagtgtgcccttgaatccatacagtttcttaaaagacaataaaatcttattaataaagttaatgtaacttctaagttctagaaaatgctgattctgtctgccccattcaattgggggctactaattgatttgttgcttggatttcctgagaatttctctatttgtaggaggggttttttctttttacggtctgttgatgacaattactttatgggtgtgatgcaccgatggtagccaaggaatctgttggggaagttcggaaagaaaccttttctttcttttattcagtttaaagtaaactttatcctggatgtttagaatcaacattaagagttatattatggtgttcagagattaagctgacttggatacaatattttcttttgaaaatgaattttctttttcatttgtgatttttaaaaaatgttgcaccagttatgcttcatgcatcgttacatcttcatcaggttaatgtaatgtctagttcctttgcaataaatatattgctgcagctttc

SEQ ID NO: 21207 - DNA, 759 bp, Homo sapiens
  misc_feature 1..759: note = ENST00000478591
  source 1..759: mol_type = unassigned DNA
acttcctagccatgtgaacttggggcaattacttcatctctttctgcctcagctttctgtctataaagtggacctaatagtaattgcctaccttatagttgagttgttttctgagtgcatgtgcttagtagctaggcaccctcaataaatgttttattaatgctcagtcagcaacgggtgatgttattgttaatattgtcattatcgagttcccaaaagtcgacgaggagaaatttggcagtttctggctttacagtaccgactcagacacagattgcctaataaacaacagcctcctgacatatcctataaggaacttttgaagcagctcactgctcagcagcatgcgattctcgtggatttaggaaggacgtttcctactcacccttacttttcagtacagcttgggccaggacagctgtcactgtttaacctcctgaaagcctattctttgctggacaaagaagtgggatactgtcaggggatcagctttgtggctggagtcctgcttctgcacatgagtgaagagcaagcctttgaaatgctgaaattcctcatgtatgacctcggcttccgcaagcagtacagacctgacatgatgtcgctgcagattcaaatgtaccagctgtccaggctccttcatgactatcacagagatctctacaatcaccttgaagaaaatgaaatcagccccagtctttatgctgccccctggttcctcacattgtttgcctctcagttttcattaggatttgtagc

SEQ ID NO: 21208 - DNA, 458 bp, Homo sapiens
  misc_feature 1..458: note = ENST00000493487
  source 1..458: mol_type = unassigned DNA
gcttttgccatatctcagcaaccaactactttttcaagatgtcgatttttagtacaagataaagggtcaatggtttgttattgatggagaagggagaaaaaggacctcatctacctgcagcaatgagtccctaagtgtgggaggaacctctgtcactcctcgccggatctcctggcggcagcgcattttcctcagggttgcttctcccatgaacaaatctccctcagcaatgcaacagcaagatggattggacaggaacgagctgctgccactgtcccccctctctccaaccatggaggaggaaccgctggttgtattcctgtctggggaggatgacccagaaaagattgaagaaagaaagaaatcaaaagaactgaggagcttgtggagaaaagctatacaccaacaaatcttgttacttcgaatggaaaaagaaaaccagaaacttgaagcaagca

SEQ ID NO: 21209 - DNA, 847 bp, Homo sapiens
  misc_feature 1..847: note = ENST00000413735
  source 1..847: mol_type = unassigned DNA
gataatgagcaagctgacatctttgaaagagttcagaaaatgaagccagtcagtgaccaggaagaaaatgaacttgtgattttacacctgaggcagctgtgtgaagccaagcagaagacacacgtgcacatcggggaaggcccttctactatttcaaatagtacaatcccagaaaatgcaacaagcagtggaaggttcaaacttgacattctgaaaaataaagctaagagatccttaactagctccctggaaaatatcttctcaaggggagctaacagaatgagaggtcggcttggaagtgtggacagttttgaacggtccaacagtcttgcttcagagaaggactactcaccaggggattctccaccagggacaccgccagcgtccccaccgtcctcagcttggcaaacgtttcccgaagaggattccgactccccgcagtttcgaagacgggcacacacgttcagccacccaccttcaagcacaaagagaaagctgaatttgcaggatgggagggctcagggtgtgcgttcccctctgctgaggcagagctccagtgaacagtgcagtgatggagaagggagaaaaaggacctcatctacctgcagcaatgagtccctaagtgtgggaggaacctctgtcactcctcgccggatctcctggcggcagcgcattttcctcagggttgcttctcccatgaacaaatctccctcagcaatgcaacagcaagatggattggacaggaacgagctgctgccactgtcccccctctctccaaccatggaggaggaaccgctggttgtattcctgtctggggaggatgacccagaaaagattgaagaaagaa

SEQ ID NO: 21210 - DNA, 336 bp, Homo sapiens
  misc_feature 1..336: note = ENST00000488955
  source 1..336: mol_type = unassigned DNA
ggctcagggtgtgcgttcccctctgctgaggcagagctccagtgaacagtgcagcaatctttcgtcagttcgacgcatgtacaaggagagtaattcttcctccagtcttccaagtcttcacacttccttctctgccccttccttcactgccccctctttcctgaaaagcttttaccagaattcaggtagactgtccccacagtatgaaaatgaaatcagtgatggagaagggagaaaaaggacctcatctacctgcagcaatgagtccctaagtgtgggaggaacctctgtcactcctcgccggatctcctggcggcagcgcattttcctcagggt

SEQ ID NO: 21211 - DNA, 6182 bp, Homo sapiens
  misc_feature 1..6182: note = ENST00000377625
  source 1..6182: mol_type = unassigned DNA
gcggccgcggggaccctcggcgtggtcctctgaccctgcaaacccgcgacggaggaaggggaggtcctgcccgaggcgccagcccaaggaggaggatgcccatttaacccgccctcgcctgccgggcgcttgcctcggtgcccgccgccggagcctccgagccgcgcccgtggaagtgctgcatggggcagggctgctgaagcgcggagttcggggtcgcgccgctcccaggcaggcgcgggagcccggtgcggcagttggcacagtttcggcggcgccttctgcgcgggagtggggggcgcggtgcgcccggccggcctccgcggtgccctggtgaggcgagagttatggagccgcccagctgcattcaggatgagccgttcccgcaccccctggagcccgagccgggcgtctcagctcagcccggccccgggaagccaagcgataagcggttccggctgtggtacgttggggggtcgtgcctggaccacaggaccacgctgcctatgctgccctggctcatggccgagatccgcaggcgcagccagaagcccgaggcgggcggctgcggggcgccggcggcccgagaggtgatcctggtgctcagcgcgcccttcctgcgttgcgtccccgcgccgggcgctggggcctcggggggcactagtccgtcggccacgcagcccaacccggcggtattcatcttcgagcacaaggcgcagcatatctcgcgcttcatccacaacagccacgacctcacctactttgcctacctgatcaaggcgcagcccgacgaccccgagtcgcagatggcctgccacgttttccgcgccacagaccccagccaggttcctgatgttattagcagcataaggcaattatctaaagcggccatgaaagaggatgccaaacccagcaaagataatgaggacgccttttacaactctcagaagttcgaagtcctgtactgtggaaaggtgaccgtgacccacaagaaggccccctcaagcctcatcgatgactgcatggagaagttcagcctgcacgaacagcagcgcctgaagatccaaggggagcagcgcggtccggacccaggagaggacctggctgacttggaggtggtggtgcccgggtcccccggagactgcctgccggaggaggctgacggcaccgacacccaccttggcttacctgccggggccagccagcctgccctgaccagctctcgggtctgcttccctgagcggattttggaagattctggctttgatgagcagcaggagtttcggtctcggtgcagcagtgtcaccggcgtgcaacggagagttcacgagggcagccagaaatcccagccgcgacggagacacgcgagcgcacccagtcacgtccagccctcggactcggagaagaacaggaccatgctcttccaggttgggcgatttgagattaaccttatcagtccagacactaaatcagttgtgctagaaaagaattttaaagatatctcctcttgttctcagggtataaagcatgtggatcactttggctttatctgccgggagtctccagagcctggacttagccagtatatttgttatgtattccagtgtgccagcgaatctctggttgatgaggtaatgctgactctgaaacaggccttcagtacggcggctgccctgcagagtgccaagacgcagattaaactgtgtgaggcctgcccgatgcactctttgcataagctctgtgaaaggattgaaggtctctacccaccaagagccaagctggtgatacagaggcatctctcatcactgacagataatgagcaagctgacatctttgaaagagttcagaaaatgaagccagtcagtgaccaggaagaaaatgaacttgtgattttacacctgaggcagctgtgtgaagccaagcagaagacacacgtgcacatcggggaaggcccttctactatttcaaatagtacaatcccagaaaatgcaacaagcagtggaaggttcaaacttgacattctgaaaaataaagctaagagatccttaactagctccctggaaaatatcttctcaaggggagctaacagaatgagaggtcggcttggaagtgtggacagttttgaacggtccaacagtcttgcttcagagaaggactactcaccaggggattctccaccagggacaccgccagcgtccccaccgtcctcagcttggcaaacgtttcccgaagaggattccgactccccgcagtttcgaagacgggcacacacgttcagccacccaccttcaagcacaaagagaaagctgaatttgcaggatgggagggctcagggtgtgcgttcccctctgctgaggcagagctccagtgaacagtgcagtgatggagaagggagaaaaaggacctcatctacctgcagcaatgagtccctaagtgtgggaggaacctctgtcactcctcgccggatctcctggcggcagcgcattttcctcagggttgcttctcccatgaacaaatctccctcagcaatgcaacagcaagatggattggacaggaacgagctgctgccactgtcccccctctctccaaccatggaggaggaaccgctggttgtattcctgtctggggaggatgacccagaaaagattgaagaaagaaagaaatcaaaagaactgaggagcttgtggagaaaagctatacaccaacaaatcttgttacttcgaatggaaaaagaaaaccagaaacttgaagcaagcagagatgaactccagtccagaaaagttaaattagactatgaagaagttggtgcatgtcagaaagaggtcttaataacttgggataagaagttgttaaactgcagagctaaaatcagatgtgatatggaagatattcatactcttcttaaagaaggagttcccaaaagtcgacgaggagaaatttggcagtttctggctttacagtaccgactcagacacagattgcctaataaacaacagcctcctgacatatcctataaggaacttttgaagcagctcactgctcagcagcatgcgattctcgtggatttaggaaggacgtttcctactcacccttacttttcagtacagcttgggccaggacagctgtcactgtttaacctcctgaaagcctattctttgctggacaaagaagtgggatactgtcaggggatcagctttgtggctggagtcctgcttctgcacatgagtgaagagcaagcctttgaaatgctgaaattcctcatgtatgacctcggcttccgcaagcagtacagacctgacatgatgtcgctgcagattcaaatgtaccagctgtccaggctccttcatgactatcacagagatctctacaatcaccttgaagaaaatgaaatcagccccagtctttatgctgccccctggttcctcacattgtttgcctctcagttttcattaggatttgtagccagagtttttgatattatttttcttcagggaactgaagttatattcaaggttgcactcagcctactgagcagccaagagacacttataatggaatgtgagagctttgaaaatattgttgagtttcttaaaaacacgctacctgatatgaatacctctgaaatggaaaaaattattacccaggtttttgagatggatatttctaagcagttgcatgcctatgaggtggaatatcatgtgctacaggatgagcttcaggaatcttcatattcctgtgaggatagtgaaactttggagaagctggagagggccaatagccaactgaaaagacaaaacatggacctcctagaaaaattacaggtagctcatactaaaatccaggccttggaatcaaacctggaaaatcttttgacgagagagaccaaaatgaagtctttaatccggaccctggaacaagaaaaaatggcttatcaaaagacagtggagcaactccggaagctgctgcccgcggatgctctagtcaattgtgacctgttgctgagagacctaaactgcaaccctaacaacaaagccaagataggaaataagccataattgaagaggcacggcctcagcagaaagtgctccttagaatactacagagaggaagagcctgcatgtcgctggcccaaggctggaccctgaagctgatggaaccacctaatactggtgctgagcgcctagtcacagcaggtggacctcgtgctcatcagagcatgccaatcctaagccattggacatatgtagactggtttttgttgttgctatgtacatataaatatatatataaaatgaacatagttcatgctttcagataaaatgagtagatgtatatttagattaatttttttagtcagaacttcatgaaatccacaccaaaggaaaggtaaactgaaatttcccttggacatatgtgaaatctttttgtctttatagtgaaacaaagccagagcatctttgtatattgcaatatacttgaaaaaaatgaatgtatttttttctccaaagaacagcatgtttcactcaatggtgaaaaggtggaaacatttatgtaactttatgtgtatctgtcttgatatctactgacattgtctatatgaggaaaatgattactggtcatgctcctgtgagttttttgggaaggtagggtcatttctccctgcctgctttgtgccaactagcatgttgcatctacatgcattatgagtctggttaggcattactttaaacatacataaagagacagtaggacattgtggctgagtctacccagctcaaggtaaaggagaatgttgctaattttttagcaaactagaccagcattattactcaaactaaaaatatcacacctgaaaaatttaatttaggacctaaaatgtctagattagctttctgctttttttatttgaataactcattcagttgtgaatgaattcctctttatttggtgccacagtcaccaaatgacaaggatttgccactttcccaccaaattgtgagtgcttgtaatttaggtctctctaccttaaattcagtataaggaaacgtaattatgattgattttttccaaagatgacaagctgtgttgaaatacattttttcttttgaccaattgacagaatctaataagctttaataatcttccccttttatgtgaaaagttttgagaactgtgaaatgtttaggaacaaactgttgaaatccattggaagggaaaaaagaaagtggtaccagtgttaccagctcaactaaaacctgcaattctgcatttcaactcttcacttcctcagcctacaaatagctcattagatgacattcacgcatgctgggtataggcaaggaaagtaattttcaaagtacatttgcagttctctttttcagagatgattctatgatagtgcctctgaaagttgatgcagcatttttgcctttccaaaaagtatttatcctcactgctttttgcagtacttgtattttcacagatggattatctggggtaattttcttcaaagggagtttgttatacacagtgaaaatgtattatagagtagaatagtaaagctctaggggtttcagaaagctttgatgaacagatgacaaacatctgaaaccccctccgcactgttacccagtgtgtatataatgacttgttatagctcagtgtgcccttgaatccatacagtttcttaaaagacaataaaatcttattaataaagttaatgtaacttctaagttctagaaaatgctgattctgtctgccccattcaattgggggctactaattgatttgttgcttggatttcctgagaatttctctatttgtaggaggggttttttctttttacggtctgttgatgacaattactttatgggtgtgatgcaccgatggtagccaaggaatctgttggggaagttcggaaagaaaccttttctttcttttattcagtttaaagtaaactttatcctggatgtttagaatcaacattaagagttatattatggtgttcagagattaagctgacttggatacaatattttcttttgaaaatgaattttctttttcatttgtgatttttaaaaaatgttgcaccagttatgcttcatgcatcgttacatcttcatcaggttaatgtaatgtctagttcctttgcaataaatatattgctgcagctttcttgacgt

SEQ ID NO: 21212 - DNA, 6347 bp, Homo sapiens
  misc_feature 1..6347: note = ENST00000431480
  source 1..6347: mol_type = unassigned DNA
gcggccgcggggaccctcggcgtggtcctctgaccctgcaaacccgcgacggaggaaggggaggtcctgcccgaggcgccagcccaaggaggaggatgcccatttaacccgccctcgcctgccgggcgcttgcctcggtgcccgccgccggagcctccgagccgcgcccgtggaagtgctgcatggggcagggctgctgaagcgcggagttcggggtcgcgccgctcccaggcaggcgcgggagcccggtgcggcagttggcacagtttcggcggcgccttctgcgcgggagtggggggcgcggtgcgcccggccggcctccgcggtgccctggtgaggcgagagttatggagccgcccagctgcattcaggatgagccgttcccgcaccccctggagcccgagccgggcgtctcagctcagcccggccccgggaagccaagcgataagcggttccggctgtggtacgttggggggtcgtgcctggaccacaggaccacgctgcctatgctgccctggctcatggccgagatccgcaggcgcagccagaagcccgaggcgggcggctgcggggcgccggcggcccgagaggtgatcctggtgctcagcgcgcccttcctgcgttgcgtccccgcgccgggcgctggggcctcggggggcactagtccgtcggccacgcagcccaacccggcggtattcatcttcgagcacaaggcgcagcatatctcgcgcttcatccacaacagccacgacctcacctactttgcctacctgatcaaggcgcagcccgacgaccccgagtcgcagatggcctgccacgttttccgcgccacagaccccagccaggttcctgatgttattagcagcataaggcaattatctaaagcggccatgaaagaggatgccaaacccagcaaagataatgaggacgccttttacaactctcagaagttcgaagtcctgtactgtggaaaggtgaccgtgacccacaagaaggccccctcaagcctcatcgatgactgcatggagaagttcagcctgcacgaacagcagcgcctgaagatccaaggggagcagcgcggtccggacccaggagaggacctggctgacttggaggtggtggtgcccgggtcccccggagactgcctgccggaggaggctgacggcaccgacacccaccttggcttacctgccggggccagccagcctgccctgaccagctctcgggtctgcttccctgagcggattttggaagattctggctttgatgagcagcaggagtttcggtctcggtgcagcagtgtcaccggcgtgcaacggagagttcacgagggcagccagaaatcccagccgcgacggagacacgcgagcgcacccagtcacgtccagccctcggactcggagaagaacaggaccatgctcttccaggttgggcgatttgagattaaccttatcagtccagacactaaatcagttgtgctagaaaagaattttaaagatatctcctcttgttctcagggtataaagcatgtggatcactttggctttatctgccgggagtctccagagcctggacttagccagtatatttgttatgtattccagtgtgccagcgaatctctggttgatgaggtaatgctgactctgaaacaggccttcagtacggcggctgccctgcagagtgccaagacgcagattaaactgtgtgaggcctgcccgatgcactctttgcataagctctgtgaaaggattgaaggtctctacccaccaagagccaagctggtgatacagaggcatctctcatcactgacagataatgagcaagctgacatctttgaaagagttcagaaaatgaagccagtcagtgaccaggaagaaaatgaacttgtgattttacacctgaggcagctgtgtgaagccaagcagaagacacacgtgcacatcggggaaggcccttctactatttcaaatagtacaatcccagaaaatgcaacaagcagtggaaggttcaaacttgacattctgaaaaataaagctaagagatccttaactagctccctggaaaatatcttctcaaggggagctaacagaatgagaggtcggcttggaagtgtggacagttttgaacggtccaacagtcttgcttcagagaaggactactcaccaggggattctccaccagggacaccgccagcgtccccaccgtcctcagcttggcaaacgtttcccgaagaggattccgactccccgcagtttcgaagacgggcacacacgttcagccacccaccttcaagcacaaagagaaagctgaatttgcaggatgggagggctcagggtgtgcgttcccctctgctgaggcagagctccagtgaacagtgcagcaatctttcgtcagttcgacgcatgtacaaggagagtaattcttcctccagtcttccaagtcttcacacttccttctctgccccttccttcactgccccctctttcctgaaaagcttttaccagaattcaggtagactgtccccacagtatgaaaatgaaatcagtgatggagaagggagaaaaaggacctcatctacctgcagcaatgagtccctaagtgtgggaggaacctctgtcactcctcgccggatctcctggcggcagcgcattttcctcagggttgcttctcccatgaacaaatctccctcagcaatgcaacagcaagatggattggacaggaacgagctgctgccactgtcccccctctctccaaccatggaggaggaaccgctggttgtattcctgtctggggaggatgacccagaaaagattgaagaaagaaagaaatcaaaagaactgaggagcttgtggagaaaagctatacaccaacaaatcttgttacttcgaatggaaaaagaaaaccagaaacttgaagcaagcagagatgaactccagtccagaaaagttaaattagactatgaagaagttggtgcatgtcagaaagaggtcttaataacttgggataagaagttgttaaactgcagagctaaaatcagatgtgatatggaagatattcatactcttcttaaagaaggagttcccaaaagtcgacgaggagaaatttggcagtttctggctttacagtaccgactcagacacagattgcctaataaacaacagcctcctgacatatcctataaggaacttttgaagcagctcactgctcagcagcatgcgattctcgtggatttaggaaggacgtttcctactcacccttacttttcagtacagcttgggccaggacagctgtcactgtttaacctcctgaaagcctattctttgctggacaaagaagtgggatactgtcaggggatcagctttgtggctggagtcctgcttctgcacatgagtgaagagcaagcctttgaaatgctgaaattcctcatgtatgacctcggcttccgcaagcagtacagacctgacatgatgtcgctgcagattcaaatgtaccagctgtccaggctccttcatgactatcacagagatctctacaatcaccttgaagaaaatgaaatcagccccagtctttatgctgccccctggttcctcacattgtttgcctctcagttttcattaggatttgtagccagagtttttgatattatttttcttcagggaactgaagttatattcaaggttgcactcagcctactgagcagccaagagacacttataatggaatgtgagagctttgaaaatattgttgagtttcttaaaaacacgctacctgatatgaatacctctgaaatggaaaaaattattacccaggtttttgagatggatatttctaagcagttgcatgcctatgaggtggaatatcatgtgctacaggatgagcttcaggaatcttcatattcctgtgaggatagtgaaactttggagaagctggagagggccaatagccaactgaaaagacaaaacatggacctcctagaaaaattacaggtagctcatactaaaatccaggccttggaatcaaacctggaaaatcttttgacgagagagaccaaaatgaagtctttaatccggaccctggaacaagaaaaaatggcttatcaaaagacagtggagcaactccggaagctgctgcccgcggatgctctagtcaattgtgacctgttgctgagagacctaaactgcaaccctaacaacaaagccaagataggaaataagccataattgaagaggcacggcctcagcagaaagtgctccttagaatactacagagaggaagagcctgcatgtcgctggcccaaggctggaccctgaagctgatggaaccacctaatactggtgctgagcgcctagtcacagcaggtggacctcgtgctcatcagagcatgccaatcctaagccattggacatatgtagactggtttttgttgttgctatgtacatataaatatatatataaaatgaacatagttcatgctttcagataaaatgagtagatgtatatttagattaatttttttagtcagaacttcatgaaatccacaccaaaggaaaggtaaactgaaatttcccttggacatatgtgaaatctttttgtctttatagtgaaacaaagccagagcatctttgtatattgcaatatacttgaaaaaaatgaatgtatttttttctccaaagaacagcatgtttcactcaatggtgaaaaggtggaaacatttatgtaactttatgtgtatctgtcttgatatctactgacattgtctatatgaggaaaatgattactggtcatgctcctgtgagttttttgggaaggtagggtcatttctccctgcctgctttgtgccaactagcatgttgcatctacatgcattatgagtctggttaggcattactttaaacatacataaagagacagtaggacattgtggctgagtctacccagctcaaggtaaaggagaatgttgctaattttttagcaaactagaccagcattattactcaaactaaaaatatcacacctgaaaaatttaatttaggacctaaaatgtctagattagctttctgctttttttatttgaataactcattcagttgtgaatgaattcctctttatttggtgccacagtcaccaaatgacaaggatttgccactttcccaccaaattgtgagtgcttgtaatttaggtctctctaccttaaattcagtataaggaaacgtaattatgattgattttttccaaagatgacaagctgtgttgaaatacattttttcttttgaccaattgacagaatctaataagctttaataatcttccccttttatgtgaaaagttttgagaactgtgaaatgtttaggaacaaactgttgaaatccattggaagggaaaaaagaaagtggtaccagtgttaccagctcaactaaaacctgcaattctgcatttcaactcttcacttcctcagcctacaaatagctcattagatgacattcacgcatgctgggtataggcaaggaaagtaattttcaaagtacatttgcagttctctttttcagagatgattctatgatagtgcctctgaaagttgatgcagcatttttgcctttccaaaaagtatttatcctcactgctttttgcagtacttgtattttcacagatggattatctggggtaattttcttcaaagggagtttgttatacacagtgaaaatgtattatagagtagaatagtaaagctctaggggtttcagaaagctttgatgaacagatgacaaacatctgaaaccccctccgcactgttacccagtgtgtatataatgacttgttatagctcagtgtgcccttgaatccatacagtttcttaaaagacaataaaatcttattaataaagttaatgtaacttctaagttctagaaaatgctgattctgtctgccccattcaattgggggctactaattgatttgttgcttggatttcctgagaatttctctatttgtaggaggggttttttctttttacggtctgttgatgacaattactttatgggtgtgatgcaccgatggtagccaaggaatctgttggggaagttcggaaagaaaccttttctttcttttattcagtttaaagtaaactttatcctggatgtttagaatcaacattaagagttatattatggtgttcagagattaagctgacttggatacaatattttcttttgaaaatgaattttctttttcatttgtgatttttaaaaaatgttgcaccagttatgcttcatgcatcgttacatcttcatcaggttaatgtaatgtctagttcctttgcaataaatatattgctgcagctttcttgacgt

SEQ ID NO: 21213 - DNA, 7854 bp, Homo sapiens
  misc_feature 1..7854: note = ENST00000253692
  source 1..7854: mol_type = unassigned DNA
tgactgcatcacctggtctgtgaattttccattagaagcttggtgtgctgttaggtgaaagacttgctcagctatgcgtcattgggttttatcaacatataggcgaaaaaaatcctggtctctgagtgtacagctgagatgaaaatttcttttattggaggaagtattgagtgtgtgctctcaaatgcggcctcagttgagtagtgcattcctgagttttggaagcaaatttgcaaacaattgagagtcgtacagtgggtgttctaactggattcaggttttttctaatgtaattttttcacacgtaaattaaaaagtttagaaatgtcacacataacttcataacactttatggagaaatggttgtacttttaatttttttctttttatttatactccaactgactgagcagaggttgtacttctaaataactttgtggaagtttttagtaccataatttttataattttcattccagtcctttgatatttatgacagtacttctgaagcgcttactgagtgccggacactgttgtaagtgctttacggaacttgacttttttttttttttgagacggactctcgctctgtcgcccaggctggagtgcagtggtgcagtggctcgatctcggctcactgccacctctccctcatggtttcaaacacttctcctgcctcagcctcccaggtagccaggattatagccgcccgccaccactcccgactaattttattttgtatgttcttttttagtagagacggaggagtttcaccatgttggccaggctggtatcgacctcctgacctcaagtgatgtgtccatctcggcctcccaaggtgctggaattacaggtgtgagccactgtgctcggcctacctttttttttttgttttttgtttttttgaaaaggagtttcgctcttgtccaggctggagtataatggtgcgatctcagctcaccgcaatctccgcctcccagattcaagcgattctcctgcctcagcctcctcaggagctgggattacaggcgcccaccgccatgcccggctaatttttgtatttttagtagagacggggtttcactatattggccaggctggtctcgaactgctgacctcaagtaatccgcctgcctcagcctcccaaagtgctgggattacagacgtgatccaccaggatcacaccaggccgcgcctggcctgctttcattttaaaagtcaaatttgtcatccgcctcagtgcttgtaatcttttctgagtgagatactgaaatttgcagtttcgttttgcttgcacttgttcactggaccagtagtcactgttaaatgtaaaagtatctacttcctctgaaagttttttattcctttatttcctgcctgggcttgtcctccaccctacatgtatgcgtagtagatttagtgtttgttatcctaacctttaggtttagggattgactgggtttctgactttttatttggccaatgaggacgatacagaaaatgaagcattggtcattatcacattttaacgctgaaaaagtaagaaggacaaccccggaataaaatgatatcagtatcaagataaaagtttggaatgggagaaaaattctcaaagcctgaaagaaaatctgtagttacttttggtgacgctgtccagttcccacaatgtatcattccttatctgaaactagacatcctctgcagccagaagaacaagaagtaggcattgaccccttgtccagttactctaacaagtctggaggagattcaaataaaaatggaagaagaacaagttctactttagactctgaagggacttttaattcctataggaaagaatgggaagaactatttgtaaacaacaattacttggcaacaataaggcagaaggggattaatgggcagctgagaagcagcaggttccgcagcatttgctggaagctatttctttgtgttcttcctcaagacaaaagtcaatggataagtagaattgaagaattaagagcatggtatagcaacattaaagaaatacatattaccaacccgaggaaggttgttggccaacaagatttgatgatcaataatcctctttcacaggatgaagggagtctttggaacaaattcttccaagataaagaacttcgatcaatgattgaacaagatgtcaaaagaacgtttcctgaaatgcagtttttccagcaagaaaatgtgagaaaaattcttacagatgttcttttctgttatgccagagaaaacgagcagttgctttataaacagggcatgcacgaactgttagcacctatagtctttgtccttcactgtgaccaccaagcttttctacatgccagtgagtctgcacagcccagtgaggaaatgaaaactgtcttgaaccctgagtatctggaacatgatgcctatgcagtgttctcacaacttatggaaactgctgaaccttggttttcaacttttgagcatgatggtcagaaggggaaagaaacactgatgactcccattccctttgctagaccacaagatttagggccaacaattgctattgttactaaagtcaaccagatccaggatcatctactgaagaagcatgatattgagctttacatgcacttgaacagactagaaattgcaccacagatatatgggttaaggtgggtgcggctgctatttggacgagagttccccctgcaggaccttctggtggtctgggatgccttgtttgcagacggcctcagcctgggtttagtagattatatcttcgtagccatgttactttacatccgagatgctttgatctctagtaactaccagacctgtctcggccttctgatgcattacccattcatcggggatgtacactcactgattcttaaggctctgttccttagagatccaaagagaaatccaagaccagtgacttatcaattccatccaaatttagattattacaaagcacgaggagcagacctcatgaataaaagccggaccaatgccaaaggtgctcccctgaatataaataaggtctctaatagcctgattaattttggaagaaagttgatttccccagcaatggctccaggcagtgcaggtggccctgtacctggaggcaacagcagtagctcctcctctgttgtaattcctaccaggacctcagcagaggccccaagccatcacttgcaacagcaacagcagcagcagaggctgatgaaatcagaaagcatgcctgtgcaattgaacaaagggctaagttctaaaaacatcagttcatctccaagcgttgagagtttgcctggaggaagagaattcactggctctccaccttcatctgctactaaaaaagattccttttttagcaacatctcacgttctcgctcacacagcaaaactatgggcagaaaagaatctgaagaagaattagaagcccaaatttccttccttcaagggcagttgaatgacctggatgccatgtgcaaatactgtgcaaaggtgatggacactcatcttgtaaatattcaagatgtgatattacaagaaaatttggaaaaagaagatcaaattctggtttccctggcaggattaaaacagatcaaagacattctaaaaggttccctgcgttttaaccagagccagctagaggccgaagagaacgaacagatcaccattgcggacaaccactactgctccagcggccagggccagggccgaggccaaggccagagcgttcaaatgtcaggggccattaaacaggcctcttcagaaacgccagggtgcactgatagagggaattccgatgacttcatcctgatttccaaagatgatgatgggagcagtgccaggggctccttctccggccaggcccagcctcttcgcaccctcagaagcacctctgggaaaagccaggccccagtctgctccccactggtgttctcagatccactgatgggcccagcctcagcttcctccagcaaccccagctccagtcctgatgacgacagcagcaaggactctggcttcaccattgtgagtcccctggacatctgaccacagtgcccagtcctgccccacagggatctagccacccttcagtggccccaaggccagactgaggctcatccagtggagaaccttcttaaaccactgcttccttcccggcatgcattttgcattggtccagccctttgaaaccccttagagagaagcatatatggccacaaagcacagaggcttaggtttgccacatgcagacagggctttctgggcccttacctaatccccacccgactcttgctctgagttagagctgagttacgtacccagtatcacactcacagttagaaaagaccgaatcacaatttagaatcacttttcctctgtccccttctccccagctaagaatgtgtggcacctccatcagttatacttagaaggagcagaaatagttattttcgtatcttctatccctcaaagcatcagacatgggaaaattggtttataccaagaaagcttcctctgtggaaatctgtctcagcctactttattcctgcattgggaagccatatcgcagagctaaatgcaatagaatgaaccagaactagtggattccagggctgggggaaaaaaaaaaagaaaaaacctcattactgacctctcaaagttataaggatctctgcaaacaggatctaagcttaggaataatatttaggtgtgatatagtgttagatttttttgatgtattaaagaatgcatctccaatccttaggccatatcaactttggccatcaatatctctccttaaacaattatatttcaccttttagaatctttcatagccagaaaacaagattactgtaagccagttttagctgcactgatttcaaaagatataagaatattactatccttcaaatggaaaatgcgaccttgactttatgggataaacatctttcagacagtcagttttctagtcaggtttctctggtttcagagctgtatatacctgtcaactgaggaataaagggaaaaacccaagttcattcccacccaaagtcagaatccctcattggccttaaggtagcagtcataagacagagaattggacctagagtcccttctgtggggaataaggatacctagagaacattccacatgccaagaggatgcaggatttctacacaaccccttcccttcttggaagtcaagtgtaggtactgcagggcctgtgctcagctgtgaaccccgtatcctgggccccactgccgggaccgggtctgacatgccagtgccttcctgggctgagcacagattagagactctcccccttgtcagtcagcaccttaggaaaccatgatgggcacagagcatcacatgagctgtttctctccttaaagaagatccctggaaaggatgcttttcctctcctttgcctgcgcaggaattctaacaggagtgggtgaggatggcagagggacacagtgcctgtctcgcctccatcagggagagcagccatgccagggatgactagctctttgagcctgtcctcagaggatggcgaggcagccgggcagtggaggccttcatggtaacaaatgaaagctcagtatagaggaacagacactgtttacgtccctcccactgctaaccttatatatctctatagacaaatgtgataatgacatgatttcccacctgccctccaagaaaatggtgactcactctcaagtcagctactgtagagagggttctaattggttctgcaatttgctcttaaactctagcagggaactctcctcttaccacatcagcatgtaaggtgaataataactggttttgccagacagcaggttgtctgaccttcaaccactgggcaattgcctggcagatgcacacagtagctccctggcttctggctctgagtgttcctctcagcacctctgagtaagctgctgccaagcacatatccctatgacaacactttgtaaaagccgcggggcccccatacagcgagtgaccttgcaactgtgcagggttgccattggtcactttctcaccttgggaaggtgtcagtgttttcagttctaaggtaagaggtgtagagctgttcccaccagggctctgggacagactggaaaggaccacagacctggccatccctgggcagcagggccagtgtcacctgctgacctctagtatttcctttgccctagagctagagtcatgatagctgagggtcactcgccctgcaagagtcactaggcacccaccatgccaataaggctctccgctggctccctgcagttggctgggtgtttaatagtcactgaaaactcccagccctgctgcacactagaggcaggtcctctcggtcctctccatcctgtgcttctgtggcccccagcaagctcaccacctccttggaggagagagacatacaaggacagtgggtcatgggtagtaccagcctcaaattcccacaggctcatactcagacaattgtattactgccttatgttttttaagtgtttttttaaattcttcatagttgagtattatttgcaattttattagttacagtgctattaaagaatatgtgctcctttttattatattatcagatacttatgtttaattgtacattttttaaatcctgaatatattgtgttttgttaacaaatgtaatcagtggaacccttcttacgttttgattattagcagttaaatacattttgtatacatgaagcttagattaattcccatcatcatcatctcctgtttttatatgtgtccctatgtgtttcatgcattcctctttgatcagattggaatttgagttaaaatttagctttgtacattacgtgtgagagttacagactagcaagtctaattactttgccttaccttgagtgtatgccacagggtcagataacacattaaacatttagttacactggattactcttccaaagctgacctcctgctaatgttcagaggtaactgcaatccggaaagaaataatatcactgcagaaagaatgtgactctaaaaataaaccaggacctccctgtgatttgccttgcctgcagatgaccagttgactcttgtgctgtcagccctggggttgctaaggaagctgcttcagggagttgggggttagttgcccgctctcaacaggaatgcctcctctactttgtcagagatgctgaacaaatatcaaactctgtggcagtcatgctggcctcctaagaataacctgtgagtcagagttgatgcacattatttttgtttttattttatttttttaaggaactgctccaagggttcattatagaacaggagtgtgtacggaggacttaggtccccacatagagtggccgttctgtggcggctccaaccaattccatccctcctttcctgcggacacacacctggcccctggcccctgccctgtgtgtctggaggaggggcactggggaggctgtggagcagagagaagaggccggatacattgaggatggcacctggcaagccaggcttccttctcaaaggccagactgctttctcagtgttacttactaaagctctctttttatactgttaaaaagatatataaagttcgtataaacaggcttgagaccactttgatgtaaaagctgtcatagtagtttttctcacagtggcacaattcatttgattgatggaatattcagtgacgccatgtatgccctatcgcttttttctcatccatctttatgctataactcatactgatttaagaaatgatttctccttttggcaaagcgaccccattcaatatggttataataaaagactaatgtcaaactgaga

SEQ ID NO: 21214 - DNA, 3156 bp, Homo sapiens
  misc_feature 1..3156: note = ENST00000429383
  source 1..3156: mol_type = unassigned DNA
agcccttctgcgccacagagatggggtctcactctgtcatccaggctggaatatagtggcacaatcatagcccattgtagcctccatctcaaggactcaggggatcctcccttctaggcctcccaagtagctgggattacaggtagttacttttggtgacgctgtccagttcccacaatgtatcattccttatctgaaactagacatcctctgcagccagaagaacaagaagtaggcattgaccccttgtccagttactctaacaagtctggaggagattcaaataaaaatggaagaagaacaagttctactttagactctgaagggacttttaattcctataggaaagaatgggaagaactatttgtaaacaacaattacttggcaacaataaggcagaaggggattaatgggcagctgagaagcagcaggttccgcagcatttgctggaagctatttctttgtgttcttcctcaagacaaaagtcaatggataagtagaattgaagaattaagagcatggtatagcaacattaaagaaatacatattaccaacccgaggaaggttgttggccaacaagatttgatgatcaataatcctctttcacaggatgaagggagtctttggaacaaattcttccaagataaagaacttcgatcaatgattgaacaagatgtcaaaagaacgtttcctgaaatgcagtttttccagcaagaaaatgtgagaaaaattcttacagatgttcttttctgttatgccagagaaaacgagcagttgctttataaacagggcatgcacgaactgttagcacctatagtctttgtccttcactgtgaccaccaagcttttctacatgccagtgagtctgcacagcccagtgaggaaatgaaaactgtcttgaaccctgagtatctggaacatgatgcctatgcagtgttctcacaacttatggaaactgctgaaccttggttttcaacttttgagcatgatggtcagaaggggaaagaaacactgatgactcccattccctttgctagaccacaagatttagggccaacaattgctattgttactaaagtcaaccagatccaggatcatctactgaagaagcatgatattgagctttacatgcacttgaacagactagaaattgcaccacagatatatgggttaaggtgggtgcggctgctatttggacgagagttccccctgcaggaccttctggtggtctgggatgccttgtttgcagacggcctcagcctgggtttagtagattatatcttcgtagccatgttactttacatccgagatgctttgatctctagtaactaccagacctgtctcggccttctgatgcattacccattcatcggggatgtacactcactgattcttaaggctctgttccttagagatccaaagagaaatccaagaccagtgacttatcaattccatccaaatttagattattacaaagcacgaggagcagacctcatgaataaaagccggaccaatgccaaaggtgctcccctgaatataaataaggtctctaatagcctgattaattttggaagaaagttgatttccccagcaatggctccaggcagtgcaggtggccctgtacctggaggcaacagcagtagctcctcctctgttgtaattcctaccaggacctcagcagaggccccaagccatcacttgcaacagcaacagcagcagcagaggctgatgaaatcagaaagcatgcctgtgcaattgaacaaagggctaagttctaaaaacatcagttcatctccaagcgttgagagtttgcctggaggaagagaattcactggctctccaccttcatctgctactaaaaaagattccttttttagcaacatctcacgttctcgctcacacagcaaaactatgggcagaaaagaatctgaagaagaattagaagcccaaatttccttccttcaagggcagttgaatgacctggatgccatgtgcaaatactgtgcaaaggtgatggacactcatcttgtaaatattcaagatgtgatattacaagaaaatttggaaaaagaagatcaaattctggtttccctggcaggattaaaacagatcaaagacattctaaaaggttccctgcgttttaaccagagccagctagaggccgaagagaacgaacagatcaccattgcggacaaccactactgctccagcggccagggccagggccgaggccaaggccagagcgttcaaatgtcaggggccattaaacaggcctcttcagaaacgccagggtgcactgatagagggaattccgatgacttcatcctgatttccaaagatgatgatgggagcagtgccaggggctccttctccggccaggcccagcctcttcgcaccctcagaagcacctctgggaaaagccaggccccagtctgctccccactggtgttctcagatccactgatgggcccagcctcagcttcctccagcaaccccagctccagtcctgatgacgacagcagcaaggactctggcttcaccattgtgagtcccctggacatctgaccacagtgcccagtcctgccccacagggatctagccacccttcagtggccccaaggccagactgaggctcatccagtggagaaccttcttaaaccactgcttccttcccggcatgcattttgcattggtccagccctttgaaaccccttagagagaagcatatatggccacaaagcacagaggcttaggtttgccacatgcagacagggctttctgggcccttacctaatccccacccgactcttgctctgagttagagctgagttacgtacccagtatcacactcacagttagaaaagaccgaatcacaatttagaatcacttttcctctgtccccttctccccagctaagaatgtgtggcacctccatcagttatacttagaaggagcagaaatagttattttcgtatcttctatccctcaaagcatcagacatgggaaaattggtttataccaagaaagcttcctctgtggaaatctgtctcagcctactttattcctgcattgggaagccatatcgcagagctaaatgcaatagaatgaaccagaactagtggattccagggctgggggaaaaaaaaaaagaaaaaa

SEQ ID NO: 21215 - DNA, 2088 bp, Homo sapiens
  misc_feature 1..2088: note = ENST00000414318
  source 1..2088: mol_type = unassigned DNA
aaacgcccacttcgtatggggaaagaggacaacttgaagtcaagttgcaattaacttccgcggcagccgcagctccggcggcggcggcggcggcaggagaggcagaagccgccgcctcggaagtccgacgccggcgcgcccgcccggggagccgttcttggtttcaggcccgcactcgacagccaccgccgcccccaacgtccatgcctgaaaggtgggtgcggctgctatttggacgagagttccccctgcaggaccttctggtggtctgggatgccttgtttgcagacggcctcagcctgggtttagtagattatatcttcgtagccatgttactttacatccgagatgcttagaaatccaagaccagtgacttatcaattccatccaaatttagattattacaaagcacgaggagcagacctcatgaataaaagccggaccaatgccaaaggtgctcccctgaatataaataaggtctctaatagcctgattaattttggaagaaagttgatttccccagcaatggctccaggcagtgcaggtggccctgtacctggaggcaacagcagtagctcctcctctgttgtaattcctaccaggacctcagcagaggccccaagccatcacttgcaacagcaacagcagcagcagaggctgatgaaatcagaaagcatgcctgtgcaattgaacaaagggctaagttctaaaaacatcagttcatctccaagcgttgagagtttgcctggaggaagagaattcactggctctccaccttcatctgctactaaaaaagattccttttttagcaacatctcacgttctcgctcacacagcaaaactatgggcagaaaagaatctgaagaagaattagaagcccaaatttccttccttcaagggcagttgaatgacctggatgccatgtgcaaatactgtgcaaaggtgatggacactcatcttgtaaatattcaagatgtgatattacaagaaaatttggaaaaagaagatcaaattctggtttccctggcaggattaaaacagatcaaagacattctaaaaggttccctgcgttttaaccagagccagctagaggccgaagagaacgaacagatcaccattgcggacaaccactactgctccagcggccagggccagggccgaggccaaggccagagcgttcaaatgtcaggggccattaaacaggcctcttcagaaacgccagggtgcactgatagagggaattccgatgacttcatcctgatttccaaagatgatgatgggagcagtgccaggggctccttctccggccaggcccagcctcttcgcaccctcagaagcacctctgggaaaagccaggccccagtctgctccccactggtgttctcagatccactgatgggcccagcctcagcttcctccagcaaccccagctccagtcctgatgacgacagcagcaaggactctggcttcaccattgtgagtcccctggacatctgaccacagtgcccagtcctgccccacagggatctagccacccttcagtggccccaaggccagactgaggctcatccagtggagaaccttcttaaaccactgcttccttcccggcatgcattttgcattggtccagccctttgaaaccccttagagagaagcatatatggccacaaagcacagaggcttaggtttgccacatgcagacagggctttctgggcccttacctaatccccacccgactcttgctctgagttagagctgagttacgtacccagtatcacactcacagttagaaaagaccgaatcacaatttagaatcacttttcctctgtccccttctccccagctaagaatgtgtggcacctccatcagttatacttagaaggagcagaaatagttattttcgtatcttctatccctcaaagcatcagacatgggaaaattggtttataccaagaaagcttcctctgtggaaatctgtctcagcctactttattcctgcattgggaagccatatcgcagagctaaatgcaatagaatgaaccagaactagtggattccagggctgggggaaaaaaaaaaagaaaaaa

SEQ ID NO: 21216 - DNA, 3124 bp, Homo sapiens
  misc_feature 1..3124: note = ENST00000446818
  source 1..3124: mol_type = unassigned DNA
gtattgagtcaccataagtggacaaggaaggagcttctaacagacctcattgtacatacaaaattacaatcatgaatgtaaaggaaagcacactggaactgcttgcagctgactgcgaccttgagtctcagcttctgcatctgtgaaatgaagatactggtctgtgatatcagtatcaagataaaagtttggaatgggagaaaaattctcaaagcctgaaagaaaatctgtagttacttttggtgacgctgtccagttcccacaatgtatcattccttatctgaaactagacatcctctgcagccagaagaacaagaagtaggcattgaccccttgtccagttactctaacaagtctggaggagattcaaataaaaatggaagaagaacaagttctactttagactctgaagggacttttaattcctataggaaagaatgggaagaactatttgtaaacaacaattacttggcaacaataaggcagaaggggattaatgggcagctgagaagcagcaggttccgcagcatttgctggaagctatttctttgtgttcttcctcaagacaaaagtcaatggataagtagaattgaagaattaagagcatggtatagcaacattaaagaaatacatattaccaacccgaggaaggttgttggccaacaagatttgatgatcaataatcctctttcacaggatgaagggagtctttggaacaaattcttccaagataaagaacttcgatcaatgattgaacaagatgtcaaaagaacgtttcctgaaatgcagtttttccagcaagaaaatgtgagaaaaattcttacagatgttcttttctgttatgccagagaaaacgagcagttgctttataaacagggcatgcacgaactgttagcacctatagtctttgtccttcactgtgaccaccaagcttttctacatgccagtgagtctgcacagcccagtgaggaaatgaaaactgtcttgaaccctgagtatctggaacatgatgcctatgcagtgttctcacaacttatggaaactgctgaaccttggttttcaacttttgagcatgatggtcagaaggggaaagaaacactgatgactcccattccctttgctagaccacaagatttagggccaacaattgctattgttactaaagtcaaccagatccaggatcatctactgaagaagcatgatattgagctttacatgcacttgaacagactagaaattgcaccacagatatatgggttaaggtgggtgcggctgctatttggacgagagttccccctgcaggaccttctggtggtctgggatgccttgtttgcagacggcctcagcctgggtttagtagattatatcttcgtagccatgttactttacatccgagatgctttgatctctagtaactaccagacctgtctcggccttctgatgcattacccattcatcggggatgtacactcactgattcttaaggctctgttccttagagatccaaagagaaatccaagaccagtgacttatcaattccatccaaatttagattattacaaagcacgaggagcagacctcatgaataaaagccggaccaatgccaaaggtgctcccctgaatataaataaggtctctaatagcctgattaattttggaagaaagttgatttccccagcaatggctccaggcagtgcaggtggccctgtacctggaggcaacagcagtagctcctcctctgttgtaattcctaccaggacctcagcagaggccccaagccatcacttgcaacagcaacagcagcagcagaggctgatgaaatcagaaagcatgcctgtgcaattgaacaaaggcgatgtagttacaggaagcgatgctcaggtttctgttcctgtccagactctaactgacctccaagggctaagttctaaaaacatcagttcatctccaagcgttgagagtttgcctggaggaagagaattcactggctctccaccttcatctgctactaaaaaagattccttttttagcaacatctcacgttctcgctcacacagcaaaactatgggcagaaaagaatctgaagaagaattagaagcccaaatttccttccttcaagggcagttgaatgacctggatgccatgtgcaaatactgtgcaaaggtgatggacactcatcttgtaaatattcaagatgtgatattacaagaaaatttggaaaaagaagatcaaattctggtttccctggcaggattaaaacagatcaaagacattctaaaaggttccctgcgttttaaccagagccagctagaggccgaagagaacgaacagatcaccattgcggacaaccactactgctccagcggccagggccagggccgaggccaaggccagagcgttcaaatgtcaggggccattaaacaggcctcttcagaaacgccagggtgcactgatagagggaattccgatgacttcatcctgatttccaaagatgatgatgggagcagtgccaggggctccttctccggccaggcccagcctcttcgcaccctcagaagcacctctgggaaaagccaggccccagtctgctccccactggtgttctcagatccactgatgggcccagcctcagcttcctccagcaaccccagctccagtcctgatgacgacagcagcaaggactctggcttcaccattgtgagtcccctggacatctgaccacagtgcccagtcctgccccacagggatctagccacccttcagtggccccaaggccagactgaggctcatccagtggagaaccttcttaaaccactgcttccttcccggcatgcattttgcattggtccagccctttgaaaccccttagagagaagcatatatggccacaaagcacagaggcttaggtttgccacatgcagacagggctttctgggcccttacctaatccccacccgactcttgctctgagttagagctgagttacgtacccagtatcacactcacagttagaaaagaccgaatcacaatttagaatcacttttcctctgtccccttctccccagctaagaatgtgtggcacctccatcagttatacttagaaggagcagaaatagttattttc

SEQ ID NO: 21217 - DNA, 2477 bp, Homo sapiens
  misc_feature 1..2477: note = ENST00000429924
  source 1..2477: mol_type = unassigned DNA
acatattcattaaatctacggaagaactgtgtccaaaaagacagccatgcgttcagaaacagtacacaactaaatatatatgttttaaaagttgcattttttagacttacttaaaattaatttcccgtagaacttctctccaagcagaggaattttaacaaaaggattctcatgctttggtttctttcatataggaaagaatgggaagaactatttgtaaacaacaattacttggcaacaataaggcagaaggggattaatgggcagctgagaagcagcaggttccgcagcatttgctggaagctatttctttgtgttcttcctcaagacaaaagtcaatggataagtagaattgaagaattaagagcatggtatagcaacattaaagaaatacatattaccaacccgaggaaggttgttggccaacaagatttgatgatcaataatcctctttcacaggatgaagggagtctttggaacaaattcttccaagataaagaacttcgatcaatgattgaacaagatgtcaaaagaacgtttcctgaaatgcagtttttccagcaagaaaatgtgagaaaaattcttacagatgttcttttctgttatgccagagaaaacgagcagttgctttataaacagggcatgcacgaactgttagcacctatagtctttgtccttcactgtgaccaccaagcttttctacatgccagtgagtctgcacagcccagtgaggaaatgaaaactgtcttgaaccctgagtatctggaacatgatgcctatgcagtgttctcacaacttatggaaactgctgaaccttggttttcaacttttgagcatgatggtcagaaggggaaagaaacactgatgactcccattccctttgctagaccacaagatttagggccaacaattgctattgttactaaagtcaaccagatccaggatcatctactgaagaagcatgatattgagctttacatgcacttgaacagactagaaattgcaccacagatatatgggttaaggtgggtgcggctgctatttggacgagagttccccctgcaggaccttctggtggtctgggatgccttgtttgcagacggcctcagcctgggtttagtagattatatcttcgtagccatgttactttacatccgagatgctttgatctctagtaactaccagacctgtctcggccttctgatgcattacccattcatcggggatgtacactcactgattcttaaggctctgttccttagagatccaaagagaaatccaagaccagtgacttatcaattccatccaaatttagattattacaaagcacgaggagcagacctcatgaataaaagccggaccaatgccaaaggtgctcccctgaatataaataaggtctctaatagcctgattaattttggaagaaagttgatttccccagcaatggctccaggcagtgcaggtggccctgtacctggaggcaacagcagtagctcctcctctgttgtaattcctaccaggacctcagcagaggccccaagccatcacttgcaacagcaacagcagcagcagaggctgatgaaatcagaaagcatgcctgtgcaattgaacaaaggcgatgtagttacaggaagcgatgctcaggtttctgttcctgtccagactctaactgacctccaagggctaagttctaaaaacatcagttcatctccaagcgttgagagtttgcctggaggaagagaattcactggctctccaccttcatctgctactaaaaaagattccttttttagcaacatctcacgttctcgctcacacagcaaaactatgggcagaaaagaatctgaagaagaattagaagcccaaatttccttccttcaagggcagttgaatgacctggatgccatgtgcaaatactgtgcaaaggtgatggacactcatcttggtaagtgaattactttggccctgggaacgatgagactcatcacaataatagccactagcaatactttgttctaggccttgtgctaagctgtttacatgaattaccttatttaatccttacaacagctatataatagaagtactcttactctcactctctacattatatagatgaagaaaccaaggcatagagggattaagaaaatgccccaagattatatcattagtaaatcgagtggaaattcaaaatcaagcaatccgattataagctggatgccgtggctcacagctgtaatcccagcactgtggaaagccaaggtgggaagatttgaggccaggaatttgagaccagcctgagcaacatactgagaccctgtctctaccaacacaaaacaacaaatttttttttttttaattagctgggcatggtggcacgtgcctgtagtcccagctgcccaagaggctgagatggaaatattgcttaaacccaggggtttgaggttgcagcaagttgtgattgtgccactatattc

SEQ ID NO: 21218 - DNA, 476 bp, Homo sapiens
  misc_feature 1..476: note = ENST00000465884
  source 1..476: mol_type = unassigned DNA
tgatattgagctttacatgcacttgaacagactagaaattgcaccacagatatatgggttctgcccttggaagaatttggaaactccaagggacaacactttagtgaaatgagaatttatttgtgcttggcacagtgttctaatgaagagggtttcttgggctgctttgttttgtgaggaggtggccagtgaggaaagagaagattgatgatagccagcaccttggaggatgcttttgattacaagcttcagaatatcttgcctcaaactagctgaagtctggaggtactgtgacacaagaggctcaattaaggatccaagattttcgccatatttccgctgtgttaacttcatcatcagtttcttaagacatactctcttgtaatcacaaagtgattgacaatgattttggagctataggctttcttgttctagccaaactggtgagacagaataaaaccgttcaccaagtacaa

SEQ ID NO: 21219 - DNA, 852 bp, Homo sapiens
  misc_feature 1..852: note = ENST00000415814
  source 1..852: mol_type = unassigned DNA
acgtggccgctggtcaccgccgccaccccctcccgccctgttctctttcaggtcgggccgggcccggccgcttccgcgagcgccctgcagactgagggagagagagagaaagaggaggggaggaggaggaggattcagggaataggagctggggagcccttctgcgccacaggagggagcctgcgagcaaacgaggtggaaactggagtgcacaagtgctggaatgggctgtctgccttccacccctcacgggagggagcgcgcaggtagttacttttggtgacgctgtccagttcccacaatgtatcattccttatctgaaactagacatcctctgcagccagaagaacaagaagtaggcattgaccccttgtccagttactctaacaagtctggaggagattcaaataaaaatggaagaagaacaagttctactttagactctgaagggacttttaattcctataggaaagaatgggaagaactatttgtaaacaacaattacttggcaacaataaggcagaaggggattaatgggcagctgagaagcagcaggttccgcagcatttgctggaagctatttctttgtgttcttcctcaagacaaaagtcaatggataagtagaattgaagaattaagagcatggtatagcaacattaaagaaatacatattaccaacccgaggaaggttgttggccaacaagatttgatgatcaataatcctctttcacaggatgaagggagtctttggaacaaattcttccaagataaagaacttcgatcaatgattgaacaagatgtcaaaagaacgtttcctgaaatgcagtttttccagcaagaaaatgtgagaaa

SEQ ID NO: 21220 - DNA, 581 bp, Homo sapiens
  misc_feature 1..581: note = ENST00000452492
  source 1..581: mol_type = unassigned DNA
tttcaggtcgggccgggcccggccgcttccgcgagcgccctgcagactgagggagagagagagaaagaggaggggaggaggaggaggattcagggaataggagctggggagcccttctgcgccacaggtagttacttttggtgacgctgtccagttcccacaatgtatcattccttatctgaaactagacatcctctgcagccagaagaacaagaagtaggcattgaccccttgtccagttactctaacaagtctggaggaaagaatgggaagaactatttgtaaacaacaattacttggcaacaataaggcagaaggggattaatgggcagctgagaagcagcaggttccgcagcatttgctggaagctatttctttgtgttcttcctcaagacaaaagtcaatggataagtagaattgaagaattaagagcatggtatagcaacattaaagaaatacatattaccaacccgaggaaggttgttggccaacaagatttgatgatcaataatcctctttcacaggatgaagggagtctttggaacaaattcttccaagataaagaacttcgatcaatgatt

SEQ ID NO: 21221 - DNA, 592 bp, Homo sapiens
  misc_feature 1..592: note = ENST00000412981
  source 1..592: mol_type = unassigned DNA
gtcgggccgggcccggccgcttccgcgagcgccctgcagactgagggagagagagagaaagaggaggggaggaggaggaggattcagggaataggagctggggagcccttctgcgccacagtgatatcagtatcaagataaaagtttggaatgggagaaaaattctcaaagcctgaaagaaaatctgtagttacttttggtgacgctgtccagttcccacaatgtatcattccttatctgaaactagacatcctctgcagccagaagaacaagaagtaggcattgaccccttgtccagttactctaacaagtctggaggaaagaatgggaagaactatttgtaaacaacaattacttggcaacaataaggcagaaggggattaatgggcagctgagaagcagcaggttccgcagcatttgctggaagctatttctttgtgttcttcctcaagacaaaagtcaatggataagtagaattgaagaattaagagcatggtatagcaacattaaagaaatacatattaccaacccgaggaaggttgttggccaacaagatttgatgatcaataatcctctttcacaggatgaaggg

SEQ ID NO: 21222 - DNA, 757 bp, Homo sapiens
  misc_feature 1..757: note = ENST00000428355
  source 1..757: mol_type = unassigned DNA
ctgttctctttcaggtcgggccgggcccggccgcttccgcgagcgccctgcagactgagggagagagagagaaagaggaggggaggaggaggaggattcagggaataggagctggggagcccttctgcgccacagtgatatcagtatcaagataaaagtttggaatgggagaaaaattctcaaagcctgaaagaaaatctgagggagcctgcgagcaaacgaggtggaaactggagtgcacaagtgctggaatgggctgtctgccttccacccctcacgggagggagcgcgcaggtagttacttttggtgacgctgtccagttcccacaatgtatcattccttatctgaaactagacatcctctgcagccagaagaacaagaagtaggcattgaccccttgtccagttactctaacaagtctggaggagattcaaataaaaatggaagaagaacaagttctactttagactctgaagggacttttaattcctataggaaagaatgggaagaactatttgtaaacaacaattacttggcaacaataaggcagaaggggattaatgggcagctgagaagcagcaggttccgcagcatttgctggaagctatttctttgtgttcttcctcaagacaaaagtcaatggataagtagaattgaagaattaagagcatggtatagcaacattaaagaaatacatattaccaacccgaggaaggttgttggccaacaagatttgatgatcaataatcctctttc

SEQ ID NO: 21223 - DNA, 591 bp, Homo sapiens
  misc_feature 1..591: note = ENST00000425944
  source 1..591: mol_type = unassigned DNA
ctgttctctttcaggtcgggccgggcccggccgcttccgcgagcgccctgcagactgagggagagagagagaaagaggaggggaggaggaggaggattcagggaataggagctggggagcccttctgcgccacaggtagttacttttggtgacgctgtccagttcccacaatgtatcattccttatctgaaactagacatcctctgcagccagaagaacaagaagtaggcattgaccccttgtccagttactctaacaagtctggaggagattcaaataaaaatggaagaagaacaagttctactttagactctgaagggacttttaattcctataggaaagaatgggaagaactatttgtaaacaacaattacttggcaacaataaggcagaaggggattaatgggcagctgagaagcagcaggttccgcagcatttgctggaagctatttctttgtgttcttcctcaagacaaaagtcaatggataagtagaattgaagaattaagagcatggtatagcaacattaaagaaatacatattaccaacccgaggaaggttgttggccaacaagatttgatgatcaataatc

SEQ ID NO: 21224 - DNA, 492 bp, Homo sapiens
  misc_feature 1..492: note = ENST00000430169
  source 1..492: mol_type = unassigned DNA
caggtcgggccgggcccggccgcttccgcgagcgccctgcagactgagggagagagagagaaagaggaggggaggaggaggaggattcagggaataggagctggggagcccttctgcgccacaggtagttacttttggtgacgctgtccagttcccacaatgtatcattccttatctgaaactagacatcctctgcagccagaagaacaagaagtaggcattgaccccttgtccagttactctaacaagtctggaggaaagaatgggaagaactatttgtaaacaacaattacttggcaacaataaggcagaaggggattaatgggcagctgagaagcagcaggttccgcagcatttgctggaagctatttctttgtgttcttcctcaagacaaaagtcaatggataagtagaattgaagaattaagagcatggtatagcaacattaaagaaatacatattaccaacccgaggaaggttgttggccaacaag

SEQ ID NO: 21225 - DNA, 623 bp, Homo sapiens
  misc_feature 1..623: note = ENST00000445294
  source 1..623: mol_type = unassigned DNA
ctgttctctttcaggtcgggccgggcccggccgcttccgcgagcgccctgcagactgagggagagagagagaaagaggaggggaggaggaggaggattcagggaataggagctggggagcccttctgcgccacagtgatatcagtatcaagataaaagtttggaatgggagaaaaattctcaaagcctgaaagaaaatctgtagttacttttggtgacgctgtccagttcccacaatgtatcattccttatctgaaactagacatcctctgcagccagaagaacaagaagtaggcattgaccccttgtccagttactctaacaagtctggaggagattcaaataaaaatggaagaagaacaagttctactttagactctgaagggacttttaattcctataggaaagaatgggaagaactatttgtaaacaacaattacttggcaacaataaggcagaaggggattaatgggcagctgagaagcagcaggttccgcagcatttgctggaagctatttctttgtgttcttcctcaagacaaaagtcaatggataagtagaattgaagaattaagagcatggtatagcaacattaaagaaatacatattaccaacccgaggaagg

SEQ ID NO: 21226 - DNA, 687 bp, Homo sapiens
  misc_feature 1..687: note = ENST00000414349
  source 1..687: mol_type = unassigned DNA
cgggcccggccgcttccgcgagcgccctgcagactgagggagagagagagaaagaggaggggaggaggaggaggattcagggaataggagctggggagcccttctgcgccacagttttggagtccagaacatgtaaagttttttcacccattataaacaatttggacaaaatactgcatgttctacttaaaattgggagctaagcagtggtagagatggggcttcaccatgttgaccaggctggtcttgaactccttacctcaggtgatctcccaggcttggccttccaaggatttgtgcacatataaacttctgtccatgtagttacttttggtgacgctgtccagttcccacaatgtatcattccttatctgaaactagacatcctctgcagccagaagaacaagaagtaggcattgaccccttgtccagttactctaacaagtctggaggagattcaaataaaaatggaagaagaacaagttctactttagactctgaagggacttttaattcctataggaaagaatgggaagaactatttgtaaacaacaattacttggcaacaataaggcagaaggggattaatgggcagctgagaagcagcaggttccgcagcatttgctggaagctatttctttgtgttcttcctcaagacaaaagtcaatggataagtagaattgaaga

SEQ ID NO: 21227 - DNA, 681 bp, Homo sapiens
  misc_feature 1..681: note = ENST00000443499
  source 1..681: mol_type = unassigned DNA
ctgttctctttcaggtcgggccgggcccggccgcttccgcgagcgccctgcagactgagggagagagagagaaagaggaggggaggaggaggaggattcagggaataggagctggggagcccttctgcgccacagtgatatcagtatcaagataaaagtttggaatgggagaaaaattctcaaagcctgaaagaaaatctgagatgcttggagtgtaaagatcccatggtcacataaatccggaaagcactgaatactttgtttcccataagagaatcccattatatgttgatgtattaaaagacctgagaacctggtgtagttacttttggtgacgctgtccagttcccacaatgtatcattccttatctgaaactagacatcctctgcagccagaagaacaagaagtaggcattgaccccttgtccagttactctaacaagtctggaggagattcaaataaaaatggaagaagaacaagttctactttagactctgaagggacttttaattcctataggaaagaatgggaagaactatttgtaaacaacaattacttggcaacaataaggcagaaggggattaatgggcagctgagaagcagcaggttccgcagcatttgctggaagctatttctttgtgttcttcctcaagacaaaagtcaatggataagtagaattg

SEQ ID NO: 21228 - DNA, 561 bp, Homo sapiens
  misc_feature 1..561: note = ENST00000443386
  source 1..561: mol_type = unassigned DNA
atcctaacctttaggtttagggattgactgggtttctgactttttatttggccaatgaggacgatacagaaaatgaagcattggtcattatcacattttaacgctgaaaaagtaagaaggacaaccccggaataaaatgatatcagtatcaagataaaagtttggaatgggagaaaaattctcaaagcctgaaagaaaatctgagatgcttggagtgtaaagatcccatggtcacataaatccggaaagcactgaatactttgtttcccataagagaatcccattatatgttgatgtattaaaagacctgagaacctggtgtagttacttttggtgacgctgtccagttcccacaatgtatcattccttatctgaaactagacatcctctgcagccagaagaacaagaagtaggcattgaccccttgtccagttactctaacaagtctggaggaaagaatgggaagaactatttgtaaacaacaattacttggcaacaataaggcagaaggggattaatgggcagctgagaagcagcaggttccgcagcatttgctggaag

SEQ ID NO: 21229 - DNA, 672 bp, Homo sapiens
  misc_feature 1..672: note = ENST00000497531
  source 1..672: mol_type = unassigned DNA
agactgagggagagagagagaaagaggaggggaggaggaggaggattcagggaataggagctggggagcccttctgcgccacagtgatatcagtatcaagataaaagtttggaatgggagaaaaattctcaaagcctgaaagaaaatctgagatgcttggagtgtaaagatcccatggtcacataaatccggaaagcactgaatactttgtttcccataagagaatcccattatatgttgatgtattaaaagacctgagaacctggtgagggagcctgcgagcaaacgaggtggaaactggagtgcacaagtgctggaatgggctgtctgccttccacccctcacgggagggagcgcgcaggtagttacttttggtgacgctgtccagttcccacaatgtatcattccttatctgaaactagacatcctctgcagccagaagaacaagaagtaggcattgaccccttgtccagttactctaacaagtctggaggagattcaaataaaaatggaagaagaacaagttctactttagactctgaagggacttttaattcctataggaaagaatgggaagaactatttgtaaacaacaattacttggcaacaataaggcagaaggggattaatgggcagctgagaagcagcaggttccgcagcatttgctggaag

SEQ ID NO: 21230 - DNA, 545 bp, Homo sapiens
  misc_feature 1..545: note = ENST00000444756
  source 1..545: mol_type = unassigned DNA
gtcgggccgggcccggccgcttccgcgagcgccctgcagactgagggagagagagagaaagaggaggggaggaggaggaggattcagggaataggagctggggagcccttctgcgccacagtgatatcagtatcaagataaaagtttggaatgggagaaaaattctcaaagcctgaaagaaaatctgagatgcttggagtgtaaagatcccatggtcacataaatccggaaagcactgaatactttgtttcccataagagaatcccattatatgttgatgtattaaaagacctgagaacctggtgtagttacttttggtgacgctgtccagttcccacaatgtatcattccttatctgaaactagacatcctctgcagccagaagaacaagaagtaggcattgaccccttgtccagttactctaacaagtctggaggaaagaatgggaagaactatttgtaaacaacaattacttggcaacaataaggcagaaggggattaatgggcagctgagaagcagcaggttccgcagcatttgctggaag

SEQ ID NO: 21231 - DNA, 578 bp, Homo sapiens
  misc_feature 1..578: note = ENST00000507877
  source 1..578: mol_type = unassigned DNA
taagtggacaaggaaggagcttctaacagacttgtgtttggagaactctattgtactgagcctaagtcatttttgatctataacaagaacatgcattttcacatgtcaaccggatttgtggaccagtaaagttctcccacaagaaatcttctatgatattgtctcagggaccacctgcagcaggagcccacaaattgaataaatgcaacataaggagaggattttttttttctgttgttgcttgtttcaaaaatgctactatccagattctctattaaggtagttacttttggtgacgctgtccagttcccacaatgtatcattccttatctgaaactagacatcctctgcagccagaagaacaagaagtaggcattgaccccttgtccagttactctaacaagtctggaggagattcaaataaaaatggaagaagaacaagttctactttagactctgaagggacttttaattcctataggaaagaatgggaagaactatttgtaaacaacaattacttggcaacaataaggcagaaggggattaatgggcagctgagaagcagcaggttccgcagc

SEQ ID NO: 21232 - DNA, 557 bp, Homo sapiens
  misc_feature 1..557: note = ENST00000446863
  source 1..557: mol_type = unassigned DNA
gagcgccctgcagactgagggagagagagagaaagaggaggggaggaggaggaggattcagggaataggagctggggagcccttctgcgccacagtgatatcagtatcaagataaaagtttggaatgggagaaaaattctcaaagcctgaaagaaaatctagatggggtctcactctgtcatccaggctggaatatagtggcacaatcatagcccattgtagcctccatctcaaggactcaggggatcctcccttctaggcctcccaagtagctgggattacaggtagttacttttggtgacgctgtccagttcccacaatgtatcattccttatctgaaactagacatcctctgcagccagaagaacaagaagtaggcattgaccccttgtccagttactctaacaagtctggaggagattcaaataaaaatggaagaagaacaagttctactttagactctgaagggacttttaattcctataggaaagaatgggaagaactatttgtaaacaacaattacttggcaacaataaggcagaaggggattaatgggc

SEQ ID NO: 21233 - DNA, 386 bp, Homo sapiens
  misc_feature 1..386: note = ENST00000434420
  source 1..386: mol_type = unassigned DNA
cagtgatatcagtatcaagataaaagtttggaatgggagaaaaattctcaaagcctgaaagaaaatctccccctgctgctgttgattacacctagatctgctactgattggaactgttaaaaggcaaaggtagttacttttggtgacgctgtccagttcccacaatgtatcattccttatctgaaactagacatcctctgcagccagaagaacaagaagtaggcattgaccccttgtccagttactctaacaagtctggaggagattcaaataaaaatggaagaagaacaagttctactttagactctgaagggacttttaattcctataggaaagaatgggaagaactatttgtaaacaacaattacttggcaacaataaggcag

SEQ ID NO: 21234 - DNA, 526 bp, Homo sapiens
  misc_feature 1..526: note = ENST00000486224
  source 1..526: mol_type = unassigned DNA
tgatatcagtatcaagataaaagtttggaatgggagaaaaattctcaaagcctgaaagaaaatctggagatgctgtttttccagcagctcagttaagggagaacttagtttgtctctgtttcttgattcctcttcaatttctgtttgcaaaccaagacttgtgtttggagaactctattgtactgagcctaagtcatttttgatctataacaagaacatgcattttcacatgtcaaccggatttgtggaccagtaaagttctcccacaagagatggggtctcactctgtcatccaggctggaatatagtggcacaatcatagcccattgtagcctccatctcaaggactcaggggatcctcccttctaggcctcccaagtagctgggattacaggtagttacttttggtgacgctgtccagttcccacaatgtatcattccttatctgaaactagacatcctctgcagccagaagaacaagaagtaggcattgaccccttgtccagttactctaacaagtctggag

SEQ ID NO: 21235 - DNA, 680 bp, Homo sapiens
  misc_feature 1..680: note = ENST00000444471
  source 1..680: mol_type = unassigned DNA
ctgttctctttcaggtcgggccgggcccggccgcttccgcgagcgccctgcagactgagggagagagagagaaagaggaggggaggaggaggaggattcagggaataggagctggggagcccttctgcgccacagtgatatcagtatcaagataaaagtttggaatgggagaaaaattctcaaagcctgaaagaaaatctgagatgcttggagtgtaaagatcccatggtcacataaatccggaaagcactgaatactttgtttcccataagagaatcccattatatgttgatgtattaaaagacctgagaacctggtaaatcttctatgatattgtctcagggaccacctgcagcaggagcccacaaattgaataaatgcaacataaggagaggattttttttttctgttgttgcttgtttcaaaaatgctactatccagattctctattaaggagggagcctgcgagcaaacgaggtggaaactggagtgcacaagtgctggaatgggctgtctgccttccacccctcacgggagggagcgcgcaggtagttacttttggtgacgctgtccagttcccacaatgtatcattccttatctgaaactagacatcctctgcagccagaagaacaagaagtaggcattgaccccttgtccagttactctaacaagtctggag

SEQ ID NO: 21236 - DNA, 471 bp, Homo sapiens
  misc_feature 1..471: note = ENST00000433533
  source 1..471: mol_type = unassigned DNA
tattagttatgattctgttttaggaggtgtaatgccataatttcatagttttactaagtaagtttgaatttacatttgatttcttctggaagtcttagcagggtcttttaaatgaactgcatttaaaagtaaaagaatctgttgtgcttggaagatttgacagtgatatcagtatcaagataaaagtttggaatgggagaaaaattctcaaagcctgaaagaaaatctgagatgcttggagtgtaaagatcccatggtcacataaatccggaaagcactgaatactttgtttcccataagagaatcccattatatgttgatgtattaaaagacctgagaacctggtgtagttacttttggtgacgctgtccagttcccacaatgtatcattccttatctgaaactagacatcctctgcagccagaagaacaagaagtaggcattgaccccttgtccagttactctaacaag

SEQ ID NO: 21237 - DNA, 609 bp, Homo sapiens
  misc_feature 1..609: note = ENST00000481396
  source 1..609: mol_type = unassigned DNA
gctggtcaccgccgccaccccctcccgccctgttctctttcaggtcgggccgggcccggccgcttccgcgagcgccctgcagactgagggagagagagagaaagaggaggggaggaggaggaggattcagggaataggagctggggagcccttctgcgccacagtgatatcagtatcaagataaaagtttggaatgggagaaaaattctcaaagcctgaaagaaaatctgagatgcttggagtgtaaagatcccatggtcacataaatccggaaagcactgaatactttgtttcccataagagaatcccattatatgttgatgtattaaaagacctgagaacctggtggagatgctgtttttccagcagctcagttaagggagaacttagtttgtctctgtttcttgattcctcttcaatttctgtttgcaaaccaagacttgtgtttggagaactctattgtactgagcctaagtcatttttgatctataacaagaacatgcattttcacatgtcaaccggatttgtggaccagtaaagttctcccacaaggtagttacttttggtgacgctgtccagttcccacaatgtatcattccttatctgaaa

SEQ ID NO: 21238 - DNA, 560 bp, Homo sapiens
  misc_feature 1..560: note = ENST00000480435
  source 1..560: mol_type = unassigned DNA
agtcaccataagtggacaaggaaggagcttctaacagttttggagtccagaacatgtaaagttttttcacccattataaacaatttggacaaaatactgcatgttctacttaaaattgggagctaagcagtggtgatatcagtatcaagataaaagtttggaatgggagaaaaattctcaaagcctgaaagaaaatctgagatgcttggagtgtaaagatcccatggtcacataaatccggaaagcactgaatactttgtttcccataagagaatcccattatatgttgatgtattaaaagacctgagaacctggtaaatcttctatgatattgtctcagggaccacctgcagcaggagcccacaaattgaataaatgcaacataaggagaggattttttttttctgttgttgcttgtttcaaaaatgctactatccagattctctattaaggcaatattcactctgtcgccaagactggagtgcatggtgtgattaaggctcactgcagcatcaacctccaggtctcaaaccatcctcccacctcagcccccactacag

SEQ ID NO: 21239 - DNA, 588 bp, Homo sapiens
  misc_feature 1..588: note = ENST00000423331
  source 1..588: mol_type = unassigned DNA
ttctctttcaggtcgggccgggcccggccgcttccgcgagcgccctgcagactgagggagagagagagaaagaggaggggaggaggaggaggattcagggaataggagctggggagcccttctgcgccacagtgatatcagtatcaagataaaagtttggaatgggagaaaaattctcaaagcctgaaagaaaatctgagatgcttggagtgtaaagatcccatggtcacataaatccggaaagcactgaatactttgtttcccataagagaatcccattatatgttgatgtattaaaagacctgagaacctggtggagatgctgtttttccagcagctcagttaagggagaacttagtttgtctctgtttcttgattcctcttcaatttctgtttgcaaaccaagacttgtgtttggagaactctattgtactgagcctaagtcatttttgatctataacaagaacatgcattttcacatgtcaaccggatttgtggaccagtaaagttctcccacaagaaatcttctatgatattgtctcagggaccacctgcagcaggagcccacaaattgaataaatgcaacat

SEQ ID NO: 21240 - DNA, 566 bp, Homo sapiens
  misc_feature 1..566: note = ENST00000485432
  source 1..566: mol_type = unassigned DNA
gagcttcccaggcgcgcgggccgcgaggttattagaggtggagcgcggggagggcgcgcggcgggaggcggccgccgttacggcgcgagcgtggtcacgtggccgctggtcaccgccgccaccccctcccgccctgttctctttcaggtcgggccgggcccggccgcttccgcgagcgccctgcagactgagggagagagagagaaagaggaggggaggaggaggaggattcagggaataggagctggggagcccttctgcgccacagtgatatcagtatcaagataaaagtttggaatgggagaaaaattctcaaagcctgaaagaaaatctgagatgcttggagtgtaaagatcccatggtcacataaatccggaaagcactgaatactttgtttcccataagagaatcccattatatgttgatgtattaaaagacctgagaacctggtacttgtgtttggagaactctattgtactgagcctaagtcatttttgatctataacaagaacatgcattttcacatgtcaaccggatttgtggaccagtaaagttctcccacaagg

SEQ ID NO: 21241 - DNA, 330 bp, Homo sapiens
  misc_feature 1..330: note = ENST00000473612
  source 1..330: mol_type = unassigned DNA
aagcctgcagacaacactgtcatgcttttcttttcaacagatgtcctctgactcctcccaacctcctagtacaaaaaaacataaaaatctttgtatgttttgcatctgtttgaaaaagatgcctttaaaaatgatatcagtatcaagataaaagtttggaatgggagaaaaattctcaaagcctgaaagaaaatctgtaagaataaaattcttgaatgattttgatcagctgtcatgtatgcccaacacagcagttggtttaatcaattttatgttttgggatggttttattaaaatgagctgctgctttcagtaaatcattgagaaaga

SEQ ID NO: 21242 - DNA, 435 bp, Homo sapiens
  misc_feature 1..435: note = ENST00000471679
  source 1..435: mol_type = unassigned DNA
aggcgcgcgggccgcgaggttattagaggtggagcgcggggagggcgcgcggcgggaggcggccgccgttacggcgcgagcgtggtcacgtggccgctggtcaccgccgccaccccctcccgccctgttctctttcaggtcgggccgggcccggccgcttccgcgagcgccctgcagactgagggagagagagagaaagaggaggggaggaggaggaggattcagggaataggagctggggagcccttctgcgccacagttttggagtccagaacatgtaaagttttttcacccattataaacaatttggacaaaatactgcatgttctacttaaaattgggagctaagcagtgggtcctcatcctgtcataggaataatagtcttgaaaattggagctctggaattcaccattctgagagatatctccttactg

SEQ ID NO: 21243 - DNA, 1375 bp, Homo sapiens
  misc_feature 1..1375: note = ENST00000529397
  source 1..1375: mol_type = unassigned DNA
gtcacgtgttgttgttgggccgggaaagctgcttccgggtcaatgcaggacactgggctccggcggccagagtgggggactagcattttaagaaagaaagatggatcaacctagtggaagaagtttcatgcaagtattatgtgaaaaatatagtcctgaaaattttccttatcgccgtggcccggggatgggagtccatgtcccagccacacctcagggctctcctatgaaagatcgcctcaacctcccaagtgtactagtgttgaacagctgtggaataacctgtgcaggagatgaaaaagaaattgctgctttctgcgctcatgtgtcggaactagatctttctgacaacaaactcgaagactggcatgaggtcagtaaaattgtgtcaaatgttcctcagttggagtttctaaacctgagttccaaccctctgaatttgtcggttttagaaagaacatgtgctgggtccttctctggggttcgcaaacttgtcctcaacaacagcaaagcttcttgggagacggtccacatgatactacaggagttaccagatttggaggagctcttcctgtgccttaatgactatgaaacagtgtcttgtccttctatttgctgtcattctcttaagctactacatataacagacaataacctccaagactggactgaaatacgaaagttaggagttatgtttccttcactggataccctcgtcctggccaacaatcatttgaatgctattgaggagcctgatgattcattggccaggttgtttcctaatcttcgatccatcagcctccacaagtcaggtttgcagtcctgggaagacattgataaactaaattcatttcccaaactggaagaagtgagattgttaggaattcctcttctgcagccatataccaccgaggagcgaaggaaattggtaatagccagattgccatcagtttccaaacttaatggcagcgttgttactgatggtgaacgagaagattctgagagattttttattcgttactatgtggatgttccacaggaagaagtgccattcaggtatcatgaactgatcactaaatatgggaagttggagcctttggcagaagtggacctaagaccccagagcagtgcaaaagtagaagtccactttaacgatcaggtggaagaaatgagcattcgtctggaccaaacagtggcagaactaaagaaacagttaaaaactctagtacaattacccacaagcaacatgcttctctactattttgaccatgaagcaccctttggcccagaggaaatgaagtacagctctcgggcattgcattcctttggcattagggatggagataaaatttacgtggaatccaaaacaaaataa

SEQ ID NO: 21244 - DNA, 3923 bp, Homo sapiens
  misc_feature 1..3923: note = ENST00000284259
  source 1..3923: mol_type = unassigned DNA
gggaaagctgcttccgggtcaatgcaggacactgggctccggcggccagagtgggggactaggtgaagcggcgccgggccggggctggccgggaccaggcccgaggctgagcggcggcgacagcggtggccgggaggggggaggagaggcgcagccagaggagccgccgcagtagctcccccgcctcccgggctgagggcattttaagaaagaaagatggatcaacctagtggaagaagtttcatgcaagtattatgtgaaaaatatagtcctgaaaattttccttatcgccgtggcccggggatgggagtccatgtcccagccacacctcagggctctcctatgaaagatcgcctcaacctcccaagtgtactagtgttgaacagctgtggaataacctgtgcaggagatgaaaaagaaattgctgctttctgcgctcatgtgtcggaactagatctttctgacaacaaactcgaagactggcatgagaaagaacatgtgctgggtccttctctggggttcgcaaacttgtcctcaacaacagcaaagcttcttgggagacggtccacatgatactacaggagttaccagatttggaggagctcttcctgtgccttaatgactatgaaacagtgtcttgtccttctatttgctgtcattctcttaagctactacatataacagacaataacctccaagactggactgaaatacgaaagttaggagttatgtttccttcactggataccctcgtcctggccaacaatcatttgaatgctattgaggagcctgatgattcattggccaggttgtttcctaatcttcgatccatcagcctccacaagtcaggtttgcagtcctgggaagacattgataaactaaattcatttcccaaactggaagaagtgagattgttaggaattcctcttctgcagccatataccaccgaggagcgaaggaaattggtaatagccagattgccatcagtttccaaacttaatggcagcgttgttactgatggtgaacgagaagattctgagagattttttattcgttactatgtggatgttccacaggaagaagtgccattcaggtatcatgaactgatcactaaatatgggaagttggagcctttggcagaagtggacctaagaccccagagcagtgcaaaagtagaagtccactttaacgatcaggtggaagaaatgagcattcgtctggaccaaacagtggcagaactaaagaaacagttaaaaactctagtacaattacccacaagcaacatgcttctctactattttgaccatgaagcaccctttggcccagaggaaatgaagtacagctctcgggcattgcattcctttggcattagggatggagataaaatttacgtggaatccaaaacaaaataacctctaccagccttgtgaaaaacatacacataaggacttgttgcagggcatttgtttttaatgtggttttctttaggagggagaggttgtttttgttttgttttgttctgtttaggtttgggaaggattttgtatatttttccccctggagtgagtaggggccatttttgggtgttttctaccacagattgatttggctcagccagcggaattggccacatttccagtgtatgtgccctctctaaggaaagatgacaaagaaatcaccgacttcttactgtgttcactgggatttgcctgccacttggttatcattactgttgggtgaacctgtgaagataacatgaacactgtagccccttagaagggtctcatagagaatttaaacagggtgacaaggaatcttcacaggaagggccagaacttctctctcccagttcttccttccgctaccctccctccttggcttttttggttcagttccatttttttttcattttgacatgtggtttacctaatagttttgttctgttcataattcttatttctcaacctgggtgatttttttgttctcatttctcccttttgaaataattgaaagtgttttaagcatttttaacctgattctaatctcaggtacgcagtaagaagctataactctgttagaacctcgaagagtagatgtagaatgaaaactccaggaaaacttgcagttattctggaagcaccggcagaacagtctgatctctttgtatgttactaactcacttttaatgtccctgtacattatgtcagccattactttcataacatgaaatatgtcagattccagagttcttttatttttgcttattgaatgtatttcctcatatctttctttttcattactttaaactattgggaattgaggcctgacttcataaataattcaatagagtcctggatacgtgcaccaggagagttgagaattagctcataaactatctgtggtgtgtgtggggaatgaagttgggggatgtgggggaagagcttatgactttcccacctgtgtcatccattggaagcccttgctcttgcactttgcattaaaagtgggaaacattaatcaaagggagattttattcccaggttttccctgggactttgtgatatcataattgaacagttcttttgttttacatttcaatttagttgcctcatagaagtataactgcccaatctatgagtaaagtgtaagtgtcaaaactttacaattgcctccaagtcatattttttgcagaagcacatttaaagcacttttctgtaaaagctagttccttacctgcttggaaatctttttgtttgttcttctattcctttgttaatcagatgtaatccctttctttaatgtgtatttttcttggtccaccatgtttacagatgggagacttgagagatacttagcataactggggcagaaagtgtgtaagtgaagtatttttcaaagaatgcagttattatctgattgcatttgaccttttgacctttgttacataattctacccctcctacaaatttaatttttttatgaaatttttaggtgacttgtaaattcttcatgtatgaggagttgtgtttattaatgctactttttaaattttcctgtgccatgtggcagatgtttattctcttaatgcacttcaggtttgctatctgtaaagcctttgacccaggcctactgagtcaaatctacattcagtgtaacattaaaggtggaaaccaaagggtttgagaaagacgaataaggcctattctccttctgctgcagactttatctttcaaaatcataaaaatgagcaatggagatccaggctgggtatagacaagaataattattttgcaaacacattttcctgacagatttttggaagtaggaaaaaagtatggcaacagtgtcatgaagattgaaactgtaggtgctttgtgtatgtatgcatgagtgcagatgagtttgagagagaaaaagtgtaattgagccctttgcttttgtcagcctgggaaacagatgcgttcttattttttgaagttgtgtgaccctggactgtcccacagcagaaggcagaacaaacacttatgttatgctttaatcataagtggaatggtcacaattaataagatattttatatatggcaaagttttatgaaatgcttttttactattagagacctgtttcttctgttattacagaacacagtgtttatcaactgcggacataattcttttattatacagttgcatgtaaagggagcttctcatttaattcagcggatgtgggtatttttagggcattgtaattgatggttttaataattgctgaataatttttgattaagagaaaaatgtaatacaattactggtctgagttacagaacagaagttaatgaaaaaggctatttgagcatgtgtacttatagattcatttgggtggctgagaaaagatgctgcttttgaaataaaattggtgctgtgta

SEQ ID NO: 21245 - DNA, 553 bp, Homo sapiens
  misc_feature 1..553: note = ENST00000528512
  source 1..553: mol_type = unassigned DNA
aatgcaggacactgggctccggcggccagagtgggggactaggtgaagcggcgccgggccggggctggccgggaccaggcccgaggctgagcggcggcgacagcggtggccgggaggggggaggagaggcgcagccagaggagccgccgcagtagctcccccgcctcccgggctgagggaatgtctaatttaatagggatatagacagttggtttaaaccaacatttttggacgaggagaggctatggaaatgaagaaagaagtgtttagaaatatcacacaaacagcattttaagaaagaaagatggatcaacctagtggaagaagtttcatgcaagtattatgtgaaaaatatagtcctgaaaattttccttatcgccgtggcccggggatgggagtccatgtcccagccacacctcagggctctcctatgaaagatcgcctcaacctcccaagtgtactagtgttgaacagctgtggaataacctgtgcaggagatgaaaaagaaattgctgctttctgcgctcatgtgtcggaactagatctttctgac

SEQ ID NO: 21246 - DNA, 2593 bp, Homo sapiens
  misc_feature 1..2593: note = ENST00000531148
  source 1..2593: mol_type = unassigned DNA
acactgggctccggcggccagagtgggggactaggtgaagcggcgccgggccggggctggccgggaccaggcccgaggctgagcggcggcgacagcggtggccgggaggggggaggagaggcgcagccagaggagccgccgcagtagctcccccgcctcccgggctgagggcggaaagaaaacatgcatatatgattttcttctgatgaaacctaatgtattcaagaaaaagaatcttgctttttggaaggatggaaaaattgggaataattttttcccctttgataattagaccactcagtactgttgcttagttttttggttcagttactttgatgtggttacaagaggaattttggctgtaatggatttcatacatttttaatgtctaatttaatagggatatagacagttggtttaaaccaacatttttggacgaggagaggctatggaaatgaagaaagaagtgtttagaaatatcacacaaacagcattttaagaaagaaagatggatcaacctagtggaagaagtttcatgcaagtattatgtgaaaaatatagtcctgaaaattttccttatcgccgtggcccggggatgggagtccatgtcccagccacacctcagggctctcctatgaaagatcgcctcaacctcccaagtgtactagtgttgaacagctgtggaataacctgtgcaggagatgaaaaagaaattgctgctttctgcgctcatgtgtcggaactagatctttctgacaacaaactcgaagactggcatgaggtttgcagtcctgggaagacattgataaactaaattcatttcccaaactggaagaagtgagattgttaggaattcctcttctgcagccatataccaccgaggagcgaaggaaattggtaatagccagattgccatcagtttccaaacttaatggcagcgttgttactgatggtgaacgagaagattctgagagattttttattcgttactatgtggatgttccacaggaagaagtgccattcaggtatcatgaactgatcactaaatatgggaagttggagcctttggcagaagtggacctaagaccccagagcagtgcaaaagtagaagtccactttaacgatcaggtggaagaaatgagcattcgtctggaccaaacagtggcagaactaaagaaacagttaaaaactctagtacaattacccacaagcaacatgcttctctactattttgaccatgaagcaccctttggcccagaggaaatgaagtacagctctcgggcattgcattcctttggcattagggatggagataaaatttacgtggaatccaaaacaaaataacctctaccagccttgtgaaaaacatacacataaggacttgttgcagggcatttgtttttaatgtggttttctttaggagggagaggttgtttttgttttgttttgttctgtttaggtttgggaaggattttgtatatttttccccctggagtgagtaggggccatttttgggtgttttctaccacagattgatttggctcagccagcggaattggccacatttccagtgtatgtgccctctctaaggaaagatgacaaagaaatcaccgacttcttactgtgttcactgggatttgcctgccacttggttatcattactgttgggtgaacctgtgaagataacatgaacactgtagccccttagaagggtctcatagagaatttaaacagggtgacaaggaatcttcacaggaagggccagaacttctctctcccagttcttccttccgctaccctccctccttggcttttttggttcagttccatttttttttcattttgacatgtggtttacctaatagttttgttctgttcataattcttatttctcaacctgggtgatttttttgttctcatttctcccttttgaaataattgaaagtgttttaagcatttttaacctgattctaatctcaggtacgcagtaagaagctataactctgttagaacctcgaagagtagatgtagaatgaaaactccaggaaaacttgcagttattctggaagcaccggcagaacagtctgatctctttgtatgttactaactcacttttaatgtccctgtacattatgtcagccattactttcataacatgaaatatgtcagattccagagttcttttatttttgcttattgaatgtatttcctcatatctttctttttcattactttaaactattgggaattgaggcctgacttcataaataattcaatagagtcctggatacgtgcaccaggagagttgagaattagctcataaactatctgtggtgtgtgtggggaatgaagttgggggatgtgggggaagagcttatgactttcccacctgtgtcatccattggaagcccttgctcttgcactttgcattaaaagtgggaaacattaatcaaagggagattttattcccaggttttccctgggactttgtgatatcataattgaacagttcttttgttttacatttcaatttagttgcctcatagaagtataactgcccaatctatgagtaaagtgtaagtgtcaaaacttt

SEQ ID NO: 21247 - DNA, 5142 bp, Homo sapiens
  misc_feature 1..5142: note = ENST00000422003
  source 1..5142: mol_type = unassigned DNA
acactgggctccggcggccagagtgggggactaggtgaagcggcgccgggccggggctggccgggaccaggcccgaggctgagcggcggcgacagcggtggccgggaggggggaggagaggcgcagccagaggagccgccgcagtagctcccccgcctcccgggctgagggcattttaagaaagaaagatggatcaacctagtggaagaagtttcatgcaagtattatgtgaaaaatatagtcctgaaaattttccttatcgccgtggcccggggatgggagtccatgtcccagccacacctcagggctctcctatgaaagatcgcctcaacctcccaagtgtactagtgttgaacagctgtggaataacctgtgcaggagatgaaaaagaaattgctgctttctgcgctcatgtgtcggaactagatctttctgacaacaaactcgaagactggcatgaggtcagtaaaattgtgtcaaatgttcctcagttggagtttctaaacctgagttccaaccctctgaatttgtcggttttagaaagaacatgtgctgggtccttctctggggttcgcaaacttgtcctcaacaacagcaaagcttcttgggagacggtccacatgatactacaggagttaccagatttggaggagctcttcctgtgccttaatgactatgaaacagtgtcttgtccttctatttgctgtcattctcttaagctactacatataacagacaataacctccaagactggactgaaatacgaaagttaggagttatgtttccttcactggataccctcgtcctggccaacaatcatttgaatgctattgaggagcctgatgattcattggccaggttgtttcctaatcttcgatccatcagcctccacaagtcaggtttgcagtcctgggaagacattgataaactaaattcatttcccaaactggaagaagtgagattgttaggaattcctcttctgcagccatataccaccgaggagcgaaggaaattggtaatagccagattgccatcagtttccaaacttaatggcagcgttgttactgatggtgaacgagaagattctgagagattttttattcgttactatgtggatgttccacaggaagaagtgccattcaggtatcatgaactgatcactaaatatgggaagttggagcctttggcagaagtggacctaagaccccagagcagtgcaaaagtagaagtccactttaacgatcaggtggaagaaatgagcattcgtctggaccaaacagtggcagaactaaagaaacagttaaaaactctagtacaattacccacaagcaacatgcttctctactattttgaccatgaagcaccctttggcccagaggaaatgaagtacagctctcgggcattgcattcctttggcattagggatggagataaaatttacgtggaatccaaaacaaaataacctctaccagccttgtgaaaaacatacacataaggacttgttgcagggcatttgtttttaatgtggttttctttaggagggagaggttgtttttgttttgttttgttctgtttaggtttgggaaggattttgtatatttttccccctggagtgagtaggggccatttttgggtgttttctaccacagattgatttggctcagccagcggaattggccacatttccagtgtatgtgccctctctaaggaaagatgacaaagaaatcaccgacttcttactgtgttcactgggatttgcctgccacttggttatcattactgttgggtgaacctgtgaagataacatgaacactgtagccccttagaagggtctcatagagaatttaaacagggtgacaaggaatcttcacaggaagggccagaacttctctctcccagttcttccttccgctaccctccctccttggcttttttggttcagttccatttttttttcattttgacatgtggtttacctaatagttttgttctgttcataattcttatttctcaacctgggtgatttttttgttctcatttctcccttttgaaataattgaaagtgttttaagcatttttaacctgattctaatctcaggtacgcagtaagaagctataactctgttagaacctcgaagagtagatgtagaatgaaaactccaggaaaacttgcagttattctggaagcaccggcagaacagtctgatctctttgtatgttactaactcacttttaatgtccctgtacattatgtcagccattactttcataacatgaaatatgtcagattccagagttcttttatttttgcttattgaatgtatttcctcatatctttctttttcattactttaaactattgggaattgaggcctgacttcataaataattcaatagagtcctggatacgtgcaccaggagagttgagaattagctcataaactatctgtggtgtgtgtggggaatgaagttgggggatgtgggggaagagcttatgactttcccacctgtgtcatccattggaagcccttgctcttgcactttgcattaaaagtgggaaacattaatcaaagggagattttattcccaggttttccctgggactttgtgatatcataattgaacagttcttttgttttacatttcaatttagttgcctcatagaagtataactgcccaatctatgagtaaagtgtaagtgtcaaaactttacaattgcctccaagtcatattttttgcagaagcacatttaaagcacttttctgtaaaagctagttccttacctgcttggaaatctttttgtttgttcttctattcctttgttaatcagatgtaatccctttctttaatgtgtatttttcttggtccaccatgtttacagatgggagacttgagagatacttagcataactggggcagaaagtgtgtaagtgaagtatttttcaaagaatgcagttattatctgattgcatttgaccttttgacctttgttacataattctacccctcctacaaatttaatttttttatgaaatttttaggtgacttgtaaattcttcatgtatgaggagttgtgtttattaatgctactttttaaattttcctgtgccatgtggcagatgtttattctcttaatgcacttcaggtttgctatctgtaaagcctttgacccaggcctactgagtcaaatctacattcagtgtaacattaaaggtggaaaccaaagggtttgagaaagacgaataaggcctattctccttctgctgcagactttatctttcaaaatcataaaaatgagcaatggagatccaggctgggtatagacaagaataattattttgcaaacacattttcctgacagatttttggaagtaggaaaaaagtatggcaacagtgtcatgaagattgaaactgtaggtgctttgtgtatgtatgcatgagtgcagatgagtttgagagagaaaaagtgtaattgagccctttgcttttgtcagcctgggaaacagatgcgttcttattttttgaagttgtgtgaccctggactgtcccacagcagaaggcagaacaaacacttatgttatgctttaatcataagtggaatggtcacaattaataagatattttatatatggcaaagttttatgaaatgcttttttactattagagacctgtttcttctgttattacagaacacagtgtttatcaactgcggacataattcttttattatacagttgcatgtaaagggagcttctcatttaattcagcggatgtgggtatttttagggcattgtaattgatggttttaataattgctgaataatttttgattaagagaaaaatgtaatacaattactggtctgagttacagaacagaagttaatgaaaaaggctatttgagcatgtgtacttatagattcatttgggtggctgagaaaagatgctgcttttgaaataaaattggtgctgtgtagacacttgtaaccaaaattatttttataacagaactaaaagaaggagagaagaggccatggacctttgagtttacatgttatacctaattgattgtctgcagcttatctgtattttaatattgactttgtccagattcagtgagaacatagtattgacattatgaggcaaaatgctgtcatagccagtattactgatatgttgctacagacacaatgtatagaacataccttttctaaaataggaattatttccagttatgaaaaaggaaaagagtaataaagaaaaccaaatcaaaaccaagggatcctttctacatgtgggtgaacggctgctaaagccacagtagaaaccaatttttgaatttgaattgttgaaatatcctagattgctttaatggaaaaaatccagagtcacatatcttttttattatcaagtttttgcagccttttgccagcattgccataaatacgtaagaaagcagcagatagtataagcccctagttattaagacttctcagttaatattaaggccaaaatataacttgagctaggtataacagggctgaatgctacagtgttgtttttaaagattttgcttatttttaaagacaggaaaattcagttctaaccagatgttccagctatgttactcaaccagcagtggtaggagcagagagcacttgcactaagagctgatcaccatttgagatacgcggcttaacgcacatgtgagtgtagcttgctacatgaaaatgctaggctctagggcatgtaaaacatgaatacagaatactagattgttctaagtaatgtcatttcggtttgtgaatttgatttttcccttcatttcatgtcatattgaaaatgcaaacaaactgctctcaagaacacccagaagctatctgtgttaccagatgtgttgtgaacactctactatttttcataggtgcttccttgaaatatatgtccattgtagtggtggagagggactggactctctcaggctctttacttgccagttgtctcccgcagttaatggaaatatatatacatatatatatatattttatttagaatataatttaaacatgaaggtctattctttgcactttttattaatatatatatagataatctttaaaaaaattaaaattcaagtccatttt

SEQ ID NO: 21248 - DNA, 947 bp, Homo sapiens
  misc_feature 1..947: note = ENST00000533712
  source 1..947: mol_type = unassigned DNA
tgggggactaggtgaagcggcgccgggccggggctggccgggaccaggcccgaggctgagcggcggcgacagcggtggccgggaggggggaggagaggcgcagccagaggagccgccgcagtagctcccccgcctcccgggctgagggcattttaagaaagaaagatggatcaacctagtggaagaagtttcatgcaagtattatgtgaaaaatatagtcctgaaaattttccttatcgccgtggcccggggatgggagtccatgtcccagccacacctcagggctctcctatgaaagatcgcctcaacctcccaagtgtactagtgttgaacagctgtggaataacctgtgcaggagatgaaaaagaaattgctgctttctgcgctcatgtgtcggaactagatctttctgacaacaaactcgaagactggcatgagaaagaacatgtgctgggtccttctctggggttcgcaaacttgtcctcaacaacagcaaagcttcttgggagacggtccacatgatactacaggagttaccagagtttgcagtcctgggaagacattgataaactaaattcatttcccaaactggaagaagtgagattgttaggaattcctcttctgcagccatataccaccgaggagcgaaggaaattggtaatagccagattgccatcagtttccaaacttaatggcagcgttgttactgatggtgaacgagaagattctgagagattttttattcgttactatgtggatgttccacaggaagaagtgccattcaggtatcatgaactgatcactaaatatgggaagttggagcctttggcagaagtggacctaagaccccagagcagtgcaaaagtagaagtccactttaacgatcaggtggaagaaatgagcattcgtctggaccaaacagtggcagaactaaagaaacagttaaa

SEQ ID NO: 21249 - DNA, 1913 bp, Homo sapiens
  misc_feature 1..1913: note = ENST00000524726
  source 1..1913: mol_type = unassigned DNA
gtaaccctatgagctaggagttacaggctactaccccttcctgtgagtgaagaggggtagacttagagaacttaagtaacttgcccacagttacacagagtagtggaatcagtcaggatttacatacccagggcgtttagttttagaaccagtacttactaccattgggcagtattgccatagcactaaatgtaggaggagctagtgaaaaaaaaaacaaaaacaaacgtggatttttttttttttaatgacctgcagacttttgcaacctttatgcgtgattgatgtttcaacattctggcaatccctggttattagccagggtggtttgtaaactgctctggaaggctgtagagtgatgaactagtggtctgttcctaatgaggcttttccttaacatgatggcttctgtagctgctcaagagcacagataatgggggtaatctgttctgtaaacagctaagtaatgaccttaaacttgtgtgttcacagcggaaagaaaacatgcatatatgattttcttctgatgaaacctaatgtattcaagaaaaagaatcttgctttttggaaggatggaaaaattgggaataattttttcccctttgataattagaccactcagtactgttgcttagttttttggttcagttactttgatgtggttacaagaggaattttggctgtaatggatttcatacatttttgtaagttatgtttccatgtctcgtgtgtgatgttgtgtactgttgacatgaaatactccttttttggtaaagatggattggcttaacagattagagctacagaaagtatgacttagcacgctggtaaggccacaaaaacccaagcaagttcccccagtttcgtatcctgtaaatagagataagttagtttttctgtttcagagagtggttatggaaaactactaggctttaaaatgattgttaatctcagtgtggggacatttggtttggggacatcagttcaggagtaaatgtatctgatcctgctttgaataaatgcaacttgaaagccttggaattttaccagatcgaatctgggccaaatagaaagaatgtctaatttaatagggatatagacagttggtttaaaccaacatttttggacgaggagaggctatggaaatgaagaaagaagtgtttagaaatatcacacaaacagcattttaagaaagaaagatggatcaacctagtggaagaagtttcatgcaagtattatgtgaaaaatatagtcctgaaaattttccttatcgccgtggcccggggatgggagtccatgtcccagccacacctcagggctctcctatgaaagatcgcctcaacctcccaagtgtactagtgttgaacagctgtggaataacctgtgcaggagatgaaaaagaaattgctgctttctgcgctcatgtgtcggaactagatctttctgacaacaaactcgaagactggcatgaggtcagtaaaattgtgtcaaatgttcctcagttggagtttctaaacctgagttccaaccctctgaatttgtcggttttagaaagaacatgtgctgggtccttctctggggttcgcaaacttgtcctcaacaacagcaaagcttcttgggagacggtccacatgatactacaggagttaccagatttggaggagctcttcctgtgccttaatgactatgaaacagtgtcttgtccttctatttgctgtcattctcttaagctactacatataacagacaataacctccaagactggactgaaatacgaaagttaggagttatgtttccttcactggataccctcgtcctggccaacaatcatttgaatgctattgaggagcctgatgattcattggccaggttgtttcctaatcttcgatccatcagcctccacaagtcaggt

SEQ ID NO: 21250 - DNA, 437 bp, Homo sapiens
  misc_feature 1..437: note = ENST00000530362
  source 1..437: mol_type = unassigned DNA
atcgccgtggcccggggatgggagtccatgtcccagccacacctcagggctctcctatgaaagatcgcctcaacctcccaagtgtactagtgttgaacagctgtggaataacctgtgcaggagatgaaaaagaaattgctgctttctgcgctcatgtgtcggaactagatctttctgacaacaaactcgaagactggcatgaggtgaagtttttatattgctacattttagtgaaaagcagcaataaccattgtgtcattgtttatgttattatatgttctgctaaattctgttctcacttgatgtctgtatgacttcttgttgtctgtatatcttattgtctgtatgtctttatatcaagataaataaggcctataatcccagtgctaaggaggctgaggcaggaggatcacttgagcccaggaattcaagaccag

SEQ ID NO: 21251 - DNA, 966 bp, Homo sapiens
  misc_feature 1..966: note = ENST00000533134
  source 1..966: mol_type = unassigned DNA
ggagtccatgtcccagccacacctcagggctctcctatgaaagatcgcctcaacctcccaagtgtactagtgttgaacagctgtggaataacctgtgcaggagatgaaaaagaaattgctgctttctgcgctcatgtgtcggaactagatctttctgacaacaaactcgaagactggcatgagaaagaacatgtgctgggtccttctctggggttcgcaaacttgtcctcaacaacagcaaagcttcttgggagacggtccacatgatactacaggagttaccagatttggaggagctcttcctgtgccttaatgactatgaaacagtgtcttgtccttctatttgctgtcattctcttaagctactacatataacagacaataacctccaagactggactgaaatacgaaagttaggagttatgtttccttcactggataccctcgtcctggccaacaatcatttgaatgctattgaggagcctgatgattcattggccaggttgtttcctaatcttcgatccatcagcctccacaagtcagatccatctctcctgtcaccaaattgataatacagtcaaccctccatattcatggacttcatccatgcattcaaccaactgcagattgaaaatacatggggaagaagggtttgcagtcctgggaagacattgataaactaaattcatttcccaaactggaagaagtgagattgttaggaattcctcttctgcagccatataccaccgaggagcgaaggaaattggtaatagccagattgccatcagtttccaaacttaatggcagcgttgttactgatggtgaacgagaagattctgagagattttttattcgttactatgtggatgttccacaggaagaagtgccattcaggtatcatgaactgatcactaaatatgggaagttggagcctttggcagaagtggacctaagaccccagagcag

SEQ ID NO: 21252 - DNA, 1210 bp, Homo sapiens
  misc_feature 1..1210: note = ENST00000533169
  source 1..1210: mol_type = unassigned DNA
cattcttatgtgaatggctattatacttacagtcagtactgcttaatttagtacttaattatttaagcacaaaagtaatttcgcactaccttatatcattcttcgctatttcagtgtgtacttcaggttttgtcttcccagctatattttgaacttcaggaagacatcttggtattttctccacaattcctagcagagtctcacatatagtaggcacttacttatttattgaatgaatgaaaataggtgtaaagtagaaattaaactgctttaaacaatgaaatatttccttttttctctgcagtttggaggagctcttcctgtgccttaatgactatgaaacagtgtcttgtccttctatttgctgtcattctcttaagctactacatataacagacaataacctccaagactggactgaaatacgaaagttaggagttatgtttccttcactggataccctcgtcctggccaacaatcatttgaatgctattgaggagcctgatgattcattggccaggttgtttcctaatcttcgatccatcagcctccacaagtcaggtttgcagtcctgggaagacattgataaactaaattcatttcccaaactggaagaagtgagattgttaggaattcctcttctgcagccatataccaccgaggagcgaaggaaattggtaatagccagattgccatcagtttccaaacttaatggcagcgttgttactgatggtgaacgagaagattctgagagattttttattcgttactatgtggatgttccacaggaagaagtgccattcaggtatcatgaactgatcactaaatatgggaagttggagcctttggcagaagtggacctaagaccccagagcagtgcaaaagtagaagtccactttaacgatcaggtggaagaaatgagcattcgtctggaccaaacagtggcagaactaaagaaacagttaaaaactctagtacaattacccacaagcaacatgcttctctactattttgaccatgaagcaccctttggcccagaggaaatgaagtacagctctcgggcattgcattcctttggcattagggatggagataaaatttacgtggaatccaaaacaaaataacctctaccagccttgtgaaaaacatacacataaggacttgttgcagggcatttgtttttaatgtggttttctttaggagggagagg

SEQ ID NO: 21253 - DNA, 520 bp, Homo sapiens
  misc_feature 1..520: note = ENST00000441088
  source 1..520: mol_type = unassigned DNA
tctgcacaagcccagggagcccaggagcaacgaagggcaggctcaagggaaggccccaccatgtccttctggggggccttgaatggcaactgatacataataagacacaatctattctgctgattcacaattatggagactgtatttccgtgagggtggaagaaaatcataccatatcagatgcctcgcagagcaccaggcccaccgtgaaaggctggtccctgcagacggcttcccatttttatgaccggatgctgggaagcctgctggtccacaggtccatacatgaagtcaccataaggagccctggcctccttgcagaaacatcgaggtgacatgtagcatgaccgagctcgctggcgcctcttcatcgtgctgccaccgccctgcaggaagaggggccatgcagtcagtcttgcaccactttcaacgtttgcgagggagagagggtggttcccacttcatcaacacctcatcgccgcgaggtgaggctaagatgagcataaccagtgacgaggtg

SEQ ID NO: 21254 - DNA, 4674 bp, Homo sapiens
  misc_feature 1..4674: note = ENST00000380961
  source 1..4674: mol_type = unassigned DNA
gcccagggagcccaggagcaacgaagggcaggctcaagggaaggccccaccatgtccttctggggggccttgaatggcaactgatacataataagacacaatctattctgctgattcacaattatggagactgtatttccgtgagggtggaagaaaatcataccatatcagatgcctcgcagagcaccaggcccaccgtgaaagctcctggcaaccactattccactccctgcttctttgaatttcacaacttgaggtagcttgtgtaagtggaattattttaaaagctggttcatgttaaagtgcttagaacagagcttggtgagcatccggtcaacagctggtccctgcagacggcttcccatttttatgaccggatgctgggaagcctgctggtccacaggtccatacatgaagtcaccataagagggtggttcccacttcatcaacacctcatcgccgcgaggtgaggctaagatgagcataaccagtgacgaggtgaactttctggtgtatcggtatctccaggagtcaggtttttcccactcggctttcacgtttgggattgagagccacatcagccagtccaacatcaatgggacgctagtgccaccggccgccctcatctccattctccagaagggcctgcagtatgtagaggccgagatcagtatcaacgaggatggcacagtgttcgacggccgccccatagagtccctgtcactgatagacgccgtgatgcccgacgtggtgcagacgcggcagcaggcattccgagagaagctcgctcagcagcaagccagtgcggcggcggcggcggctgcggccacggcagcagcgacagcagccaccacgacctcagccggcgtttcccaccaaaatccatcgaagaacagagaggccacggtgaatggggaagagaacagagcacattcagtcaataatcacgcgaagccaatggaaatagatggagaggttgagattccatccagcaaagccacagtccttcggggccatgagtctgaggtgttcatttgtgcctggaatcctgtcagtgatttgctagcctccggatctggagactcaactgcaaggatatggaacctgaatgagaatagcaacgggggctccacccagctcgtgttgaggcactgtatacgagaggggggccatgacgtcccgagtaacaaagacgtcacctcactggactggaataccaatggaacactcttggctacgggttcatatgacggttttgcaagaatatggacggaagatggtaacctggccagcaccttaggccaacataaaggccccatctttgccttgaaatggaaccgaaaggggaattacattttgagtgctggtgtagacaaaacaacaataatttgggatgcccacacaggagaagccaaacagcagtttccttttcattcagcccctgcccttgatgtggactggcagaacaacacgacctttgcctcctgtagcacagacatgtgtatccatgtgtgcaggctcggctgtgaccgcccagtcaaaaccttccagggacacacaaacgaggtcaacgccatcaaatgggatccgtctggaatgttgctggcatcctgctcggatgacatgacattgaagatctggagcatgaaacaggaggtgtgcatccatgatcttcaggctcacaataaagagatctacaccatcaagtggagccccactgggcccgccaccagcaacccaaactccaacatcatgttggcaagtgcttcgtttgattctacggtgcgactgtgggacatagaacgaggcgtctgcacccacacgctcacgaagcatcaggagcctgtctatagcgtagctttcagccctgatgggaagtacttggccagtggatccttcgacaagtgcgtccatatctggaatactcagagtggaaatcttgtccacagctaccgaggcactggcggcatcttcgaggtgtgctggaacgcccgaggagacaaagtgggtgccagcgcgtccgacggctctgtgtgtgttttggatctgcggaagtaaccacaaaatattatcgaaaaaagaaaagaattctaatgaccagccgtgaatgtgtagggttgcagctctattctccaaaactgtaggaacttgacttgcgttagagtgtactctgaaaccaactcgtctctggccgcaggagtctatatgttttcgtaatcttcatcaagaagtttttaaaaggcaagcaaaaacagaagcaaatcatatcaaacggggatagaatggtttccactgaggacattcagcctgggaaggaggaagtcaccagctcgaggcgtgtggattggtttccacccggaacaggctctgtgatggctgaatggaaagaaacgtaaaaagctgtgccaaaaaaaaagcaaaatgctgtgataaaccaaacagggaagggggaaaaaccctcctccttgggattttttttttttgttttccctaacaatttggacactacaattgctctcacaaaggaggttcaaagaccagtttgtaccgatgaaacgcgcaactttgtaatcccaacactttctattttctagaatcttctttgttcattgggtggtttttcagtcggctggaattctatcttctgggggccttccgtctgagatggaagctgtcttgggcttgttgtctcttccttctgttgctccctgcccctccccctgcctttccactctgtctggtgagctctgctttttcagtgcaccatcaagagatgcagccccgtggacatgaagacacaatctcccacggacagctttcccccttccgccctctcccaccctctcctccccttgcgctcgcgctcgcgctcgctttctcactggcgtgctctctttctctctctctctccctctgtacctttctcatagttgcttcagatcttaggtctcaagggcactttggcgcgtagtaagtgctttatgtaagaaggcagggcaggggggctttttacaggagaaaaaaaaatgacttataagagaaagagcctggagtatttttggaaaaaaaaataatatttttatgttaaaacaattttaaaatcttaaaatggccatcagacatagagagctttgtgtgattcatgttttaaaaagaaccgaagaagccacaggcagggcctgagggagcccctggctttcccctcagcctcaggaaaggtggtcaggaaaactctggctggacaagggtcagtcttcggggtcagcagcgagattgctctgcagccagtgagggaggtccccgccatgccggctggaagaagaacctcgcatcttttggtgtgtatgcaccttggcagccagcaggaaagcagcgaagagccgcgcgccctctggcctcaagggagcattggcagaaccataaggtactgcagaagccgtcgaaaccgactgctcggctggattaggcgtgttggctacatctttcccacaaccgtataacgaccgatggtcatttctccaagagcaggcttggcgagtccttgcagagctgacatagaggcgcccgcatgtcacttagtctaacgctgacagaaatgaatgcagaaggaagattttcagtcctgaacgtgaattatagaggtagaacgtcgctaataatttctgccatctttataatttctttgtctcacagaagactaggagaaagatcttttttaaataatctttttgctgtttttaaaaaattaaacaaggctttgtgttcctagaagagcttcatttcagtgaatctggtgacctccatctgcttgctgtcataacccgacacggacttatttttgtcattagcaagggggaaaaggccaaaggacaagggcctcttctcccattggttttcctgtgggcagaagggctgaggaagatggcccagcccgtgggggctgctgggtcaccagcagtgggtagggtgcaatctggtgtgtgttccagcagtgagacggtgttattgtgaaggtggcattcatctgcggagccaaaacccagccatcggggaagggtcagggcttctgtggaacttggaacgtgccaggaccacctgcaaaagccagggtgcgttgatcattctcagatcattgattggcctccacttgggtatgtgaattattcatgtcccagaagaccaaaaagtgctctggttctgagatgagtattttattcgtgttctgtttccgaaacacttagcaaagaaggtcacagtgatgtggagtcgccgcacccatctttgaagatagccagtgtccctggatgaggtgatgatttcccgtcccaaggactctgtgaagtttagagtacagtttgttggggtccaaaagacaccatctctaccccacccaaataaaaatgcactcatctctgtagaacatctgctgtcaaaggccagcctgtcgttagggcatggcttatgcttgacaaaccagtaacaactgtgggatggcgatggtgggatgtgtcgcaagcaattcactagacaatcttcacatgaatgtcggtagccagggtctctcccgagggatggctttagtcttgatgaatgtgaaccatgtcggaattgttaggtagaaacctgggctgggaggcctcggaccccaggctccatccctggcttccccagcct

SEQ ID NO: 21255 - DNA, 565 bp, Homo sapiens
  misc_feature 1..565: note = ENST00000415293
  source 1..565: mol_type = unassigned DNA
ccagggagcccaggagcaacgaagggcaggctcaagggaaggccccaccatgtccttctggggggccttgaatggcaactgatacataataagacacaatctattctgctgattcacaattatggagactgtatttccgtgagggtggaagaaaatcataccatatcagatgcctcgcagagcaccaggcccaccgtgaaaggctggtccctgcagacggcttcccatttttatgaccggatgctgggaagcctgctggtccacaggtccatacatgaagtcaccataagagggtggttcccacttcatcaacacctcatcgccgcgaggtgaggctaagatgagcataaccagtgacgaggtgaactttctggtgtatcggtatctccaggagtcaggtttttcccactcggctttcacgtttgggattgagagccacatcagccagtccaacatcaatgggacgctagtgccaccggccgccctcatctccattctccagaagggcctgcagtatgtagaggccgagatcagtatcaacgaggatggcacagtgttcgacggc

SEQ ID NO: 21256 - DNA, 5871 bp, Homo sapiens
  misc_feature 1..5871: note = ENST00000217964
  source 1..5871: mol_type = unassigned DNA
gggccggcggcgggggcggacccctggcggtcctcctggctggggtccgcgcgctcgcggcagctccccgtggaggtcactgtccgtgccagtccctcccgctgtcccgccctctcccgctgccgccgccgccgccgccgcgcccgcctcagcgcccccactccgcgcttgggagcgaggagccgccagcgcccccgccccgccgccgccgcagcgccctcaggccgccattcgccaccgaaactttccagcgcccgcgctctctccgggactcggcggcggcggggcgggggcggcccgggggcggcgcgcggctgctccggggcgccgggccctcttcggccgccgcacggccgggactcggaggctgccggctggagggaggttcggagcgcggccgggcgcgcggcgccgccacaagttgcgctgctcgcgacgagatttccgtgagggtggaagaaaatcataccatatcagatgcctcgcagagcaccaggcccaccgtgaaaggctggtccctgcagacggcttcccatttttatgaccggatgctgggaagcctgctggtccacaggtccatacatgaagtcaccataaggagccctggcctccttgcagaaacatcgaggtgacatgtagcatgaccgagctcgctggcgcctcttcatcgtgctgccaccgccctgcaggaagaggggccatgcagtcagtcttgcaccactttcaacgtttgcgagggagagagggtggttcccacttcatcaacacctcatcgccgcgaggtgaggctaagatgagcataaccagtgacgaggtgaactttctggtgtatcggtatctccaggagtcaggtttttcccactcggctttcacgtttgggattgagagccacatcagccagtccaacatcaatgggacgctagtgccaccggccgccctcatctccattctccagaagggcctgcagtatgtagaggccgagatcagtatcaacgaggatggcacagtgttcgacggccgccccatagagtccctgtcactgatagacgccgtgatgcccgacgtggtgcagacgcggcagcaggcattccgagagaagctcgctcagcagcaagccagtgcggcggcggcggcggctgcggccacggcagcagcgacagcagccaccacgacctcagccggcgtttcccaccaaaatccatcgaagaacagagaggccacggtgaatggggaagagaacagagcacattcagtcaataatcacgcgaagccaatggaaatagatggagaggttgagattccatccagcaaagccacagtccttcggggccatgagtctgaggtgttcatttgtgcctggaatcctgtcagtgatttgctagcctccggatctggagactcaactgcaaggatatggaacctgaatgagaatagcaacgggggctccacccagctcgtgttgaggcactgtatacgagaggggggccatgacgtcccgagtaacaaagacgtcacctcactggactggaataccaatggaacactcttggctacgggttcatatgacggttttgcaagaatatggacggaagatggtaacctggccagcaccttaggccaacataaaggccccatctttgccttgaaatggaaccgaaaggggaattacattttgagtgctggtgtagacaaaacaacaataatttgggatgcccacacaggagaagccaaacagcagtttccttttcattcagcccctgcccttgatgtggactggcagaacaacacgacctttgcctcctgtagcacagacatgtgtatccatgtgtgcaggctcggctgtgaccgcccagtcaaaaccttccagggacacacaaacgaggtcaacgccatcaaatgggatccgtctggaatgttgctggcatcctgctcggatgacatgacattgaagatctggagcatgaaacaggaggtgtgcatccatgatcttcaggctcacaataaagagatctacaccatcaagtggagccccactgggcccgccaccagcaacccaaactccaacatcatgttggcaagtgcttcgtttgattctacggtgcgactgtgggacatagaacgaggcgtctgcacccacacgctcacgaagcatcaggagcctgtctatagcgtagctttcagccctgatgggaagtacttggccagtggatccttcgacaagtgcgtccatatctggaatactcagagtggaaatcttgtccacagctaccgaggcactggcggcatcttcgaggtgtgctggaacgcccgaggagacaaagtgggtgccagcgcgtccgacggctctgtgtgtgttttggatctgcggaagtaaccacaaaatattatcgaaaaaagaaaagaattctaatgaccagccgtgaatgtgtagggttgcagctctattctccaaaactgtaggaacttgacttgcgttagagtgtactctgaaaccaactcgtctctggccgcaggagtctatatgttttcgtaatcttcatcaagaagtttttaaaaggcaagcaaaaacagaagcaaatcatatcaaacggggatagaatggtttccactgaggacattcagcctgggaaggaggaagtcaccagctcgaggcgtgtggattggtttccacccggaacaggctctgtgatggctgaatggaaagaaacgtaaaaagctgtgccaaaaaaaaagcaaaatgctgtgataaaccaaacagggaagggggaaaaaccctcctccttgggattttttttttttgttttccctaacaatttggacactacaattgctctcacaaaggaggttcaaagaccagtttgtaccgatgaaacgcgcaactttgtaatcccaacactttctattttctagaatcttctttgttcattgggtggtttttcagtcggctggaattctatcttctgggggccttccgtctgagatggaagctgtcttgggcttgttgtctcttccttctgttgctccctgcccctccccctgcctttccactctgtctggtgagctctgctttttcagtgcaccatcaagagatgcagccccgtggacatgaagacacaatctcccacggacagctttcccccttccgccctctcccaccctctcctccccttgcgctcgcgctcgcgctcgctttctcactggcgtgctctctttctctctctctctccctctgtacctttctcatagttgcttcagatcttaggtctcaagggcactttggcgcgtagtaagtgctttatgtaagaaggcagggcaggggggctttttacaggagaaaaaaaaatgacttataagagaaagagcctggagtatttttggaaaaaaaaataatatttttatgttaaaacaattttaaaatcttaaaatggccatcagacatagagagctttgtgtgattcatgttttaaaaagaaccgaagaagccacaggcagggcctgagggagcccctggctttcccctcagcctcaggaaaggtggtcaggaaaactctggctggacaagggtcagtcttcggggtcagcagcgagattgctctgcagccagtgagggaggtccccgccatgccggctggaagaagaacctcgcatcttttggtgtgtatgcaccttggcagccagcaggaaagcagcgaagagccgcgcgccctctggcctcaagggagcattggcagaaccataaggtactgcagaagccgtcgaaaccgactgctcggctggattaggcgtgttggctacatctttcccacaaccgtataacgaccgatggtcatttctccaagagcaggcttggcgagtccttgcagagctgacatagaggcgcccgcatgtcacttagtctaacgctgacagaaatgaatgcagaaggaagattttcagtcctgaacgtgaattatagaggtagaacgtcgctaataatttctgccatctttataatttctttgtctcacagaagactaggagaaagatcttttttaaataatctttttgctgtttttaaaaaattaaacaaggctttgtgttcctagaagagcttcatttcagtgaatctggtgacctccatctgcttgctgtcataacccgacacggacttatttttgtcattagcaagggggaaaaggccaaaggacaagggcctcttctcccattggttttcctgtgggcagaagggctgaggaagatggcccagcccgtgggggctgctgggtcaccagcagtgggtagggtgcaatctggtgtgtgttccagcagtgagacggtgttattgtgaaggtggcattcatctgcggagccaaaacccagccatcggggaagggtcagggcttctgtggaacttggaacgtgccaggaccacctgcaaaagccagggtgcgttgatcattctcagatcattgattggcctccacttgggtatgtgaattattcatgtcccagaagaccaaaaagtgctctggttctgagatgagtattttattcgtgttctgtttccgaaacacttagcaaagaaggtcacagtgatgtggagtcgccgcacccatctttgaagatagccagtgtccctggatgaggtgatgatttcccgtcccaaggactctgtgaagtttagagtacagtttgttggggtccaaaagacaccatctctaccccacccaaataaaaatgcactcatctctgtagaacatctgctgtcaaaggccagcctgtcgttagggcatggcttatgcttgacaaaccagtaacaactgtgggatggcgatggtgggatgtgtcgcaagcaattcactagacaatcttcacatgaatgtcggtagccagggtctctcccgagggatggctttagtcttgatgaatgtgaaccatgtcggaattgttaggtagaaacctgggctgggaggcctcggaccccaggctccatccctggcttccccagcctgcggccgcaagcaaaaccaagcgcgagatgcagctagcacccttcatatccatccccgttctcagcgggacaacaccatggacagccgttttcagagcctccagcatttgcacaccactactcaccctctctgctgctggcatgttggtagagtcatccctgtaatcaagaaatggcctgtggaatgttattgttcaacgttgtttacagctcttaaaacatggtgaggaatgcctaagtcttagtgaccaaacgtgaccttgaaagcagacatagcatgacagaccttcctagagtgtttggtcgggttcacagtgaccgagagtcaggtccagcacacacctgggaaagggatgctgccccaagggggaccaaaagggccggacgttacagggtgaaaccctctgacccctcgcgacaccgtaggacttgacttttgtttagtctttctaagaaatagatcatggagccaagtgaagtgcactttgtcaaatgtaagggtctgctttgttcttgttgcttttctgttttttaaccttttgttccgccatttaaaaaaagaaaaaaaaaaagcttatgtttcttgtcaaatgcagaaatgttccttccgccactcactgaagttttgcattctggcttgtgcagtttttattgtctgtgtcagacgtacagccagacatgttctctattggcatttttccgattctgttcagatgacagcgaccgccttttcattccccccgccacctgtactcaccctcacgctctttgaagaaaaaaaaaaaaatcaccttgtgtgttgtagctcatttgtttcaagagagaatcaacagatcatattcagtgtcttgaataaattgctctattttgatattagagaa

SEQ ID NO: 21257 - DNA, 496 bp, Homo sapiens
  misc_feature 1..496: note = ENST00000422314
  source 1..496: mol_type = unassigned DNA
gcgggggcggcccgggggcggcgcgcggctgctccggggcgccgggccctcttcggccgccgcacggccgggactcggaggctgccggctggagggaggttcggagcgcggccgggcgcgcggcgccgccacaagttgcgctgctcgcgacgagatttccgtgagggtggaagaaaatcataccatatcagatgcctcgcagagcaccaggcccaccgtgaaaggctggtccctgcagacggcttcccatttttatgaccggatgctgggaagcctgctggtccacaggtccatacatgaagtcaccataagagggtggttcccacttcatcaacacctcatcgccgcgaggtgaggctaagatgagcataaccagtgacgaggtgaactttctggtgtatcggtatctccaggagtcaggtttttcccactcggctttcacgtttgggattgagagccacatcagccagtccaacatcaatgggacgctagtgcc

SEQ ID NO: 21258 - DNA, 387 bp, Homo sapiens
  misc_feature 1..387: note = ENST00000452824
  source 1..387: mol_type = unassigned DNA
caacttgaggtagcttgtgctggtccctgcagacggcttcccatttttatgaccggatgctgggaagcctgctggtccacaggtccatacatgaagtcaccataaggagccctggcctccttgcagaaacatcgaggtgacatgtagcatgaccgagctcgctggcgcctcttcatcgtgctgccaccgccctgcaggaagaggggccatgcagtcagtcttgcaccactttcaacgtttgcgagggagagagggtggttcccacttcatcaacacctcatcgccgcgaggtgaggctaagatgagcataaccagtgacgaggtgaactttctggtgtatcggtatctccaggagtcaggtttttcccactcggctttcacgtttgg

SEQ ID NO: 21259 - DNA, 923 bp, Homo sapiens
  misc_feature 1..923: note = ENST00000497555
  source 1..923: mol_type = unassigned DNA
agctaaagcgtgttgtcttctcccgagggtgtgcacaggttcatgtatcagctgaataaggccctgttccaaaaactgatatttcaagggaaccttaatttatctttaaatttaatgctggtccctgcagacggcttcccatttttatgaccggatgctgggaagcctgctggtccacaggtccatacatgaagtcaccataagatggaggctcgctctgtcatcctggctgcagtgcagtggcacaatcttgggtcgctgcaacctccatttcccaggttcaagtgattctcctgcttcagcctcctgagtagctgggattacaggcgtgcgccacaacgcccagttaatttttttgtatttttagtagacatggggttttgctatgttggccagtctggtctcaaactcctggcctcaagtaatcagcccgcctcagcctcccaaagtgctgggattaacaggcgtgagccaccatgtcccgtcagggatgattttattctgtgaaaagcggcattccttttctaacacaaaacctctcctctgctctgccctcccaaccctgtagcctcatttcctatatagttgttttcatactgattatctctgaagacattgccaggtcgtttttgtttgttttgagacaaggtcttgctctgttacccaggctggagtacagtggcacgatgtcggctcactgcagcctccacctcccagggtcaagcgattgtcgtgcctcagactcccaaatagctgggaatacaggggcatgcctccacacctagctaatttttgtattttttgtagagatgggtttcactgtgttgcccaggctggtctcaaactcctggactcaagtgagcgaccacgcccagccgacattcccaggttttctttacgttttaataaatatgagtagtcca

SEQ ID NO: 21260 - DNA, 5451 bp, Homo sapiens
  misc_feature 1..5451: note = ENST00000424279
  source 1..5451: mol_type = unassigned DNA
attgcatgtaatacctcagcatcagtctgcacaagcccagggagcccaggagcaacgaagggcaggctcaagggaaggccccaccatgtccttctggggggccttgaatggcaactgatacataataagacacaatctattctgctgattcacaattatggagactgtatttccgtgagggtggaagaaaatcataccatatcagatgcctcgcagagcaccaggcccaccgtgaaaggctggtccctgcagacggcttcccatttttatgaccggatgctgggaagcctgctggtccacaggtccatacatgaagtcaccataagagggtggttcccacttcatcaacacctcatcgccgcgaggtgaggctaagatgagcataaccagtgacgaggtgaactttctggtgtatcggtatctccaggagtcaggtttttcccactcggctttcacgtttgggattgagagccacatcagccagtccaacatcaatgggacgctagtgccaccggccgccctcatctccattctccagaagggcctgcagtatgtagaggccgagatcagtatcaacgaggatggcacagtgttcgacggccgccccatagagtccctgtcactgatagacgccgtgatgcccgacgtggtgcagacgcggcagcaggcattccgagagaagctcgctcagcagcaagccagtgcggcggcggcggcggctgcggccacggcagcagcgacagcagccaccacgacctcagccggcgtttcccaccaaaatccatcgaagaacagagaggccacggtgaatggggaagagaacagagcacattcagtcaataatcacgcgaagccaatggaaatagatggagaggttgagattccatccagcaaagccacagtccttcggggccatgagtctgaggtgttcatttgtgcctggaatcctgtcagtgatttgctagcctccggatctggagactcaactgcaaggatatggaacctgaatgagaatagcaacgggggctccacccagctcgtgttgaggcactgtatacgagaggggggccatgacgtcccgagtaacaaagacgtcacctcactggactggaataccaatggaacactcttggctacgggttcatatgacggttttgcaagaatatggacggaagatggtaacctggccagcaccttaggccaacataaaggccccatctttgccttgaaatggaaccgaaaggggaattacattttgagtgctggtgtagacaaaacaacaataatttgggatgcccacacaggagaagccaaacagcagtttccttttcattcagcccctgcccttgatgtggactggcagaacaacacgacctttgcctcctgtagcacagacatgtgtatccatgtgtgcaggctcggctgtgaccgcccagtcaaaaccttccagggacacacaaacgaggtcaacgccatcaaatgggatccgtctggaatgttgctggcatcctgctcggatgacatgacattgaagatctggagcatgaaacaggaggtgtgcatccatgatcttcaggctcacaataaagagatctacaccatcaagtggagccccactgggcccgccaccagcaacccaaactccaacatcatgttggcaagtgcttcgtttgattctacggtgcgactgtgggacatagaacgaggcgtctgcacccacacgctcacgaagcatcaggagcctgtctatagcgtagctttcagccctgatgggaagtacttggccagtggatccttcgacaagtgcgtccatatctggaatactcagagtggaaatcttgtccacagctaccgaggcactggcggcatcttcgaggtgtgctggaacgcccgaggagacaaagtgggtgccagcgcgtccgacggctctgtgtgtgttttggatctgcggaagtaaccacaaaatattatcgaaaaaagaaaagaattctaatgaccagccgtgaatgtgtagggttgcagctctattctccaaaactgtaggaacttgacttgcgttagagtgtactctgaaaccaactcgtctctggccgcaggagtctatatgttttcgtaatcttcatcaagaagtttttaaaaggcaagcaaaaacagaagcaaatcatatcaaacggggatagaatggtttccactgaggacattcagcctgggaaggaggaagtcaccagctcgaggcgtgtggattggtttccacccggaacaggctctgtgatggctgaatggaaagaaacgtaaaaagctgtgccaaaaaaaaagcaaaatgctgtgataaaccaaacagggaagggggaaaaaccctcctccttgggattttttttttttgttttccctaacaatttggacactacaattgctctcacaaaggaggttcaaagaccagtttgtaccgatgaaacgcgcaactttgtaatcccaacactttctattttctagaatcttctttgttcattgggtggtttttcagtcggctggaattctatcttctgggggccttccgtctgagatggaagctgtcttgggcttgttgtctcttccttctgttgctccctgcccctccccctgcctttccactctgtctggtgagctctgctttttcagtgcaccatcaagagatgcagccccgtggacatgaagacacaatctcccacggacagctttcccccttccgccctctcccaccctctcctccccttgcgctcgcgctcgcgctcgctttctcactggcgtgctctctttctctctctctctccctctgtacctttctcatagttgcttcagatcttaggtctcaagggcactttggcgcgtagtaagtgctttatgtaagaaggcagggcaggggggctttttacaggagaaaaaaaaatgacttataagagaaagagcctggagtatttttggaaaaaaaaataatatttttatgttaaaacaattttaaaatcttaaaatggccatcagacatagagagctttgtgtgattcatgttttaaaaagaaccgaagaagccacaggcagggcctgagggagcccctggctttcccctcagcctcaggaaaggtggtcaggaaaactctggctggacaagggtcagtcttcggggtcagcagcgagattgctctgcagccagtgagggaggtccccgccatgccggctggaagaagaacctcgcatcttttggtgtgtatgcaccttggcagccagcaggaaagcagcgaagagccgcgcgccctctggcctcaagggagcattggcagaaccataaggtactgcagaagccgtcgaaaccgactgctcggctggattaggcgtgttggctacatctttcccacaaccgtataacgaccgatggtcatttctccaagagcaggcttggcgagtccttgcagagctgacatagaggcgcccgcatgtcacttagtctaacgctgacagaaatgaatgcagaaggaagattttcagtcctgaacgtgaattatagaggtagaacgtcgctaataatttctgccatctttataatttctttgtctcacagaagactaggagaaagatcttttttaaataatctttttgctgtttttaaaaaattaaacaaggctttgtgttcctagaagagcttcatttcagtgaatctggtgacctccatctgcttgctgtcataacccgacacggacttatttttgtcattagcaagggggaaaaggccaaaggacaagggcctcttctcccattggttttcctgtgggcagaagggctgaggaagatggcccagcccgtgggggctgctgggtcaccagcagtgggtagggtgcaatctggtgtgtgttccagcagtgagacggtgttattgtgaaggtggcattcatctgcggagccaaaacccagccatcggggaagggtcagggcttctgtggaacttggaacgtgccaggaccacctgcaaaagccagggtgcgttgatcattctcagatcattgattggcctccacttgggtatgtgaattattcatgtcccagaagaccaaaaagtgctctggttctgagatgagtattttattcgtgttctgtttccgaaacacttagcaaagaaggtcacagtgatgtggagtcgccgcacccatctttgaagatagccagtgtccctggatgaggtgatgatttcccgtcccaaggactctgtgaagtttagagtacagtttgttggggtccaaaagacaccatctctaccccacccaaataaaaatgcactcatctctgtagaacatctgctgtcaaaggccagcctgtcgttagggcatggcttatgcttgacaaaccagtaacaactgtgggatggcgatggtgggatgtgtcgcaagcaattcactagacaatcttcacatgaatgtcggtagccagggtctctcccgagggatggctttagtcttgatgaatgtgaaccatgtcggaattgttaggtagaaacctgggctgggaggcctcggaccccaggctccatccctggcttccccagcctgcggccgcaagcaaaaccaagcgcgagatgcagctagcacccttcatatccatccccgttctcagcgggacaacaccatggacagccgttttcagagcctccagcatttgcacaccactactcaccctctctgctgctggcatgttggtagagtcatccctgtaatcaagaaatggcctgtggaatgttattgttcaacgttgtttacagctcttaaaacatggtgaggaatgcctaagtcttagtgaccaaacgtgaccttgaaagcagacatagcatgacagaccttcctagagtgtttggtcgggttcacagtgaccgagagtcaggtccagcacacacctgggaaagggatgctgccccaagggggaccaaaagggccggacgttacagggtgaaaccctctgacccctcgcgacaccgtaggacttgacttttgtttagtctttctaagaaatagatcatggagccaagtgaagtgcactttgtcaaatgtaagggtctgctttgttcttgttgcttttctgttttttaaccttttgttccgccatttaaaaaaagaaaaaaaaaaagcttatgtttcttgtcaaatgcagaaatgttccttccgccactcactgaagttttgcattctggcttgtgcagtttttattgtctgtgtcagacgtacagccagacatgttctctattggcatttttccgattctgttcagatgacagcgaccgccttttcattccccccgccacctgtactcaccctcacgctctttgaagaaaaaaaaaaaaatcaccttgtgtgttgtagctcatttgtttcaagagagaatcaacagatcatattcagtgtcttgaataaattgctctattttgatattaga

SEQ ID NO: 21261 - DNA, 5596 bp, Homo sapiens
  misc_feature 1..5596: note = ENST00000407597
  source 1..5596: mol_type = unassigned DNA
attgcatgtaatacctcagcatcagtctgcacaagcccagggagcccaggagcaacgaagggcaggctcaagggaaggccccaccatgtccttctggggggccttgaatggcaactgatacataataagacacaatctattctgctgattcacaattatggagactgtatttccgtgagggtggaagaaaatcataccatatcagatgcctcgcagagcaccaggcccaccgtgaaaggctggtccctgcagacggcttcccatttttatgaccggatgctgggaagcctgctggtccacaggtccatacatgaagtcaccataaggagccctggcctccttgcagaaacatcgaggtgacatgtagcatgaccgagctcgctggcgcctcttcatcgtgctgccaccgccctgcaggaagaggggccatgcagtcagtcttgcaccactttcaacgtttgcgagggagagagggtggttcccacttcatcaacacctcatcgccgcgaggtgaggctaagatgagcataaccagtgacgaggtgaactttctggtgtatcggtatctccaggagtcaggtttttcccactcggctttcacgtttgggattgagagccacatcagccagtccaacatcaatgggacgctagtgccaccggccgccctcatctccattctccagaagggcctgcagtatgtagaggccgagatcagtatcaacgaggatggcacagtgttcgacggccgccccatagagtccctgtcactgatagacgccgtgatgcccgacgtggtgcagacgcggcagcaggcattccgagagaagctcgctcagcagcaagccagtgcggcggcggcggcggctgcggccacggcagcagcgacagcagccaccacgacctcagccggcgtttcccaccaaaatccatcgaagaacagagaggccacggtgaatggggaagagaacagagcacattcagtcaataatcacgcgaagccaatggaaatagatggagaggttgagattccatccagcaaagccacagtccttcggggccatgagtctgaggtgttcatttgtgcctggaatcctgtcagtgatttgctagcctccggatctggagactcaactgcaaggatatggaacctgaatgagaatagcaacgggggctccacccagctcgtgttgaggcactgtatacgagaggggggccatgacgtcccgagtaacaaagacgtcacctcactggactggaataccaatggaacactcttggctacgggttcatatgacggttttgcaagaatatggacggaagatggtaacctggccagcaccttaggccaacataaaggccccatctttgccttgaaatggaaccgaaaggggaattacattttgagtgctggtgtagacaaaacaacaataatttgggatgcccacacaggagaagccaaacagcagtttccttttcattcagcccctgcccttgatgtggactggcagaacaacacgacctttgcctcctgtagcacagacatgtgtatccatgtgtgcaggctcggctgtgaccgcccagtcaaaaccttccagggacacacaaacgaggtcaacgccatcaaatgggatccgtctggaatgttgctggcatcctgctcggatgacatgacattgaagatctggagcatgaaacaggaggtgtgcatccatgatcttcaggctcacaataaagagatctacaccatcaagtggagccccactgggcccgccaccagcaacccaaactccaacatcatgttggcaagtgcttcgtttgattctacggtgcgactgtgggacatagaacgaggcgtctgcacccacacgctcacgaagcatcaggagcctgtctatagcgtagctttcagccctgatgggaagtacttggccagtggatccttcgacaagtgcgtccatatctggaatactcagagtggaaatcttgtccacagctaccgaggcactggcggcatcttcgaggtgtgctggaacgcccgaggagacaaagtgggtgccagcgcgtccgacggctctgtgtgtgttttggatctgcggaagtaaccacaaaatattatcgaaaaaagaaaagaattctaatgaccagccgtgaatgtgtagggttgcagctctattctccaaaactgtaggaacttgacttgcgttagagtgtactctgaaaccaactcgtctctggccgcaggagtctatatgttttcgtaatcttcatcaagaagtttttaaaaggcaagcaaaaacagaagcaaatcatatcaaacggggatagaatggtttccactgaggacattcagcctgggaaggaggaagtcaccagctcgaggcgtgtggattggtttccacccggaacaggctctgtgatggctgaatggaaagaaacgtaaaaagctgtgccaaaaaaaaagcaaaatgctgtgataaaccaaacagggaagggggaaaaaccctcctccttgggattttttttttttgttttccctaacaatttggacactacaattgctctcacaaaggaggttcaaagaccagtttgtaccgatgaaacgcgcaactttgtaatcccaacactttctattttctagaatcttctttgttcattgggtggtttttcagtcggctggaattctatcttctgggggccttccgtctgagatggaagctgtcttgggcttgttgtctcttccttctgttgctccctgcccctccccctgcctttccactctgtctggtgagctctgctttttcagtgcaccatcaagagatgcagccccgtggacatgaagacacaatctcccacggacagctttcccccttccgccctctcccaccctctcctccccttgcgctcgcgctcgcgctcgctttctcactggcgtgctctctttctctctctctctccctctgtacctttctcatagttgcttcagatcttaggtctcaagggcactttggcgcgtagtaagtgctttatgtaagaaggcagggcaggggggctttttacaggagaaaaaaaaatgacttataagagaaagagcctggagtatttttggaaaaaaaaataatatttttatgttaaaacaattttaaaatcttaaaatggccatcagacatagagagctttgtgtgattcatgttttaaaaagaaccgaagaagccacaggcagggcctgagggagcccctggctttcccctcagcctcaggaaaggtggtcaggaaaactctggctggacaagggtcagtcttcggggtcagcagcgagattgctctgcagccagtgagggaggtccccgccatgccggctggaagaagaacctcgcatcttttggtgtgtatgcaccttggcagccagcaggaaagcagcgaagagccgcgcgccctctggcctcaagggagcattggcagaaccataaggtactgcagaagccgtcgaaaccgactgctcggctggattaggcgtgttggctacatctttcccacaaccgtataacgaccgatggtcatttctccaagagcaggcttggcgagtccttgcagagctgacatagaggcgcccgcatgtcacttagtctaacgctgacagaaatgaatgcagaaggaagattttcagtcctgaacgtgaattatagaggtagaacgtcgctaataatttctgccatctttataatttctttgtctcacagaagactaggagaaagatcttttttaaataatctttttgctgtttttaaaaaattaaacaaggctttgtgttcctagaagagcttcatttcagtgaatctggtgacctccatctgcttgctgtcataacccgacacggacttatttttgtcattagcaagggggaaaaggccaaaggacaagggcctcttctcccattggttttcctgtgggcagaagggctgaggaagatggcccagcccgtgggggctgctgggtcaccagcagtgggtagggtgcaatctggtgtgtgttccagcagtgagacggtgttattgtgaaggtggcattcatctgcggagccaaaacccagccatcggggaagggtcagggcttctgtggaacttggaacgtgccaggaccacctgcaaaagccagggtgcgttgatcattctcagatcattgattggcctccacttgggtatgtgaattattcatgtcccagaagaccaaaaagtgctctggttctgagatgagtattttattcgtgttctgtttccgaaacacttagcaaagaaggtcacagtgatgtggagtcgccgcacccatctttgaagatagccagtgtccctggatgaggtgatgatttcccgtcccaaggactctgtgaagtttagagtacagtttgttggggtccaaaagacaccatctctaccccacccaaataaaaatgcactcatctctgtagaacatctgctgtcaaaggccagcctgtcgttagggcatggcttatgcttgacaaaccagtaacaactgtgggatggcgatggtgggatgtgtcgcaagcaattcactagacaatcttcacatgaatgtcggtagccagggtctctcccgagggatggctttagtcttgatgaatgtgaaccatgtcggaattgttaggtagaaacctgggctgggaggcctcggaccccaggctccatccctggcttccccagcctgcggccgcaagcaaaaccaagcgcgagatgcagctagcacccttcatatccatccccgttctcagcgggacaacaccatggacagccgttttcagagcctccagcatttgcacaccactactcaccctctctgctgctggcatgttggtagagtcatccctgtaatcaagaaatggcctgtggaatgttattgttcaacgttgtttacagctcttaaaacatggtgaggaatgcctaagtcttagtgaccaaacgtgaccttgaaagcagacatagcatgacagaccttcctagagtgtttggtcgggttcacagtgaccgagagtcaggtccagcacacacctgggaaagggatgctgccccaagggggaccaaaagggccggacgttacagggtgaaaccctctgacccctcgcgacaccgtaggacttgacttttgtttagtctttctaagaaatagatcatggagccaagtgaagtgcactttgtcaaatgtaagggtctgctttgttcttgttgcttttctgttttttaaccttttgttccgccatttaaaaaaagaaaaaaaaaaagcttatgtttcttgtcaaatgcagaaatgttccttccgccactcactgaagttttgcattctggcttgtgcagtttttattgtctgtgtcagacgtacagccagacatgttctctattggcatttttccgattctgttcagatgacagcgaccgccttttcattccccccgccacctgtactcaccctcacgctctttgaagaaaaaaaaaaaaatcaccttgtgtgttgtagctcatttgtttcaagagagaatcaacagatcatattcagtgtcttgaataaattgctctattttgatattaga

SEQ ID NO: 21262 - DNA, 4009 bp, Homo sapiens
  misc_feature 1..4009: note = ENST00000389554
  source 1..4009: mol_type = unassigned DNA
gtcgctaccaggagccaggtgattatcctaattaatgtctatctaattaaattactgtcagcagctaaccaatggcaggagccgtttcatcggctgcacaagcagcaagatcaaaagtgagccttttctgattgctgcatagtgtcaattggccaatctcttctcccagggaaaaaaaaaagtaaatcaaacctttgagaagcatttgctggttgaagtgctttctgtctagtgagggggtctgtggatttctagtttatgataaataggactttaaaaaccagggacgggagggcgagtgttcaggttctagagctatgcagctggagcactgcctttctccttctatcatgctctccaagaaatttctcaatgtgagcagcagctacccacattcaggcggatccgagcttgtcttgcacgatcatcccattatctcgaccactgacaacctggagagaagttcacctttgaaaaaaattaccagggggatgacgaatcagtcagatacagacaattttcctgactccaaggactcaccaggggacgtccagagaagtaaactctctcctgtcttggacggggtctctgagcttcgtcacagtttcgatggctctgctgcagatcgctacctcctctctcagtccagccagccacagtctgcggccactgctcccagtgccatgttcccgtaccccggccagcacggaccggcgcaccccgccttctccatcggcagccctagccgctacatggcccaccacccggtcatcaccaacggagcctacaacagcctcctgtccaactcctcgccgcagggataccccacggccggctacccctacccacagcagtacggccactcctaccaaggagctccgttctaccagttctcctccacccagccggggctggtgcccggcaaagcacaggtgtacctgtgcaacaggcccctttggctgaaatttcaccggcaccaaacggagatgatcatcaccaaacagggaaggcgcatgtttccttttttaagttttaacatttctggtctcgatcccacggctcattacaatatttttgtggatgtgattttggcggatcccaatcactggaggtttcaaggaggcaaatgggttccttgcggcaaagcggacaccaatgtgcaaggaaatcgggtctatatgcatccggattcccccaacactggggctcactggatgcgccaagaaatctcttttggaaaattaaaacttacgaacaacaaaggagcttcaaataacaatgggcagatggtggttttacagtccttgcacaagtaccagccccgcctgcatgtggtggaagtgaacgaggacggcacggaggacactagccagcccggccgcgtgcagacgttcactttccctgagactcagttcatcgccgtcaccgcctaccagaacacggatattacacaactgaaaatagatcacaacccttttgcaaaaggatttcgggataattatgacacgatctacaccggctgtgacatggaccgcctgaccccctcgcccaacgactcgccgcgctcgcagatcgtgcccggggcccgctacgccatggccggctctttcctgcaggaccagttcgtgagcaactacgccaaggcccgcttccacccgggcgcgggcgcgggccccgggccgggtacggaccgcagcgtgccgcacaccaacgggctgctgtcgccgcagcaggccgaggacccgggcgcgccctcgccgcaacgctggtttgtgacgccggccaacaaccggctggacttcgcggcctcggcctatgacacggccacggacttcgcgggcaacgcggccacgctgctctcttacgcggcggcgggcgtgaaggcgctgccgctgcaggctgcaggctgcactggccgcccgctcggctactacgccgacccgtcgggctggggcgcccgcagtcccccgcagtactgcggcaccaagtcgggctcggtgctgccctgctggcccaacagcgccgcggccgccgcgcgcatggccggcgccaatccctacctgggcgaggaggccgagggcctggccgccgagcgctcgccgctgccgcccggcgccgccgaggacgccaagcccaaggacctgtccgattccagctggatcgagacgccctcctcgatcaagtccatcgactccagcgactcggggatttacgagcaggccaagcggaggcggatctcgccggccgacacgcccgtgtccgagagttcgtccccgctcaagagcgaggtgctggcccagcgggactgcgagaagaactgcgccaaggacattagcggctactatggcttctactcgcacagctaggccgcccctgcccgcccggccccgccgcggcccggacccccagccagcccctcacagctcttccccagctccgcctccccacactcctccttgcgcacccactcattttatttgaccctcgatggccgtctgcagcgaataagtgcaggtctccgagcgtgattttaaccttttttgcacagcagtctctgcaattagctcaccgaccttcaactttgctgtaaaccttttggttttcctacttactcttcttctgtggagttatcctcctacaattcccctccccctcgtctttctcttacctcctacttctctttcttgtaatgaaactcttcacctttaggagacctgggcagtcctgtcaggcagcagcgattccgacccgccaagtctcggcctccacattaaccataggatgttgactctagaacctggacccacccagcgcgtcctttcttatccccgagtggatggatggatggatggatggtagggatgttaataattttagtggaacaaagcctgtgaaatgattgtacatagtgttaatttattgtaacgaatggctagtttttattctcgtcaaggcacaaaaccagttcatgcttaacctttttttcctttcctttctttgcttttctttctctcctctcatactttctcttctctctcttttaattttcttgtgagataatattctaagaggctctagaaacatgaaatactcagtagtgatgggtttcccacttctcctcaatccgttgcatgaaataattactatgtgccctaatgcacacaaatagctaaggagaatccacccaaacacctttaaaggataggtgtctgttcataggcaagtcgattaagtggcatgatgcctgcaaagcaaagtcaactggagttgtatgttccccccaccttctaaatagaatagctcgacatcagcaatattattttgccttatttgtttttccccaaagtgccaaatccattactggtctgtgcaggtgccaaatatgctgacaaactgtttctgaatatctttcagtaccccttcacctttatatgctgtaaatctttgtaatgaatactctattaatgatatagatgactgaattgttggtaactatagtgtagtctagtgaagatgaattgtgtgagttgtatattttactgcattttagttttgaaaatgacttccccaccacctagaaacagctgaaatttgacttccttgggagaacactagcattaatgcaagtaagactgattttcccctaagtcttgttatatttgataaggagcattaatccccctggaaatagattagtaggatttctaatgttgtgtagcaaacctatacttttttgtatttaaaaattaatgtgaaatatgcatcatacacaatattcaatctagattccagtccatggggggatttttcctaataggaattcagggtctaaacgtgtgtatattttggctcttctgtaaatctaatgttgtgatttttatatttgtttcgttttgtctgtgaactgaataatttatacaagaacacactccattgagaaacgttttgttttttgctcgtttgtatcgtctgtgtataacaagtaaaataaacctggtaaaaacgctaa

SEQ ID NO: 21263 - DNA, 7185 bp, Homo sapiens
  misc_feature 1..7185: note = ENST00000463544
  source 1..7185: mol_type = unassigned DNA
gggtctgtggatttctagtttatgataaataggactttaaaaaccagggacgggagggcgagtgttcaggttctagagctatgcagctggagcactgcctttctccttctatcatgctctccaagaaatttctcaatgtgagcagcagctacccacattcaggcggatccgagcttgtcttgcacgatcatcccattatctcgaccactgacaacctggagagaagttcacctttgaaaaaaattaccagggggatgacgaatcagtcagatacagacaattttcctgactccaaggactcaccaggggacgtccagagaagtaaactctctcctgtcttggacggggtctctgagcttcgtcacagtttcgatggctctgctgcagatcgctacctcctctctcagtccagccagccacagtctgcggccactgctcccagtgccatgttcccgtaccccggccagcacggaccggcgcaccccgccttctccatcggcagccctagccgctacatggcccaccacccggtcatcaccaacggagcctacaacagcctcctgtccaactcctcgccgcagggataccccacggccggctacccctacccacagcagtacggccactcctaccaaggagctccgttctaccagttctcctccacccagccggggctggtgcccggcaaagcacaggtgtacctgtgcaacaggcccctttggctgaaatttcaccggcaccaaacggagatgatcatcaccaaacagggaaggtaatactacatttttggctgccgctgctctaggcgcagccggggacaagtgcacctaggctgtgactgccgcggcagcgacgatttggggtcgggagcggagtggaaggcgccctagagttggctagttttggaaagggggaaagtggaagggataaccgccagggtgatgttggtgggggggaccccgttctaggaacatagtgggagagccagtcagtggccagaggaaggcaagaaaaaggaagagccctggccagcggctgggcgatgggagggacgcatcaacactggcatgcacggacaggtggagacgcaggtcgccaacctcgctctccacctgggcagtgataactgccaccttcccactccagctcacccgccgctctccctgatttgggttgcacttcttttcttctcccaccaccctttttctaatccagcaaatattcgcctatttgctgcaagtacaagttttgctttgctaactggcgccccgcttcttgcatttaatctttaacatttatgtttcttttttccttgttttctccccccaccccttaatttaaataggcgcatgtttccttttttaagttttaacatttctggtctcgatcccacggctcattacaatatttttgtggatgtgattttggcggatcccaatcactggaggtttcaaggaggcaaatgggttccttgcggcaaagcggacaccaatgtgcaaggaaatcgggtctatatgcatccggattcccccaacactggggctcactggatgcgccaagaaatctcttttggaaaattaaaacttacgaacaacaaaggagcttcaaataacaatgggcaggtcagtggctcaagcgctcgtgttttctctctctctcaccccttcctccctgacatccagttcgtcagtgtaaagcagcatatggaactggatacacgtttctttgcttcattaaaaagacttaaaaattgtatttccaccctccaaatttatattaaatctgtaaagttgttctcattggcaacacctccgtcggcccaattttggagtgcccgaccttcccaagtactaatactgattgattttgagaagaaaccccacaagatctgcaggttgtggaaatctttgttcctccttacaggaggactaggagaagggccctgaggatcgggcggtcggcttcccccttttttccggtgccccggcttatcttcgctcccagaggtgcgaaagccggtctgccccagccagccagccgccagccaggcgagtcccgcggtcagttagcctggaaggcgggctgcaggctgcctccgccggcccgggcgcgcagccgggcgcacacagccacgcgcacagcgaccgcgttaacacgccacccggcgctcccctttcttcccgccggacagatggtggttttacagtccttgcacaagtaccagccccgcctgcatgtggtggaagtgaacgaggacggcacggaggacactagccagcccggccgcgtgcagacgttcactttccctgagactcagttcatcgccgtcaccgcctaccagaacacggatgtaaggagacctaggggctgggggcgaggcgggcggcacagacatctctcccaccctctcacattctcccgccatgcaaggctagggtactagcagcgctaacatcagcaacagctggctccgctgtgcgttttaaggcttagggctcggggcctgcccacggcacctttcctaaataccaagccggtgggaaaaagctttctatttgttttcgtcgctggtcacccgggccacctttgaggtggccaggatttctaaagactcttcttttgggagttttaatttgggctttgaactagaacagattaaaatctactttaaaaaaaaattctctctttcctttagaaaacaagcagatttccccgtgcattttattcttggcaagctttggcatctaaaaaaaaatttctctctctctctctttttttcatctcagaactgatggctgaaatgaacaaacatcactgttctgggagatcaaaagaacatacacattcatatatgtgaaaactacaataaatcaaattactgagggctatggattgagctttctagcacttgaaccacttctgatttttcaagtttgcaaaaacagattttagtggctgatttgactactaggagtgataggggtttttgtgtttgtttcttttttttacttaaatgataatatcagaaattaaaacatgcttttaaatccaacctgattttaagatgcaacttgtggtttctcaggttgtgagtcagaagcgacaaacgttttaaaatataaaatacttaaaatagtcaacatttagtgatgaattcaagttctccttaaagatttttgtctgaacaagtgcattgtgtgtaacaagcatttttaaaatgtgagtttgaacaaatttagaaaacacaggagagctaattgaaagcagttctttggctataggtatcattaatttaaacatgttcctcataactttcatgatactttctctttttttcctttccactcaatccctcaaatttttcagttaggaaaaccttgctatttaataaattgtaggccttaagcccctgtaaaagtggcagatgatatattctcaaacacccagtcttcacgtataaaaggtgagataacattcattttttttctttgccagattacacaactgaaaatagatcacaacccttttgcaaaaggatttcgggataattatgacacgtaagtaactttgtatcttccttttcaaatagctgtggaattgggctttaggtcaaaggtgtattattatgtacaaggattttgaaagctggaatgtgtgaagacaaggttgttttagaggacttcttcttcttcgtctttcttctttcttcttcctcttctttttttttttttttttttttttggttggctccccttctctctggtgaccttgtggcttggtacttgcgtggtttttggtcagaggtttcctccacctaattttaactttcctgtggattacaaagttgttggtgggcctctggggctggctggctggctggggaggctgccctggttctcgggtgcgagtactgtatgtggcgctgcagatgctcagctcagattgtctatgtctgtctgaaacgggcaattctgcctaaaagtgcatgtggctcctctggcagttgttaacagtctccttagcatatgcgacctttatttacccatttccaagttttgtataatagcatttcctgtgcaagttggctacggactgaatacaaatgtgcacccaccacaggcgagttcatgagcagaaccgctgttatggtcattttaggctttcggaaagattcagacggtgttgctgtgtattatttataagcttcaaaagaaaaatatttcctctttgttttgtatctaggtgtgttttaattaaacatgctggtgcccttttctttaggcctcccttacctccctcctttctatcaaaaggctgttctctggggccaacagtaggtgtaaactgaatgctttctgggcttgttctgcaattctcactcagggtccatagtgcctaagagttcagatagtgtcataaatctaaatctggattgtggggttcccccacgttttctgaccataaaaggaaagggtacatacatcttaatttcgtggcttacattgagcgcctgagacagagctaaaaagttgaagctgcctttgactagcatagattaaatgtgtggagaaagagacaagtgactgcctctattccatctccaagcagataccaaccatccctcctgatattttctaataatttaaaagagagtcattgatattactgcctataaccaccatatatattcttcaaaagtactccaaaggaaccaagtctcatcaatatgattccccagaataaaaacttggctactctattcctcacaatctaaaaaggtgtgcccagcacagtggaaagtatatggctcaagagactagagatgttagaggagagtcctgtagattttgagattttaattctgttgtgaacatctgttcaaaagcattttattttgcacaaatcaattcagtaatcccaagtgggtgggacctggataggcatctaaactgtatcttttgcggactgcttttttctttttaaaatattgtggtgataaacagagaagatatttgcaccttgctagttatgttcccttcctgcctccctctacttctcttatttgaaactggaattcaatttcagaagggaaattttgtgcactaaacagaacggacctgagcagccacagcaaaactctcacatgcccctcctcctctggctgccttctgttggaaaagccactcctctttgatcttaaatcactttaaatctttcataaaagcttctttatctatacacacacacacacacacacacacacacaaacctgagatttttaggggacagagaagagttgagtggttcatgacactcttcctttccccttttacgttggttacttggacatggctcaattttggagaaagagggagaagtataagggttcatggggtactaggagcttgcttggccactcaccagggaatctcctccccaaaggattaaggtctgacaagactgaggctctccttcaaaacagtctgttgactaaagattaaaacatttatgtgtgagctaaataaaaagggaggcatgtgtgcatgtgtatgagaaaacacttctaccaatcttcatccaacccttggtttcctctcaattctaatgggattttctaggcccagggcctaaagttaatctttgattattttatctaaggtaattcccaacaacacaatcactgtcgctggttgggcaagttatttaacttccttttgcctcaatttcctcatcggtaaagtgggataataaaagttacctagctcacagtgcctggcatatagtcgagctccgtaaaggttagctattattagtggtccattgcatggagtaggctgataagtacactgtaggtttgccccgaagtttctgcgggtaacggaccaaaagctaggaaaagaaggtcagagtaaagaacaccttttctcttaagagaatatttctgattgatgactactgtttcagagtagtaattcttgtttgtattagtagaggtgggagtgaaagtttcacacaggggaaacaatagacactaagtactttggaggcttccagcagcaaacctcgggttccagaacacgggtgaaggccagtctttcatgattactgcgtgcgcggctttttcctaggggtttctgaaacaatctagaaaaaggagagatatcacctgaacaatcaaatggacacaggaggtcttaaaagggtggaggagtgagtaccttgcttagaaatttcactcataaactgaccgcagaggaaaggcccactgggcaaagagcatcttactccctaggtaaatctgccttaatgtgcacacatatgttggagaagtgggatgaaagtccttgcttgtgcccctctctcagtaccccagtacacttgacgagagagagcaagagaagagggaagtcgttcccttgatggtctgtatcttgctcaggtccctgcatagacagattggctcctctataattccgtgatttattttgggaatgatagaggtctgtggcctcttgtattctccaggaaatcctggactgcaagtttgtagatggagggtgtgggggtgggcgaaaagtggaggtggccttcccttctgcccccacccccaccccaagggacctccgcgccacccctcggctctctctctctctctccctaccccgcaggatctacaccggctgtgacatggaccgcctgaccccctcgcccaacgactcgccgcgctcgcagatcgtgcccggggcccgctacgccatggccggctctttcctgcaggaccagttcgtgagcaactacgccaaggcccgcttccacccgggcgcgggcgcgggccccgggccgggtacggaccgcagcgtgccgcacaccaacgggctgctgtcgccgcagcaggccgaggacccgggcgcgccctcgccgcaacgctggtttgtgacgccggccaacaaccggctggacttcgcggcctcggcctatgacacggccacggacttcgcgggcaacgcggccacgctgctctcttacgcggcggcgggcgtgaaggcgctgccgctgcaggctgcaggctgcactggccgcccgctcggctactacgccgacccgtcgggctggggcgcccgcagtcccccgcagtactgcggcaccaagtcgggctcggtgctgccctgctggcccaacagcgcc

SEQ ID NO: 21264 - DNA, 698 bp, Homo sapiens
  misc_feature 1..698: note = ENST00000411412
  source 1..698: mol_type = unassigned DNA
tttcaaggaggcaaatgggttccttgcggcaaagcggacaccaatgtgcaaggaaatcgggtctatatgcatccggattcccccaacactggggctcactggatgcgccaagaaatctcttttggaaaattaaaacttacgaacaacaaaggagcttcaaataacaatgggcagatggtggttttacagtccttgcacaagtaccagccccgcctgcatgtggtggaagtgaacgaggacggcacggaggacactagccagcccggccgcgtgcagacgttcactttccctgagactcagttcatcgccgtcaccgcctaccagaacacggatattacacaactgaaaatagatcacaacccttttgcaaaaggatttcgggataattatgacacgatctacaccggctgtgacatggaccgcctgaccccctcgcccaacgactcgccgcgctcgcagatcgtgcccggggcccgctacgccatggccggctctttcctgcaggaccagttccaggccgaggacccgggcgcgccctcgccgcaacgctggtttgtgacgccggccaacaaccggctggacttcgcggcctcggcctatgacacggccacggacttcgcgggcaacgcggccacgctgctctcttacgcggcggcgggcgtgaaggcgctgccgctgcaggctgcaggctgcactgg

SEQ ID NO: 21265 - DNA, 1454 bp, Homo sapiens
  misc_feature 1..1454: note = ENST00000410035
  source 1..1454: mol_type = unassigned DNA
tttgtggactggctcgagcgacttttaaaacgatcggccaatgacttctaaaaggaaacgagggggacagggggacagactgagctgcgagaagggggaggattatgcaaaagctattttaatcacccccagttaataggaagaaagaatggcctaaaaaagccccagttaatgggcttcatggtggagtaaggaaatcgggtctatatgcatccggattcccccaacactggggctcactggatgcgccaagaaatctcttttggaaaattaaaacttacgaacaacaaaggagcttcaaataacaatgggcagatggtggttttacagtccttgcacaagtaccagccccgcctgcatgtggtggaagtgaacgaggacggcacggaggacactagccagcccggccgcgtgcagacgttcactttccctgagactcagttcatcgccgtcaccgcctaccagaacacggatattacacaactgaaaatagatcacaacccttttgcaaaaggatttcgggataattatgacacgatctacaccggctgtgacatggaccgcctgaccccctcgcccaacgactcgccgcgctcgcagatcgtgcccggggcccgctacgccatggccggctctttcctgcaggaccagttcgtgagcaactacgccaaggcccgcttccacccgggcgcgggcgcgggccccgggccgggtacggaccgcagcgtgccgcacaccaacgggctgctgtcgccgcagcaggccgaggacccgggcgcgccctcgccgcaacgctggtttgtgacgccggccaacaaccggctggacttcgcggcctcggcctatgacacggccacggacttcgcgggcaacgcggccacgctgctctcttacgcggcggcgggcgtgaaggcgctgccgctgcaggctgcaggctgcactggccgcccgctcggctactacgccgacccgtcgggctggggcgcccgcagtcccccgcagtactgcggcaccaagtcgggctcggtgctgccctgctggcccaacagcgccgcggccgccgcgcgcatggccggcgccaatccctacctgggcgaggaggccgagggcctggccgccgagcgctcgccgctgccgcccggcgccgccgaggacgccaagcccaaggacctgtccgattccagctggatcgagacgccctcctcgatcaagtccatcgactccagcgactcggggatttacgagcaggccaagcggaggcggatctcgccggccgacacgcccgtgtccgagagttcgtccccgctcaagagcgaggtgctggcccagcgggactgcgagaagaactgcgccaaggacattagcggctactatggcttctactcgcacagctaggccgcccctgcccgcccggccccgccgcggcccggacccccagccagcccctcacagct

SEQ ID NO: 21266 - DNA, 461 bp, Homo sapiens
  misc_feature 1..461: note = ENST00000477804
  source 1..461: mol_type = unassigned DNA
acggcacctttcctaaataccaagccggtgggaaaaagctttctatttgttttcgtcgctggtcacccgggccacctttgagattacacaactgaaaatagatcacaacccttttgcaaaaggatttcgggataattatgacacgatctacaccggctgtgacatggaccgcctgaccccctcgcccaacgactcgccgcgctcgcagatcgtgcccggggcccgctacgccatggccggctctttcctgcaggaccagttcgtgagcaactacgccaaggcccgcttccacccgggcgcgggcgcgggccccgggccgggtacggaccgcagcgtgccgcacaccaacgggctgctgtcgccgcagcaggccgaggacccgggcgcgccctcgccgcaacgctggtttgtgacgccggccaacaaccggctggacttcgcggcctcggcctatgacacgg

SEQ ID NO: 21267 - DNA, 558 bp, Homo sapiens
  misc_feature 1..558: note = ENST00000489530
  source 1..558: mol_type = unassigned DNA
atcactgttctgggagatcaaaagaacatacacattcatatatgtgaaaactacaataaatcaaattactgagggctatggattgagctttctagcacttgaaccacttctgatttttcaagtttgcaaaaacagattttagtggctgatttgactactaggagtgataggggtttttgtgtttgtttcttttttttacttaaatgataatatcagaaattaaaacatgcttttaaatccaacctgattttaagatgcaacttgtggtttctcaggttgtgagtcagaagcgacaaacgttttaaaatataaaatacttaaaatagtcaacatttagtgatgaattcaagttctccttaaagatttttgtctgaacaagtgcattgtgtgtaacaagcatttttaaaatattacacaactgaaaatagatcacaacccttttgcaaaaggatttcgggataattatgacacgatctacaccggctgtgacatggaccgcctgaccccctcgcccaacgactcgccgcgctcgcagatcgtgcccggggcccgctacgc

SEQ ID NO: 21268 - DNA, 703 bp, Homo sapiens
  misc_feature 1..703: note = ENST00000493340
  source 1..703: mol_type = unassigned DNA
attgttctgcctggctctgacatggacttttcatctctctcctctctccccacctagccccgtgcattccgattccacagcccccccaaaatcggaggctcgcggagaataaaggagcgtggggtgggcgcggaaagaaatgggaaggggcgcggggcggagagcgaagtggaaaggaggtgctccgaaagctctttattttccatgtgtgagcctgtgcctgtggtttatctctggaggatgtgcctgagggaggagacatatactgcctggactgcctggctgatgtgagctagtttgtctggttgagttggatgtttaaatagaaggcagaacaacaacagggtcttgctctgttgcccaggctggagtgcacttgcagtagcataatcacaattcactgcagcctcaacctcccaggctcaatcattcttcctgcctcagcccccaaagtagctgggactacaggcatgcaccaccatggctggctaagttttaaaacttttttgtagagacatggtctctctgtgttgcccaggctggtctaggactcctgggctcaagcaatcctcccacctcagcctcccaaagtgctgagattacaggtgcaaactatctcacccagcctttaatctttttattagtgagatatctgacccaacggctaggatctgatggtctttttagtatggcctcaaatcac

SEQ ID NO: 21269 - DNA, 459 bp, Homo sapiens
  misc_feature 1..459: note = ENST00000462053
  source 1..459: mol_type = unassigned DNA
ggctcgcggagaataaaggagcgtggggtgggcgcggaaagaaatgggaaggggcgcggggcggagagcgaagtggaaaggaggtgctccgaaaggagacatatactgcctggactgcctggctgatgtgagctagtttgtctggttgagttggatgtttaaatagaaggcagaacaacaacagaagctttgaggaagagccataactacctggagcagaatgattatttggagccacagaaaatcattttagggagcagtgggtccaggttcagtgttgtgtgttcaactcggaaagaacacagttgggtggctgaccgggttacttctcccctgtggctctgcttgcattggtcattgaggtcaggcaggggtttggccacagtgttagccattggccctgcattgatcctcacatagtaacatcttgtttggttattaaagtgactgaattgttgg

SEQ ID NO: 21270 - DNA, 241 bp, Homo sapiens
  misc_feature 1..241: note = ENST00000473948
  source 1..241: mol_type = unassigned DNA
aggccgaaccgaagggctcacagaacatttcctgcctgttgctcacactctgttgtccacagcatacccgcaccctagatggctgactcttgtcttctgtttgtgaaactgcacaacatcacaatatcttcaaggccacaggatagagataaccctctttttggtgtatgcatttagctctttattttccatgtgtgagcctgtgcctgtggtttatctctggaggatgtgcctgagggag

SEQ ID NO: 21271 - DNA, 2080 bp, Homo sapiens
  misc_feature 1..2080: note = ENST00000425687
  source 1..2080: mol_type = unassigned DNA
gagggccggcctggacccggcgggcgcacggctccgagcccagcgcagccgagccggtctgcagaggggcccccagaactttgtgtgtgtgtgtgcacgcgcgcgcgtgtgtgcccaggtgcgagggttcgcgcgtgtgctggcggggagggaaccgacccgaaagagagccccacgctggcaaagtggctcgcccatctcacagccggttggcgctcgcggagctctttattttccatgtgtgagcctgtgcctgtggtttatctctggaggatgtgcctgagggaggagacatatactgcctggactgcctggctgatgtgagctagtttgtctggttgagttggatgtttaaatagaaggcagaacaacaacaggtactccacatcagcattctcaagactggagaagttaggcctcagacatcccaagccttctcctttcattggaaacttgacatttttccgccagggtttttgggaaagccaaatggagctcagaaagctgtatggacctctgtgtgggtactatcttggtcgtcggatgtttattgttatttctgagccagacatgatcaagcaggtgttggttgagaacttcagtaactttaccaacagaatggcgtcgggtttggagttcaagtcggtagccgacagcgttctgtttttacgtgacaaaagatgggaagaggtcagaggtgccctgatgtctgctttcagtcctgaaaagctgaacgagatggttcccctcatcagccaagcctgcgaccttctcctggctcatttaaaacgctatgcggaatctggggacgcatttgacatccagaggtgctactgcaattacaccacagatgtggttgccagcgtcgcctttggcaccccggtggactcctggcaggcccctgaggatccctttgtgaaacactgcaagcgtttcttcgaattctgcatccccagacctatcctggttttactcttatcatttccatccataatggtcccactggcccggattttgcccaataagaaccgagacgaactgaatggcttttttaacaaactcattaggaatgtgattgccttgcgggaccagcaagctgccgaagagaggcggagagacttcctccaaatggtcctggatgcccgacattctgcaagtcccatgggcgtgcaagactttgacatcgtcagagacgttttctcctctactgggtgcaagccgaacccttcccggcaacaccagcccagccctatggccaggcctttgactgtggatgagattgtgggccaggccttcatcttcctcatcgctggctatgaaatcatcaccaacacactttcttttgccacctacctactggccaccaaccctgactgccaagagaagcttctgagagaggtagacgtttttaaggagaaacacatggcccctgagttctgcagcctcgaggaaggcctgccctatctggacatggtgattgcagagacgctgaggatgtacccgccagctttcagattcacacgggaggcagctcaggactgcgaggtgctggggcagcgcatccccgcaggcgctgtgctagagatggccgtgggtgccctgcaccatgaccctgagcactggccaagcccggagaccttcaaccctgaaaggttcacggctgaggcccggcagcagcaccggcccttcacgtacctgcccttcggggccggcccacggagctgcctcggggtgcgtctagggctgcttgaggtcaagttgacactgctccacgtgctgcacaagttccggttccaagcctgccctgagacccaggtaccgctgcagctagaatccaaatctgccctaggtccaaaaaatggtgtctatatcaagatcgtatcccgctgacacagaaggctgccgggtggggggagggcacccccaaattcaaagaaaaccctaagtgtggatgttcagaattttggaaaaatgtcactgaagtgattgaaagagtgcctggcatgcaaggataagaggttctttacataacatttcctaaatgcttaataaacgtttgttgcacttggttttgacattg

SEQ ID NO: 21272 - DNA, 582 bp, Homo sapiens
  misc_feature 1..582: note = ENST00000474763
  source 1..582: mol_type = unassigned DNA
cggcctggacccggcgggcgcacggctccgagcccagcgcagccgagccggtctgcagaggggcccccagaactttgtgtgtgtgtgtgcacgcgcgcgcgtgtgtgcccaggtgcgagggttcgcgcgtgtgctggcggggagggaaccgacccgaaagagagccccacgctggcaaagtggctcgcccatctcacagccggttggcgctcgcggaggagacatatactgcctggactgcctggctgatgtgagctagtttgtctggttgagttggatgtttaaatagaaggcagaacaacaacagaagctttgaggaagagccataactacctggagcagaatgattatttggagccacagaaaatcattttagggagcagtgggtccaggttcagtgttgtgtgttcaactcggaaagaacacagttgggtggctgaccgggttacttctcccctgtggctctgcttgcattggtcattgaggtcaggcaggggtttggccacagtgttagccattggccctgcattgatcctcacatagtaacatcttgtttggttattaaagtgactgaattgttgg

SEQ ID NO: 21273 - DNA, 728 bp, Homo sapiens
  misc_feature 1..728: note = ENST00000481440
  source 1..728: mol_type = unassigned DNA
gcctggacccggcgggcgcacggctccgagcccagcgcagccgagccggtctgcagaggggcccccagaactttgtgtgtgtgtgtgcacgcgcgcgcgtgtgtgcccaggtgcgagggttcgcgcgtgtgctggcggggagggaaccgacccgaaagagagccccacgctggcaaagtggctcgcccatctcacagccggttggcgctcgcggaggctcacagaacatttcctgcctgttgctcacactctgttgtccacagcatacccgcaccctagatggctgactcttgtcttctgtctctttattttccatgtgtgagcctgtgcctgtggtttatctctggaggatgtgcctgagggaggagacatatactgcctggactgcctggctgatgtgagctagtttgtctggttgagttggatgtttaaatagaaggcagaacaacaacagaagctttgaggaagagccataactacctggagcagaatgattatttggagccacagaaaatcattttagggagcagtgggtccaggttcagtgttgtgtgttcaactcggaaagaacacagttgggtggctgaccgggttacttctcccctgtggctctgcttgcattggtcattgaggtcaggcaggggtttggccacagtgttagccattggccctgcattgatcctcacatagtaacatcttgtttggttattaaagtgactgaattgttg

SEQ ID NO: 21274 - DNA, 752 bp, Homo sapiens
  misc_feature 1..752: note = ENST00000438104
  source 1..752: mol_type = unassigned DNA
gtgtgcacgcgcgcgcgtgtgtgcccaggtgcgagggttcgcgcgtgtgctggcggggagggaaccgacccgaaagagagccccacgctggcaaagtggctcgcccatctcacagccggttggcgctcgcggaggagacatatactgcctggactgcctggctgatgtgagctagtttgtctggttgagttggatgtttaaatagaaggcagaacaacaacagagcacggttcccataagggcggcgagatcagcctcctgtctcatctggaagaccaccactctggggtctcagaggaatgatggaagccttggggtttctaaaattggaagtgaatggccccatggtgacggtggccctgtcagtggctctcttggccctcctgaaatggtactccacatcagcattctcaagactggagaagttaggcctcagacatcccaagccttctcctttcattggaaacttgacatttttccgccagggtttttgggaaagccaaatggagctcagaaagctgtatggacctctgtgtgggtactatcttggtcgtcggatgtttattgttatttctgagccagacatgatcaagcaggtgttggttgagaacttcagtaactttaccaacagaatggcgtcgggtttggagttcaagtcggtagccgacagcgttctgtttttacgtgacaaaagatgggaagaggtcagaggtgccctgatgtctgctttcagtcctgaaaagctgaacgag

SEQ ID NO: 21275 - DNA, 2185 bp, Homo sapiens
  misc_feature 1..2185: note = ENST00000336425
  source 1..2185: mol_type = unassigned DNA
aaccgacccgaaagagagccccacgctggcaaagtggctcgcccatctcacagccggttggcgctcgcggaggctcacagaacatttcctgcctgttgctcacactctgttgtccacagcatacccgcaccctagatggctgactcttgtcttctgtctctttattttccatgtgtgagcctgtgcctgtggtttatctctggaggatgtgcctgagggaggagacatatactgcctggactgcctggctgatgtgagctagtttgtctggttgagttggatgtttaaatagaaggcagaacaacaacagagcacggttcccataagggcggcgagatcagcctcctgtctcatctggaagaccaccactctggggtctcagaggaatgatggaagccttggggtttctaaaattggaagtgaatggccccatggtgacggtggccctgtcagtggctctcttggccctcctgaaatggtactccacatcagcattctcaagactggagaagttaggcctcagacatcccaagccttctcctttcattggaaacttgacatttttccgccagggtttttgggaaagccaaatggagctcagaaagctgtatggacctctgtgtgggtactatcttggtcgtcggatgtttattgttatttctgagccagacatgatcaagcaggtgttggttgagaacttcagtaactttaccaacagaatggcgtcgggtttggagttcaagtcggtagccgacagcgttctgtttttacgtgacaaaagatgggaagaggtcagaggtgccctgatgtctgctttcagtcctgaaaagctgaacgagatggttcccctcatcagccaagcctgcgaccttctcctggctcatttaaaacgctatgcggaatctggggacgcatttgacatccagaggtgctactgcaattacaccacagatgtggttgccagcgtcgcctttggcaccccggtggactcctggcaggcccctgaggatccctttgtgaaacactgcaagcgtttcttcgaattctgcatccccagacctatcctggttttactcttatcatttccatccataatggtcccactggcccggattttgcccaataagaaccgagacgaactgaatggcttttttaacaaactcattaggaatgtgattgccttgcgggaccagcaagctgccgaagagaggcggagagacttcctccaaatggtcctggatgcccgacattctgcaagtcccatgggcgtgcaagactttgacatcgtcagagacgttttctcctctactgggtgcaagccgaacccttcccggcaacaccagcccagccctatggccaggcctttgactgtggatgagattgtgggccaggccttcatcttcctcatcgctggctatgaaatcatcaccaacacactttcttttgccacctacctactggccaccaaccctgactgccaagagaagcttctgagagaggtagacgtttttaaggagaaacacatggcccctgagttctgcagcctcgaggaaggcctgccctatctggacatggtgattgcagagacgctgaggatgtacccgccagctttcagattcacacgggaggcagctcaggactgcgaggtgctggggcagcgcatccccgcaggcgctgtgctagagatggccgtgggtgccctgcaccatgaccctgagcactggccaagcccggagaccttcaaccctgaaaggttcacggctgaggcccggcagcagcaccggcccttcacgtacctgcccttcggggccggcccacggagctgcctcggggtgcgtctagggctgcttgaggtcaagttgacactgctccacgtgctgcacaagttccggttccaagcctgccctgagacccaggtaccgctgcagctagaatccaaatctgccctaggtccaaaaaatggtgtctatatcaagatcgtatcccgctgacacagaaggctgccgggtggggggagggcacccccaaattcaaagaaaaccctaagtgtggatgttcagaattttggaaaaatgtcactgaagtgattgaaagagtgcctggcatgcaaggataagaggttctttacataacatttcctaaatgcttaataaacgtttgttgcacttggttttgacattgccaa

SEQ ID NO: 21276 - DNA, 1963 bp, Homo sapiens
  misc_feature 1..1963: note = ENST00000448866
  source 1..1963: mol_type = unassigned DNA
atagggagacactctgagaaagagcacattgtgggggcccactccatgtgatgtttgcttggttgcctgttcccttttctacctgcagagcacggttcccataagggcggcgagatcagcctcctgtctcatctggaagaccaccactctggggtctcagaggaatgatggaagccttggggtttctaaaattggaagtgaatggccccatggtgacggtggccctgtcagtggctctcttggccctcctgaaatggtactccacatcagcattctcaagactggagaagttaggcctcagacatcccaagccttctcctttcattggaaacttgacatttttccgccagggtttttgggaaagccaaatggagctcagaaagctgtatggacctctgtgtgggtactatcttggtcgtcggatgtttattgttatttctgagccagacatgatcaagcaggtgttggttgagaacttcagtaactttaccaacagaatggcgtcgggtttggagttcaagtcggtagccgacagcgttctgtttttacgtgacaaaagatgggaagaggtcagaggtgccctgatgtctgctttcagtcctgaaaagctgaacgagatggttcccctcatcagccaagcctgcgaccttctcctggctcatttaaaacgctatgcggaatctggggacgcatttgacatccagaggtgctactgcaattacaccacagatgtggttgccagcgtcgcctttggcaccccggtggactcctggcaggcccctgaggatccctttgtgaaacactgcaagcgtttcttcgaattctgcatccccagacctatcctggttttactcttatcatttccatccataatggtcccactggcccggattttgcccaataagaaccgagacgaactgaatggcttttttaacaaactcattaggaatgtgattgccttgcgggaccagcaagctgccgaagagaggcggagagacttcctccaaatggtcctggatgcccgacattctgcaagtcccatgggcgtgcaagactttgacatcgtcagagacgttttctcctctactgggtgcaagccgaacccttcccggcaacaccagcccagccctatggccaggcctttgactgtggatgagattgtgggccaggccttcatcttcctcatcgctggctatgaaatcatcaccaacacactttcttttgccacctacctactggccaccaaccctgactgccaagagaagcttctgagagaggtagacgtttttaaggagaaacacatggcccctgagttctgcagcctcgaggaaggcctgccctatctggacatggtgattgcagagacgctgaggatgtacccgccagctttcagattcacacgggaggcagctcaggactgcgaggtgctggggcagcgcatccccgcaggcgctgtgctagagatggccgtgggtgccctgcaccatgaccctgagcactggccaagcccggagaccttcaaccctgaaaggttcacggctgaggcccggcagcagcaccggcccttcacgtacctgcccttcggggccggcccacggagctgcctcggggtgcgtctagggctgcttgaggtcaagttgacactgctccacgtgctgcacaagttccggttccaagcctgccctgagacccaggtaccgctgcagctagaatccaaatctgccctaggtccaaaaaatggtgtctatatcaagatcgtatcccgctgacacagaaggctgccgggtggggggagggcacccccaaattcaaagaaaaccctaagtgtggatgttcagaattttggaaaaatgtcactgaagtgattgaaagagtgcctggcatgcaaggataagaggttctttacataacatttcctaaatgcttaataaacgtttgttgcacttggttttgacattgccaa

SEQ ID NO: 21277 - DNA, 1967 bp, Homo sapiens
  misc_feature 1..1967: note = ENST00000422328
  source 1..1967: mol_type = unassigned DNA
gcacattgtgggggcccactccatgtgatgtttgcttggttgcctgttcccttttctacctgcagagcacggttcccataagggcggcgagatcagcctcctgtctcatctggaagaccaccactctggggtctcagaggaatgatggaagccttggggtttctaaaattggaagtgaatggccccatggtgacggtggccctgtcagtggctctcttggccctcctgaaatggtactccacatcagcattctcaagactggagaagttaggcctcagacatcccaagccttctcctttcattggaaacttgacatttttccgccagggtttttgggaaagccaaatggagctcagaaagctgtatggacctctgtgtgggtaagaaggaaactcaacgtttctattatgtactatcttggtcgtcggatgtttattgttatttctgagccagacatgatcaagcaggtgttggttgagaacttcagtaactttaccaacagaatggcgtcgggtttggagttcaagtcggtagccgacagcgttctgtttttacgtgacaaaagatgggaagaggtcagaggtgccctgatgtctgctttcagtcctgaaaagctgaacgagatggttcccctcatcagccaagcctgcgaccttctcctggctcatttaaaacgctatgcggaatctggggacgcatttgacatccagaggtgctactgcaattacaccacagatgtggttgccagcgtcgcctttggcaccccggtggactcctggcaggcccctgaggatccctttgtgaaacactgcaagcgtttcttcgaattctgcatccccagacctatcctggttttactcttatcatttccatccataatggtcccactggcccggattttgcccaataagaaccgagacgaactgaatggcttttttaacaaactcattaggaatgtgattgccttgcgggaccagcaagctgccgaagagaggcggagagacttcctccaaatggtcctggatgcccgacattctgcaagtcccatgggcgtgcaagactttgacatcgtcagagacgttttctcctctactgggtgcaagccgaacccttcccggcaacaccagcccagccctatggccaggcctttgactgtggatgagattgtgggccaggccttcatcttcctcatcgctggctatgaaatcatcaccaacacactttcttttgccacctacctactggccaccaaccctgactgccaagagaagcttctgagagaggtagacgtttttaaggagaaacacatggcccctgagttctgcagcctcgaggaaggcctgccctatctggacatggtgattgcagagacgctgaggatgtacccgccagctttcagattcacacgggaggcagctcaggactgcgaggtgctggggcagcgcatccccgcaggcgctgtgctagagatggccgtgggtgccctgcaccatgaccctgagcactggccaagcccggagaccttcaaccctgaaaggttcacggctgaggcccggcagcagcaccggcccttcacgtacctgcccttcggggccggcccacggagctgcctcggggtgcgtctagggctgcttgaggtcaagttgacactgctccacgtgctgcacaagttccggttccaagcctgccctgagacccaggtaccgctgcagctagaatccaaatctgccctaggtccaaaaaatggtgtctatatcaagatcgtatcccgctgacacagaaggctgccgggtggggggagggcacccccaaattcaaagaaaaccctaagtgtggatgttcagaattttggaaaaatgtcactgaagtgattgaaagagtgcctggcatgcaaggataagaggttctttacataacatttcctaaatgcttaataaacgtttgttgcacttggttttgacattgcc

SEQ ID NO: 21278 - DNA, 633 bp, Homo sapiens
  misc_feature 1..633: note = ENST00000492560
  source 1..633: mol_type = unassigned DNA
acattgtgggggcccactccatgtgatgtttgcttggttgcctgttcccttttctacctgcagagcacggttcccataagggcggcgagatcagcctcctgtctcatctggaagaccaccactctggggtctcagaggaatgatggaagccttggggtttctaaaattggaagtgaatggccccatggtgacggtggccctgtcagtggctctcttggccctcctgaaatggtactccacatcagcattctcaagactggagaagttaggcctcagacatcccaagccttctcctttcattggaaacttgacatttttccgccagggtttttgggaaagccaaatggagctcagaaagctgtatggacctctgtgtgggtaagaaggaaactcaacgtttctattatgtacgatattttctattatgtacgatattttgattttcacgtgttgaactgatatagaagaaatgccaagattaggaatgttgtatgtgtttctatttttcaaagggcccacaaagagggagtcctgcagtacagacaaggcttctagagaagaccctggggttgcccacggggggactctgctggcctgaaagagtaccactttccagcctttgcagccttgctg

SEQ ID NO: 21279 - DNA, 1435 bp, Homo sapiens
  misc_feature 1..1435: note = ENST00000455353
  source 1..1435: mol_type = unassigned DNA
gtgggggcccactccatgtgatgtttgcttggttgcctgttcccttttctacctgcagagcacggttcccataagggcggcgagatcagcctcctgtctcatctggaagaccaccactctggggtctcagaggaatgatggaagccttggggtttctaaaattggaagtgaatggccccatggtgacggtggccctgtcagtggctctcttggccctcctgaaatggtactccacatcagcattctcaagactggagaagttaggcctcagacatcccaagccttctcctttcattggaaacttgacatttttccgccagggtttttgggaaagccaaatggagctcagaaagctgtatggacctctgtgtgggtactatcttggtcgtcggatgtttattgttatttctgagccagacatgatcaagcaggtgttggttgagaacttcagtaactttaccaacagaatgccccagagcatcatgcccaactccagacatcacgtggcctctagagggatgtggcctggagggaggcggctggcctgctacctccatcccttcaggatggccgaaggaattgcagaagtttaactgcttctctgctgcctctagattctctttcccaaacactgcattgctatctcctcgctcaaagtcccctggaagccgtctgtcaagaaactgattctgattattaaatgcagctgtagcttgttgctccatcagcctcagcaaggagtgctgattaaagaagttggagaagccaataagtcaaagtgcacggaccaccaagccacatcctggcaagcagtaaaggtactcccaggagcctgtcatagcacttgagactgtctgagcccctaagccatgagacggcacttgccaactggtgtctccatatttcctcccatgataccaggacatgtgaccctgagagctgacctagaagaggtcaatgatttggcctgctaggggcagacatactcaatgcacatgtccaagcaaggaggacacaataatattgccctcagctttgatcaatttatcctccaagccatttgtctgccgtttctaatttctttcaccatcccctcacccacccctccacgcagactaggtccagtgccccaaactccagagtagagttccaattttcgtcctcttccactcagcacaggattaagccttcaggactaagttcaagttccctagacgatatttaagggcccttgtgtcttagatccattgtgtgtgctccaccctgtctctcactgctccccaatacaaatcgtcactccagcctctccctgctcaccctcacctgctctggagagacctgacctctgccttgctcacgctgacactgcctcagaattgaaggcagtgtaacagtggggctcatattgattatgacgtgagcttgagcacatatc

SEQ ID NO: 21280 - DNA, 2057 bp, Homo sapiens
  misc_feature 1..2057: note = ENST00000458722
  source 1..2057: mol_type = unassigned DNA
gtgggggcccactccatgtgatgtttgcttggttgcctgttcccttttctacctgcagagcacggttcccataagggcggcgagatcagcctcctgtctcatctggaagaccaccactctggggtctcagaggaatgatggaagccttggggtttctaaaattggaagtgaatggccccatggtgacggtggccctgtcagtggctctcttggccctcctgaaatggtactccacatcagcattctcaagactggagaagttaggcctcagacatcccaagccttctcctttcattggaaacttgacatttttccgccagggtttttgggaaagccaaatggagctcagaaagctgtatggacctctgtgtgggtactatcttggtcgtcggatgtttattgttatttctgagccagacatgatcaagcaggtgttggttgagaacttcagtaactttaccaacagaatggcgtcgggtttggagttcaagtcggtagccgacagcgttctgtttttacgtgacaaaagatgggaagaggtcagaggtgccctgatgtctgctttcagtcctgaaaagctgaacgagcttggccttttaatcatgcaagagagaataaaaggtcacatgggtggccagcaggctccacaaagaattccacccacccgtttgtcgaagccgagtggtatctatgtgaatctccattatgccactctacctttctgtatggttcccctcatcagccaagcctgcgaccttctcctggctcatttaaaacgctatgcggaatctggggacgcatttgacatccagaggtgctactgcaattacaccacagatgtggttgccagcgtcgcctttggcaccccggtggactcctggcaggcccctgaggatccctttgtgaaacactgcaagcgtttcttcgaattctgcatccccagacctatcctggttttactcttatcatttccatccataatggtcccactggcccggattttgcccaataagaaccgagacgaactgaatggcttttttaacaaactcattaggaatgtgattgccttgcgggaccagcaagctgccgaagagaggcggagagacttcctccaaatggtcctggatgcccgacattctgcaagtcccatgggcgtgcaagactttgacatcgtcagagacgttttctcctctactgggtgcaagccgaacccttcccggcaacaccagcccagccctatggccaggcctttgactgtggatgagattgtgggccaggccttcatcttcctcatcgctggctatgaaatcatcaccaacacactttcttttgccacctacctactggccaccaaccctgactgccaagagaagcttctgagagaggtagacgtttttaaggagaaacacatggcccctgagttctgcagcctcgaggaaggcctgccctatctggacatggtgattgcagagacgctgaggatgtacccgccagctttcagattcacacgggaggcagctcaggactgcgaggtgctggggcagcgcatccccgcaggcgctgtgctagagatggccgtgggtgccctgcaccatgaccctgagcactggccaagcccggagaccttcaaccctgaaaggttcacggctgaggcccggcagcagcaccggcccttcacgtacctgcccttcggggccggcccacggagctgcctcggggtgcgtctagggctgcttgaggtcaagttgacactgctccacgtgctgcacaagttccggttccaagcctgccctgagacccaggtaccgctgcagctagaatccaaatctgccctaggtccaaaaaatggtgtctatatcaagatcgtatcccgctgacacagaaggctgccgggtggggggagggcacccccaaattcaaagaaaaccctaagtgtggatgttcagaattttggaaaaatgtcactgaagtgattgaaagagtgcctggcatgcaaggataagaggttctttacataacatttcctaaatgcttaataaacgtttgttgcacttggt

SEQ ID NO: 21281 - DNA, 1792 bp, Homo sapiens
  misc_feature 1..1792: note = ENST00000411653
  source 1..1792: mol_type = unassigned DNA
actccatgtgatgtttgcttggttgcctgttcccttttctacctgcagagcacggttcccataagggcggcgagatcagcctcctgtctcatctggaagaccaccactctggggtctcagaggaatgatggaagccttggggtttctaaaattggaagtgaatggccccatggtgacggtggccctgtcagtggctctcttggccctcctgaaatggtactccacatcagcattctcaagactggagaagttaggcctcagacatcccaagccttctcctttcattggaaacttgacatttttccgccagggtttttgggaaagccaaatggagctcagaaagctgtatggacctctgtgtgggtactatcttggtcgtcggatgtttattgttatttctgagccagacatgatcaagcaggtgttggttgagaacttcagtaactttaccaacagaatggcgtcgggtttggagttcaagtcggtagccgacagcgttctgtttttacgtgacaaaagatgggaagaggtcagaggtgccctgatgtctgctttcagtcctgaaaagctgaacgagatggttcccctcatcagccaagcctgcgaccttctcctggctcatttaaaacgctatgcggaatctggggacgcatttgacatccagaggtgctactgcaattacaccacagatgtggttgccagcgtcgcctttggcaccccggtggactcctggcaggcccctgaggatccctttgtgaaacactgcaagcgtttcttcgaattctgcatccccagacctatcctggttttactcttatcatttccatccataatggtcccactggcccggattttgcccaataagaaccgagacgaactgaatggcttttttaacaaactcattaggaatgtgattgccttgcgggaccagcaagctgccgaagagaggcggagagacttcctccaaatggtcctggatgcccgacattctgcaagtcccatgggcgtgcaagactttgacatcgtcagagacgttttctcctctactgggtgcaagccgaacccttcccggcaacaccagcccagccctatggccaggcctttgactgtggatgagattgtgggccaggccttcatcttcctcatcgctggctatgaaatcatcaccaacacactttcttttgccacctacctactggccaccaaccctgactgccaagagaagcttctgagagaggtagacgtttttaaggagaaacacatggcccctgagttctgcagcctcgaggaaggcctgccctatctggacatggtgattgcagagacgctgaggatgtacccgccagctttcagattcacacgggaggcagctcaggactgcgaggtgctggggcagcgcatccccgcaggcgctgtgctagagatggccgtgggtgccctgcaccatgaccctgagcactggccaagcccggagaccttcaaccctgaaaggtaccgctgcagctagaatccaaatctgccctaggtccaaaaaatggtgtctatatcaagatcgtatcccgctgacacagaaggctgccgggtggggggagggcacccccaaattcaaagaaaaccctaagtgtggatgttcagaattttggaaaaatgtcactgaagtgattgaaagagtgcctggcatgcaaggataagaggttctttacataacatttcctaaatgcttaataaacgtttgttgcacttggttttgacattgccaatggggtttgaaccagtgctctctctaaatgaa

SEQ ID NO: 21282 - DNA, 623 bp, Homo sapiens
  misc_feature 1..623: note = ENST00000476637
  source 1..623: mol_type = unassigned DNA
gtgatgtttgcttggttgcctgttcccttttctacctgcagagcacggttcccataagggcggcgagatcagcctcctgtctcatctggaagaccaccactctggggtctcagaggaatgatggaagccttggggtttctaaaattggaagtgaatggccccatggtgacggtggccctgtcagtggctctcttggccctcctgaaatggtactccacatcagcattctcaagactggagaagttaggcctcagacatcccaagccttctcctttcattggaaacttgacatttttccgccagggtttttgggaaagccaaatggagctcagaaagctgtatggacctctgtgtgggcgtcgggtttggagttcaagtcggtagccgacagcgttctgtttttacgtgacaaaagatgggaagaggtcagaggtgccctgatgtctgctttcagtcctgaaaagctgaacgagatggttcccctcatcagccaagcctgcgaccttctcctggctcatttaaaacgctatgcggaatctggggacgcatttgacatccagaggtaaggctgctgcattacagatgagaaatcgagtttttgaatcactgcttcttgtaactgt

SEQ ID NO: 21283 - DNA, 1773 bp, Homo sapiens
  misc_feature 1..1773: note = ENST00000462275
  source 1..1773: mol_type = unassigned DNA
gatgtttgcttggttgcctgttcccttttctacctgcagagcacggttcccataagggcggcgagatcagcctcctgtctcatctggaagaccaccactctggggtctcagaggaatgatggaagccttggggtttctaaaattggaagtgaatggccccatggtgacggtggccctgtcagtggctctcttggccctcctgaaatggtactatcttggtcgtcggatgtttattgttatttctgagccagacatgatcaagcaggtgttggttgagaacttcagtaactttaccaacagaatggcgtcgggtttggagttcaagtcggtagccgacagcgttctgtttttacgtgacaaaagatgggaagaggtcagaggtgccctgatgtctgctttcagtcctgaaaagctgaacgagatggttcccctcatcagccaagcctgcgaccttctcctggctcatttaaaacgctatgcggaatctggggacgcatttgacatccagaggtgctactgcaattacaccacagatgtggttgccagcgtcgcctttggcaccccggtggactcctggcaggcccctgaggatccctttgtgaaacactgcaagcgtttcttcgaattctgcatccccagacctatcctggttttactcttatcatttccatccataatggtcccactggcccggattttgcccaataagaaccgagacgaactgaatggcttttttaacaaactcattaggaatgtgattgccttgcgggaccagcaagctgccgaagagaggcggagagacttcctccaaatggtcctggatgcccgacattctgcaagtcccatgggcgtgcaagactttgacatcgtcagagacgttttctcctctactgggtgcaagccgaacccttcccggcaacaccagcccagccctatggccaggcctttgactgtggatgagattgtgggccaggccttcatcttcctcatcgctggctatgaaatcatcaccaacacactttcttttgccacctacctactggccaccaaccctgactgccaagagaagcttctgagagaggtagacgtttttaaggagaaacacatggcccctgagttctgcagcctcgaggaaggcctgccctatctggacatggtgattgcagagacgctgaggatgtacccgccagctttcagattcacacgggaggcagctcaggactgcgaggtgctggggcagcgcatccccgcaggcgctgtgctagagatggccgtgggtgccctgcaccatgaccctgagcactggccaagcccggagaccttcaaccctgaaaggtccaaactgaatccagagatttagcatttcagcagccctgcatgcaaggaacaaggcaatttcaaatgattgtcttccattcattcaagccaggacatgggatacaggattgtatttcaggtctgcactggaaagtaacggaacatcatttcctttttaaaaaacgggcatctatgccaaaacaacagcttcagctgatgtctccatgaatctaaattcacgtgatccactggttgacctgggtccccgccttccaccacctggctttggttcattgtctcctttcatttctgggctctgtgattggaaacatctgagcaggcggcccacactctggtcctcatcagaaccagtcaatatcctgtgtgtgtgatctggcaagggaagggctggcccggcaccagttgtgttttcacctttcatggctccaactgagt

SEQ ID NO: 21284 - DNA, 565 bp, Homo sapiens
  misc_feature 1..565: note = ENST00000414041
  source 1..565: mol_type = unassigned DNA
ctacctgcagagcacggttcccataagggcggcgagatcagcctcctgtctcatctggaagaccaccactctggggtctcagaggaatgatggaagccttggggtttctaaaattggaagtgaatggccccatggtgacggtggccctgtcagtggctctcttggccctcctgaaatggtactccacatcagcattctcaagactggagaagttaggcctcagacatcccaagccttctcctttcattggaaacttgacatttttccgccagggtttttgggaaagccaaatggagctcagaaagctgtatggacctctgtgtggtctgtagtgcagtggcttgatcttggatcactgcaacctccaccttccaggttcaagcaattctcctgcctcagcctcctgagtagctggcactacaggtactatcttggtcgtcggatgtttattgttatttctgagccagacatgatcaagcaggtgttggttgagaacttcagtaactttaccaacagaatggcgtcgggtttggagttcaagtcggtagccgacagcgttctgttt

SEQ ID NO: 21285 - DNA, 1435 bp, Homo sapiens
  misc_feature 1..1435: note = ENST00000469630
  source 1..1435: mol_type = unassigned DNA
gggacgcatttgacatccagaggtgctactgcaattacaccacagatgtggttgccagcgtcgcctttggcaccccggtggactcctggcaggcccctgaggatccctttgtgaaacactgcaagcgtttcttcgaattctgcatccccagacctatcctggttttactcttatcatttccatccataatggtcccactggcccggattttgcccaataagaaccgagacgaactgaatggcttttttaacaaactcattaggaatgtgattgccttgcgggaccagcaagctgccgaagagaggcggagagacttcctccaaatggtcctggatgcccgacattctgcaagtcccatgggcgtgcaagactttgacatcgtcagagacgttttctcctctactgggtgcaagccgaacccttcccggcaacaccagcccagccctatggccaggcctttgactgtggatgagattgtgggccaggccttcatcttcctcatcgctggctatgaaatcatcaccaacacactttcttttgccacctacctactggccaccaaccctgactgccaagagaagcttctgagagaggtagacgtttttaaggagaaacacgtgagtacaagttggatccagttacccatgggatatccataggacaattgattttgtgtttgtgggagtgaaacttatttttaatgacttgctaatatcacattctaagcttataagatgaaatagggtcattgcttggcttctcctgctctccgggttagcaagcgaaatgaaatgttgagaacaataaccacaacaaaaagacaaattgtgtgtgcaccttcactgtctggggtagtccatgaagccaggcctggctcgaggaagctgtggaagcccaggaaggtgtcaggcccaaagggcagggatggggaaggagtcatggcttcccaatatctgacttggagctgccacacggagggaggcaggtgtgagccagaaaggagagccaagatagaaggcaggagtggacaaaaggacaggccaagctgaagctggactgaagactggaagctgaggaggaggctcacaaatggaataagggaagatggggcccgtcagcgcccaggccagcttcagggcattttcttctagatgaggcccctcttgatcgtttatagcagatataacgagggtgctgagcaaggctactttatcacctcattttttcttctagatgcttgtgtgtgtataactttgactcatgagttgtcaaagagattcatttttaaaatctgtactttaaaaggaagaccaccacagtggaatcctttctgttacattctgatatgattgctattacattcaccattttgaaaggtggtctgttctgttactggaaccattaaaaaatgtttcatacaatgaactgaaaacca

SEQ ID NO: 21286 - DNA, 502 bp, Homo sapiens
  misc_feature 1..502: note = ENST00000494876
  source 1..502: mol_type = unassigned DNA
cctggtttattatcacccccttttcaatgccacttttgtttttctctttcaagtatcatttccatccataatggtcccactggcccggattttgcccaataagaaccgagacgaactgaatggcttttttaacaaactcattaggaatgtgattgccttgcgggaccagcaagctgccgaagagaggcggagagacttcctccaaatggtcctggatgcccgacattctgcaagtcccatgggcgtgcaagactttgacatcgtcagagacgttttctcctctactgggtgcaagccgaacccttcccggcaacaccagcccagccctatggccaggcctttgactgtggatgagattgtgggccaggccttcatcttcctcatcgctggctatgaaatcatcaccaacacactttcttttgccacctacctactggccaccaaccctgactgccaagagaagcttctgagagaggtagacgtttttaaggagaaacacgtg

SEQ ID NO: 21287 - DNA, 2505 bp, Homo sapiens
  misc_feature 1..2505: note = ENST00000416849
  source 1..2505: mol_type = unassigned DNA
gagggccggcctggacccggcgggcgcacggctccgagcccagcgcagccgagccggtctgcagaggggcccccagaactttgtgtgtgtgtgtgcacgcgcgcgcgtgtgtgcccaggtgcgagggttcgcgcgtgtgctggcggggagggaaccgacccgaaagagagccccacgctggcaaagtggctcgcccatctcacagccggttggcgctcgcggaggctcacagaacatttcctgcctgttgctcacactctgttgtccacagcatacccgcaccctagatggctgactcttgtcttctgtctctttattttccatgtgtgagcctgtgcctgtggtttatctctggaggatgtgcctgagggaggagacatatactgcctggactgcctggctgatgtgagctagtttgtctggttgagttggatgtttaaatagaaggcagaacaacaacagagcacggttcccataagggcggcgagatcagcctcctgtctcatctggaagaccaccactctggggtctcagaggaatgatggaagccttggggtttctaaaattggaagtgaatggccccatggtgacggtggccctgtcagtggctctcttggccctcctgaaatggtactccacatcagcattctcaagactggagaagttaggcctcagacatcccaagccttctcctttcattggaaacttgacatttttccgccagggtttttgggaaagccaaatggagctcagaaagctgtatggacctctgtgtgggtactatcttggtcgtcggatgtttattgttatttctgagccagacatgatcaagcaggtgttggttgagaacttcagtaactttaccaacagaatggcgtcgggtttggagttcaagtcggtagccgacagcgttctgtttttacgtgacaaaagatgggaagaggtcagaggtgccctgatgtctgctttcagtcctgaaaagctgaacgagcttggccttttaatcatgcaagagagaataaaaggtcacatgggtggccagcaggctccacaaagaattccacccacccgtttgtcgaagccgagtggtatctatgtgaatctccattatgccactctacctttctgtatggttcccctcatcagccaagcctgcgaccttctcctggctcatttaaaacgctatgcggaatctggggacgcatttgacatccagaggtgctactgcaattacaccacagatgtggttgccagcgtcgcctttggcaccccggtggactcctggcaggcccctgaggatccctttgtgaaacactgcaagcgtttcttcgaattctgcatccccagacctatcctggttttactcttatcatttccatccataatggtcccactggcccggattttgcccaataagaaccgagacgaactgaatggcttttttaacaaactcattaggaatgtgattgccttgcgggaccagcaagctgccgaagagaggcggagagacttcctccaaatggtcctggatgcccgacattctgcaagtcccatgggcgtgcaagactttgacatcgtcagagacgttttctcctctactgggtgcaagccgaacccttcccggcaacaccagcccagccctatggccaggcctttgactgtggatgagattgtgggccaggccttcatcttcctcatcgctggctatgaaatcatcaccaacacactttcttttgccacctacctactggccaccaaccctgactgccaagagaagcttctgagagaggtagacgtttttaaggagaaacacatggcccctgagttctgcagcctcgaggaaggcctgccctatctggacatggtgattgcagagacgctgaggatgtacccgccagctttcagattcacacgggaggcagctcaggactgcgaggtgctggggcagcgcatccccgcaggcgctgtgctagagatggccgtgggtgccctgcaccatgaccctgagcactggccaagcccggagaccttcaaccctgaaaggttcacggctgaggcccggcagcagcaccggcccttcacgtacctgcccttcggggccggcccacggagctgcctcggggtgcgtctagggctgcttgaggtcaagttgacactgctccacgtgctgcacaagttccggttccaagcctgccctgagacccaggtaccgctgcagctagaatccaaatctgccctaggtccaaaaaatggtgtctatatcaagatcgtatcccgctgacacagaaggctgccgggtggggggagggcacccccaaattcaaagaaaaccctaagtgtggatgttcagaattttggaaaaatgtcactgaagtgattgaaagagtgcctggcatgcaaggataagaggttctttacataacatttcctaaatgcttaataaacgtttgttgcacttggttttgacattgccaatggggtttgaaccagtgctctctctaaatg

SEQ ID NO: 21288 - DNA, 855 bp, Homo sapiens
  misc_feature 1..855: note = ENST00000476749
  source 1..855: mol_type = unassigned DNA
agcggtcgggtccgggcgcccgcgcagaatcagctgtctgagctgcccaggcggcgggggagcagcgagcgggcttcagcgagccgcaggaggcacaggcctgtcctgggtccccgcaggtcagtgtgaaggcgtgcgctgccggcggaccctgggacaggggtggagggggctggcagtaggattggggagggggcggagaagggatccggtagattggggaggagggggatgcggagtcgcgggggcgggggcagtggagggagaacccccgaagcaagcctggctcgccttctcgacgcccccttgcactgagtcctccatccattttagtgctggaaatggggggtgggggtagcgaccccgcagtgcgacagtgaaacgtagacatattctggaaataaccccttctcacaatctacacccatggaaacacttgatctccgcaaaaatgaggtggcgctggggcaggttgcctccggggaagggggacacagagacaaacgcagtttggaaagcatcctggtttggtgcccgaggcctggaaagaaatggcggctggggtgcgggggaggtaggggaggaaaacggtgggtaagcagggcctggactcaggaaagggaaccgagtccctgtgagcccgctaagcgcgcagcccctgcccctgtctcctgtctgtccgcaggtctgcgcgtctgttgttcccagcgctctgagaggcctgaaaaggaagagcaacctgtccagaatccccgcaggaaaggaaaaggaggggaaatctcgacatggaaaaactcttcaatgaaaatgaaggaatgccttcgaatcaaggaaagatagacaatgaagaacagc

SEQ ID NO: 21289 - DNA, 1080 bp, Homo sapiens
  misc_feature 1..1080: note = ENST00000329035
  source 1..1080: mol_type = unassigned DNA
gcgcccgcgcagaatcagctgtctgagctgcccaggcggcgggggagcagcgagcgggcttcagcgagccgcaggaggcacaggcctgtcctgggtccccgcaggtctgcgcgtctgttgttcccagcgctctgagaggcctgaaaaggaagagcaacctgtccagaatccccgcaggaaaaggaggggaaatctcgacatggaaaaactcttcaatgaaaatgaaggaatgccttcgaatcaaggaaagatagacaatgaagaacagccaccgcacgagggaaagccagaagtagcttgtattctggaagacaagaagttagaaaacgagggaaacacagaaaacacgggcaagagagttgaggaaccgttaaaggataaagaaaagccagagagtgcgggaaaggcaaaaggagaaggaaagtcagagaggaagggaaagtcagagatgcagggaggatcaaagacagagggaaagccagagagagggggaagggcagagggtgaaggagagccagacagtgaaagagagccagagagtgagggagagccagaaagtgaaacaagggctgcaggaaagcgcccagctgaggatgatatacccaggaaagccaaaagaaaaaccaacaaggggctggctcagtacctcaagcaatataaggaagccatacatgatatgaatttcagcaatgaggacatgataagagaatttgacaacatggctagggtggaggataaaaggagaaaaagcaaacagaaattgggggcgtttttgtggatgcaaagaaatttacaggaccccttctatcctaggggtccaagggaattcaggggtggctgcagggccccacgaagggacactgaagacattccttatgtgtagtgtccctggcaggcatttgtcaggccatatgttttaaccttatggtaatactttgctttagtcgttcctcctgctaccagtagcgttttgacccacctgccagtgtttgcttgctctatgtttcagtagcagattttcacacatgtgcattgcagagacgtcatgattcgtggaaaaataaagcagcttataatatc

SEQ ID NO: 21290 - DNA, 1100 bp, Homo sapiens
  misc_feature 1..1100: note = ENST00000372780
  source 1..1100: mol_type = unassigned DNA
agcggtcgggtccgggcgcccgcgcagaatcagctgtctgagctgcccaggcggcgggggagcagcgagcgggcttcagcgagccgcaggaggcacaggcctgtcctgggtccccgcaggtctgcgcgtctgttgttcccagcgctctgagaggcctgaaaaggaagagcaacctgtccagaatccccgcaggaaaggaaaaggaggggaaatctcgacatggaaaaactcttcaatgaaaatgaaggaatgccttcgaatcaaggaaagatagacaatgaagaacagccaccgcacgagggaaagccagaagtagcttgtattctggaagacaagaagttagaaaacgagggaaacacagaaaacacgggcaagagagttgaggaaccgttaaaggataaagaaaagccagagagtgcgggaaaggcaaaaggagaaggaaagtcagagaggaagggaaagtcagagatgcagggaggatcaaagacagagggaaagccagagagagggggaagggcagagggtgaaggagagccagacagtgaaagagagccagagagtgagggagagccagaaagtgaaacaagggctgcaggaaagcgcccagctgaggatgatatacccaggaaagccaaaagaaaaaccaacaaggggctggctcagtacctcaagcaatataaggaagccatacatgatatgaatttcagcaatgaggacatgataagagaatttgacaacatggctagggtggaggataaaaggagaaaaagcaaacagaaattgggggcgtttttgtggatgcaaagaaatttacaggaccccttctatcctaggggtccaagggaattcaggggtggctgcagggccccacgaagggacactgaagacattccttatgtgtagtgtccctggcaggcatttgtcaggccatatgttttaaccttatggtaatactttgctttagtcgttcctcctgctaccagtagcgttttgacccacctgccagtgtttgcttgctctatgtttcagtagcagattttcacacatgtgcattgcagagacgtcatgattcgtggaaaaataaagcagcttataatatc

SEQ ID NO: 21291 - DNA, 1168 bp, Homo sapiens
  misc_feature 1..1168: note = ENST00000372680
  source 1..1168: mol_type = unassigned DNA
agtgggctggctcctgacgcactttctgcgggtgggaggggaactagggacccgagcccactggtgacgtttttctcacgtgatctgaagccgacgtgtgcagaagtccctctcctccaggtaccagatccctgtttccgtggaggaaggcagacttcagactgaaggacagagaaggcaactgccctacagccctgcaggtcttcaagtctgtggttgtgggcactaacccagacaagaaaaggaaagacctgcagtatcggtgcaggaaaggcaaagaagggaacatctcaacatggaaaagctctacaaagaaaatgaaggaaagccagagaatgaaagaaacctagaaagtgagggaaagccagaggatgagggaagtacagaagatgaaggaaagtcagacgaggaagaaaagccggacatggaggggaagacagaatgcgagggaaagcgagaggatgagggagagccaggtgatgagggacaactggaagatgagggaaaccaggaaaagcagggcaagtctgaaggtgaggacaagccacaaagtgagggcaagccagcctcccaggccaagccagagagccagccgcgggccgccgaaaagcgcccggctgaagattatgtgccccggaaagcaaaaagaaaaaccgacagggggacggacgattcccccaaggactctcaggaggacttacaagaaaggcatctgagcagtgaggagatgatgagagaatgtggagatgtgtcaagggctcaggaggagctaaggaaaaaacagaaaatgggtggttttcattggatgcaaagagatgtacaggatccattcgccccaaggggccaacggggtgtgaggggagtgaggggcggaggtaggggccagaaagacttagaagatgtcccatatgtttaatgtctttggcctttaattctgatttctctgatgggaatattgccagtcctgcttttcctggcaggcatttgccggcctatgtgctttaaccttaagctgatactttcctttaggtgtcactcttgttaccagcagacttttgacccaactacagtgctctgtcttttagtagaggattttcacccatgtgcatggaataaatgttcatggtacattgtaaaataacaataaaaaagagttttcagaaccatg

SEQ ID NO: 21292 - DNA, 1106 bp, Homo sapiens
  misc_feature 1..1106: note = ENST00000372774
  source 1..1106: mol_type = unassigned DNA
gtgggcaccagcccccgcgcccgcccgcccgcccagcggtccggtccaggcgcccgcgcagaatcagctgtctgagctgcccaggcggcgggggagcagcgagcgggcttcagcgagccgcaggaggcacaggcctgtcctgggtccccgcaggtctgcgcgtctgttgttcccagcgctcttggaggcctgcaaaggaagagcaacctgtccagactccccgcaggacaggaaaaagagaaatctcgacatggaaaaaccctacaataaaaatgaaggaaacctggaaaacgagggaaagccagaagatgaagtagagcctgatgatgaaggaaagtcagacgaggaagaaaagccagacgcggaggggaagacagaatgcgagggaaagcgaaaggctgagggagagccaggtgatgagggacaactggaagataagggaagccaggaaaagcagggcaagtccgaaggtgagggcaagccacaaggcgagggcaagccagcctcccaggcaaagccagagggccagccgcgggccgccgaaaagcgcccggctggagattatgtgccccggaaagcaaaaagaaaaacagacagggggacggacgattcccccaaggactctcaggaggacttacaggaaaggcatctgagcagtgaggagatgatgagagaatgtggagatgtgtcaagggctcaggaggagctaaggaaaaaacagaaaatgggtggttttcattggatgcaaagagatgtacaggatccattcgcccaaggggacaacggggtgtcaggggagtgaggggtggaggtaggggccaaagaggcttacacgatatcccatacctttaatgcctttggccttccattctgacttctctgatgagattattgtcaaccctgctttccctggtagatatttgccaggcccaatgctttaaccttaagctgatatttttgctttagatgtcaatctcgttaccagcagccttttgacccaactacagcgctctatattttagtagaggattttcacccatgtgcatggaaaagatgttcatgacacattgtaaaaaataaataaataaagaacagtttgcagaacc

SEQ ID NO: 21293 - DNA, 983 bp, Homo sapiens
  misc_feature 1..983: note = ENST00000372773
  source 1..983: mol_type = unassigned DNA
gggagagacaacttgaggactgaggagagaggaggcccaggacagaaccccaggaacaccgccactcaaggtggcagctcagcttcctggcaggcaccactaccccccgggctctggagtcaggcagagccggtattgaaagtgggctgtggagttctggggctaagcgctcttggcaaagtcgggtaccctctctgatcagctgtcacacctggcgataatgggcatcagagagagatgccttgcgaggatgctgtgagctgcgtcaggtctgcgcgtctgttgttcccagcgctcttggaggcctgcaaaggaagagcaacctgtccagactccccgcaggaaaaagagaaatctcgacatggaaaaaccctacaataaaaatgaaggaaacctggaaaacgagggaaagccagaagatgaagtagagcctgatgatgaaggaaagtcagacgaggaagaaaagccagacgcggaggggaagacagaatgcgagggaaagcgaaaggctgagggagagccaggtgatgagggacaactggaagataagggaagccaggaaaagcagggcaagtccgaaggtgagggcaagccacaaggcgagggcaagccagcctcccaggcaaagccagagggccagccgcgggccgccgaaaagcgcccggctggagattatgtgccccggaaagcaaaaagaaaaacagacagggggacggacgattcccccaaggactctcaggaggacttacaggaaaggcatctgagcagtgaggagatgatgagagaatgtggagatgtgtcaagggctcaggaggagctaaggaaaaaacagaaaatgggtggttttcattggatgcaaagagatgtacaggatccattcgcccaaggggacaacggggtgtcaggggagtgaggggtggaggtaggggccaaagaggcttacacgatatcccatacctttaatgcctttggccttccattct

SEQ ID NO: 21294 - DNA, 1177 bp, Homo sapiens
  misc_feature 1..1177: note = ENST00000332431
  source 1..1177: mol_type = unassigned DNA
gtgaaccgaagtccttatattcccgggcttctttctcctctgggtaccagctccttactgccctgcagacaagcgtgccgtgcgtgcttgtggccaagggaaggaagagctggttgatccacagatagctccttcctccccgccccttcctttttgtttggaggtcccaggatctgtgttcacagacatctgggggaagaaaaggagcaggaaactaccccgcacagagttaagcaggaaacaacaacaacatcatgcaaaaaccctgcaaagaaaacgaaggaaagccaaagtgcagcgtgccaaagagggaggaaaaacgcccgtatggagaatttgaacgccagcaaacagaagggaattttagacagaggctgcttcagtctctcgaagaatttaaagaggacatagactataggcattttaaagatgaagaaatgacaagggagggagatgagatggaaaggtgtttggaagagataaggggtctgagaaagaaatttagggctctgcattctaaccataggcattctcgggaccgtccttatcccatttaattaatttctctgacaattcaattattttctgttattaatgttgccactgctttctgtttgtctgcactttcttgataaatatttgctatcgttttactccagtcattcgatgttgctgagatttacatatgactcttgtcaacatctcatcttttgacccaatcttattcatttaataagaggtctcattcatttgcatggaaaaatgctcattgtatattgcaaagtgaaaataacgagttgcaaaacagtgtatacatatatgtgtgtatatatgtacactttatttgtacatttctatgtgacataatgcaaaggaaagtgtctgattttattatacaccaaaggttaacagtgaatctctgtgtgatctctttttttttctttttgcctatctgcatcttctcacttgccaaaaaatgaatatatgtttatgtgtgtatattacttgtgtcacaaaaaaccctaaagtagacagtaaaagaacttgtcaatcgcctttggaaggcaatgaaacacttaataaactctcaataacagaagcgtaaaaatgaaatgtaaacctccaattacctctggatctcttagccagagtaataaactggtaattattacagata

SEQ ID NO: 21295 - DNA, 852 bp, Homo sapiens
  misc_feature 1..852: note = ENST00000372666
  source 1..852: mol_type = unassigned DNA
tctcctctgggtaccagctccttactgccctgcagacaagcgtgccgtgcgtgcttgtggccaagggaaggaagaggtcccaggatctgtgttcacagacatctgggggaagaaaaggagcaggaaactaccccgcacagagttaagcaggaaacaacaacaacatcatgcaaaaaccctgcaaagaaaacgaaggaaagccaaagtgcagcgtgccaaagagggaggaaaaacgcccgtatggagaatttgaacgccagcaaacagaagggaattttagacagaggctgcttcagtctctcgaagaatttaaagaggacatagactataggcattttaaagatgaagaaatgacaagggagggagatgagatggaaaggtgtttggaagagataaggggtctgagaaagaaatttagggctctgcattctaaccataggcattctcgggaccgtccttatcccatttaattaatttctctgacaattcaattattttctgttattaatgttgccactgctttctgtttgtctgcactttcttgataaatatttgctatcgttttactccagtcattcgatgttgctgagatttacatatgactcttgtcaacatctcatcttttgacccaatcttattcatttaataagaggtctcattcatttgcatggaaaaatgctcattgtatattgcaaagtgaaaataacgagttgcaaaacagtgtatacatatatgtgtgtatatatgtacactttatttgtacatttctatgtgacataatgcaaaggaaagtgtctgattttattatacaccaaaggttaacagtgaatctctgtgtgatctctttttttt

SEQ ID NO: 21296 - DNA, 1071 bp, Homo sapiens
  misc_feature 1..1071: note = ENST00000372661
  source 1..1071: mol_type = unassigned DNA
actggtgacgtagatctcatgtgaccaggagtcgacgtgtgcagaagtcctggtaatctggtccttgttcccgtctggataccagcttccttcagcagcgcaggcggtggtccctgaggcccgtggaaggagtcaaacttgcgggaattttgcagtttatctgcagggctgttgtttccagcaagacccaaagctagaaaaggaggaggaagaaactgacccgatcagtgccagaagtcattgtattcaaagaagaataagcaagaaagaaaagaaggaaggaagagaggtagacagatacaagatgaaatcctgtcaaaaaatggaaggaaaaccagaaaatgagagtgaaccaaagcatgaggaagagccaaagcctgaggaaaagccagaagaggaggagaagctagaggaggaggccaaagcaaaaggaacttttagagaaaggctgattcaatctctccaggagtttaaagaagatatacacaacaggcatttaagcaatgaagatatgtttagagaagtggatgaaatagatgagataaggagagtcagaaacaaacttatagtgatgcgttggaaggttaatcgaaaccatccttacccctatttaatgtagtttaccttgatttttatctgatattaacaataccatatagcttgctttttattagcatttcctgatattcctttgtccatatttctacttataacctgttgctattaatggttttagatgtatctcttgttatctgcatctcattgtttattgtattttgaaccaatctacaagtctctgtcttttaataaaagaactttacacatttgtaaaaaagaggttcttggtaagatataaaatggaaaaaggctaagtaatatgtgaatatcatatttttgaaaggtaaaaagtacatttgtatattacatatatggacataacttgtgaaggatgaaagaaagtacagcctctcggtggtgggattatgaatgatttttctccttttgcttgtttgtattttctatattcctaaaattaacacacattattattgctagaataataaaagtttt

SEQ ID NO: 21297 - DNA, 992 bp, Homo sapiens
  misc_feature 1..992: note = ENST00000372656
  source 1..992: mol_type = unassigned DNA
actggtgacgtagatctcatgtgaccaggagtcgacgtgtgcagaagtcctggtaatctggtccttgttcccgtctggataccagcttccttcagcagcgcaggcggtggtccctgaggcccgtggaaggagtcaaacttgcgggaattttgcagaagtcattgtattcaaagaagaataagcaagaaagaaaagaaggaaggaagagaggtagacagatacaagatgaaatcctgtcaaaaaatggaaggaaaaccagaaaatgagagtgaaccaaagcatgaggaagagccaaagcctgaggaaaagccagaagaggaggagaagctagaggaggaggccaaagcaaaaggaacttttagagaaaggctgattcaatctctccaggagtttaaagaagatatacacaacaggcatttaagcaatgaagatatgtttagagaagtggatgaaatagatgagataaggagagtcagaaacaaacttatagtgatgcgttggaaggttaatcgaaaccatccttacccctatttaatgtagtttaccttgatttttatctgatattaacaataccatatagcttgctttttattagcatttcctgatattcctttgtccatatttctacttataacctgttgctattaatggttttagatgtatctcttgttatctgcatctcattgtttattgtattttgaaccaatctacaagtctctgtcttttaataaaagaactttacacatttgtaaaaaagaggttcttggtaagatataaaatggaaaaaggctaagtaatatgtgaatatcatatttttgaaaggtaaaaagtacatttgtatattacatatatggacataacttgtgaaggatgaaagaaagtacagcctctcggtggtgggattatgaatgatttttctccttttgcttgtttgtattttctatattcctaaaattaacacacattattattgctagaataataaaagtttt

SEQ ID NO: 21298 - DNA, 4394 bp, Homo sapiens
  misc_feature 1..4394: note = ENST00000483040
  source 1..4394: mol_type = unassigned DNA
ccccctccagcgtgcagccgcgccacttcctgaccttggcacccatcaaaatacccctccggacgtcccccgtctcagatacaaggacagagcggggccgagtggcccgccctcctgccctgatgctgcgggcccagaagagccgggatggagacaaagaagacaagagtctcactctgtcccccaggccggagtgcagtggtgtaatctcggctcactgcaacctccgcctccaagtttcaagtgattctcctgcctcagcctcccgagtagctgggactacaggagcctccaccgatgctggggggaggagaggacagcacagccagaggcaacaggccagtggcctccaccccggtgcccggatccccctggtgtaattctgcactgtggtcacattctgcagaaagaaaaaaacagcatttaagcgatgagctatcctgctctgatctgtctgtgaatatatattaaaatgataatgctgttgcatgtctatcagcgaaaggcagtggctgaagaaagtgtagcatgccttatgcttcaaaagatctgttttccctccactccaagaagaatcgtaactgaatggcagttaattaaagacgtgcctgttctctctgtcgccctgcgtggctgcttgctctcggaatatgccacactccagacaccctccacgagggagctacagtttttggtttttaaaaatgcccttttataatggagtcatttggaagcagaataaaaggttattacagtaaaaattaagtttcaagcctgaagatgagagtgcagtacacagctgggaggcacagctaatttaaagaacagaaataacaaccacttgtgtcagctcaatgtgccagccaggtacagaaggcagccggctaaggagcgcagggcccccaccagccttgcatagcgagtgagcacatccctgctgactgggcctgctgtgccatgccctggtcctctgatgattcgggtgaacttggctccaatctggacagactggcacccctggcttctatgccatggtcagtgtcggtggcaggctcctggtgcctccagccttccatttgtagctaaagctcctctgtaccctgggagtgcctcggggtgagacctctttgtactaatattatgctgttttccagccacccattctccaacccttacaatttagctcgattctgatgctaactactgggagttagagccaaaccccacaggctggggtcagtccctctggctgccctgctttagacattggctgcaaatggggccccccagctgcctgcacatctgcccagctgaccacagatctggggttcccatgacctcctctccacttcagtggtgatttgctaggaccactcacagaactcaggaagcgctttacttaggattacagttgttttatcaaggatacaactcaggaacagccagtggaagcaatgctcagggtaaggtgtggacctgactgagcttctgggcctcgccggcgccaccctcccagtgctgcagcgttcaccagcctggaagcactctgaacctcaatgttttagaattttaatggagatgtaactacataggcatgactgatgaaatcatcggccaagtgaaaggactcagagggttgggcagcgctgaaagtgacggccctccagtcacgtggttggtgtttctggagaccagcaccctccctgaagctactcaggggtcctgaagtcacatggttggtgtctctggagaccagcaccctccctgaagctactcaggggtcctgaagtcatttcatttgcgcagcctcaggcacaggtgttattcctaccaggtcagggacttggtaggaataacaagatgctttcttcgctcaggaaattctaagagtttgggaagctctgtgtcaggaatctggaacaaagaccgtatacatccctctgctgcttaacgacaggggtatattctggaaaggcatccttaggcagtggcatccgacatccttttatgcacatcacagggtgtgctcacacaggcctggtggcacagcctcctgcacgcctgggctgcatggtgtagaccgtggctcccaggctgcagaccacacagcgctgactgcacagaggcagttgtgacacagtggtagggatgtgtgtgtctaaacacatccaaatgtgagaaggtagagtaaaatttgatattataatctgacgggaccaccatggtatgtgtggtcagtccatggttgagagaaatgtcactctgcggcacatgactgcatatacattttacgatgccacgaactggttgagagcttctacaggcaaactctccagtgtctccaaggcaggcacactgccgcatatcacgctgcaggatggggaaacgttccccaagaccctgtggaatcctcacacagcttccgccaagctcccctggggcgttgcagggatccagaagacttgaccttgagccctagaaccttctcactgcgaaagctgcggctttcttccccagcgatattgtgttaccatgagcaaggcttcgtgcgatccagcaaatgaaaacggttccctggctgctgcactcccctccctcggcgtgggtctttgccgatgaatcctgggtattgagcatgtttgacttttgaaaaactagtatcaaaatcatgttctgagatgaagttggtagaacttttctaaaaagaaaggaaaagtttcccaagacatgatacatgtggatgatgttcaagaagaaaaaggtgattagaaatgatggtgattacgagagatgcggggctcggtcacatcagcctgtgtcactttctcccgtgcaccgtcctctgacttgcagttgcactcgctaagctgagggaggacgcatcggtcttctttgagtgtgtggtctggacgggcgatgaccgagttttcttcttcaacccaacgatgcacctgtctgtctgggagaagcccatggacctgaaggaccgcggagacctcaacaggatcattgaggacccgccccacaaacgcaagctggaggcaccagcaactgacaacagcgatgggtccagttctgaagacaacagggaagaccaagatgtgaaaaccaagaggaaccggaccgaaggctgcgggagtcccaagccagaggaggcaaagagagaggacaaaggcacaaggacgccgcccccgcagatcctcctgcctctggaggagcgtgtgacccacttccgagacatgctgctggagagaggggtatcagcattttctacctgggagaaagaattacacaaaatcgtgtttgacccacgctatctcctgctcaactctgaggaacgaaagcagatatttgaacagtttgtcaagacaagaataaaagaagaatacaaggaaaagaaaagtaaattgctgctagccaaagaagaattcaagaaacttctagaggaatctaaagtgtctcccaggaccacgtttaaggagtttgcagagaaatacggccgggatcagaggttccgacttgttcaaaaaagaaaggaccaggagcattttttcaaccaattcatacttattcttaagaaacgggacaaggaaaacagactaaggctgcggaaaatgagatgagtttgtgaaaaaatgcaataagcccgggggttgaccctgggcgtgccgggggcgagggggtcacggtggagacggacacgggcgtggggcggccgagacctgcacggcccagcgggcaccggcactgcggggtcttcgttctcagaggattactgtttcatattgaagctctctcttttgtacattcagagtttgatgcatttctaatcaccgtgatacgtcgatcccttaattgttttaattatgcaaattacttgtaatatacacaaattatcaatccactgcaggactgtggggaagcaggaacgggagcctctgtaacaatctcaaggcatttgtgtcatcacctaagacgattggcgaaaacttttctgaaaacctttgtgaattacttcgtttctccaggattcccgcagtgttgaggaattccttactctgtccctaggtctcagtctcgtttctgagtagcagcaatagggttttcatcattcatcatagtgacaactgtgagcattccacacctggaccgtggatcacttacaggtttccaagggtggccgcgcgttcctcccagaggggcgtcccggcctggagcagggagccgtgttggttgccaccggtcctacttcaaaagaattattttgtacaaaatcatcatattaatatttgagttatttttattgtatgcccggagtttgcatgagattttttctcatcacctttgtataaaaaatttttaattttttttaatcaataaatattttaaaccag

SEQ ID NO: 21299 - DNA, 2618 bp, Homo sapiens
  misc_feature 1..2618: note = ENST00000368642
  source 1..2618: mol_type = unassigned DNA
gagttcgctccggagccgcgccgccgccggcccagcatctcgggcgcccgccgcccccgccgccgccgtcagcgcggggatgtaggatgcaggcgggcgccaggttccagcggcggcggcggcagctgcagcagcagcagccccggcggcggcagcctctcctctggccgatggacgcagagccgccgccgccgccgccctgggtctggatggtgccgggctcggccgggctgctccggctcagcgcgggggtcgtggttcccccggtgctgctcgcctcggccccgccgcccgcggccccgctgctccccggtctccccggctggccggccccgagcgagccggtgctcccgctgctgccgctgccctctgcgccagactccgccgccgccgccgccgcgcaccccttccccgcgctccacgggcagtggctgtttggtggccattctccgtccctaggactgcccccctcttccacagtggagctggtgcccgtcttcccacatctctgcccttctgctcttgcaacccctattgggaaaagttggatagacaaaaggattcctaactgtaagatcttttttaataattcctttgctctggactcaacgtggatacatcctgaggagtcaaggtttttccatgggcatgaaaagcctcgtttgctggcaaatcaagtagctgtgtctctgtccaggccggctcctgcctccaggccgctccccacggtggtgttagcacctcagcccatcccaggtggctgccataacagccttaaggtgaccagcagccccgccattgccatcgccaccgccgccgccgctgccatggtctccgtggaccctgagaacctccggggcccgtccccctccagcgtgcagccgcgccacttcctgaccttggcacccatcaaaatacccctccggacgtcccccgtctcagatacaaggacagagcggggccgagtggcccgccctcctgccctgatgctgcgggcccagaagagccgggatggagacaaagaagacaaggagcctccaccgatgctggggggaggagaggacagcacagccagaggcaacaggccagtggcctccaccccggtgcccggatccccctggtgtgtggtctggacgggcgatgaccgagttttcttcttcaacccaacgatgcacctgtctgtctgggagaagcccatggacctgaaggaccgcggagacctcaacaggatcattgaggacccgccccacaaacgcaagctggaggcaccagcaactgacaacagcgatgggtccagttctgaagacaacagggaagaccaagatgtgaaaaccaagaggaaccggaccgaaggctgcgggagtcccaagccagaggaggcaaagagagaggacaaaggcacaaggacgccgcccccgcagatcctcctgcctctggaggagcgtgtgacccacttccgagacatgctgctggagagaggggtatcagcattttctacctgggagaaagaattacacaaaatcgtgtttgacccacgctatctcctgctcaactctgaggaacgaaagcagatatttgaacagtttgtcaagacaagaataaaagaagaatacaaggaaaagaaaagtaaattgctgctagccaaagaagaattcaagaaacttctagaggaatctaaagtgtctcccaggaccacgtttaaggagtttgcagagaaatacggccgggatcagaggttccgacttgttcaaaaaagaaaggaccaggagcattttttcaaccaattcatacttattcttaagaaacgggacaaggaaaacagactaaggctgcggaaaatgagatgagtttgtgaaaaaatgcaataagcccgggggttgaccctgggcgtgccgggggcgagggggtcacggtggagacggacacgggcgtggggcggccgagacctgcacggcccagcgggcaccggcactgcggggtcttcgttctcagaggattactgtttcatattgaagctctctcttttgtacattcagagtttgatgcatttctaatcaccgtgatacgtcgatcccttaattgttttaattatgcaaattacttgtaatatacacaaattatcaatccactgcaggactgtggggaagcaggaacgggagcctctgtaacaatctcaaggcatttgtgtcatcacctaagacgattggcgaaaacttttctgaaaacctttgtgaattacttcgtttctccaggattcccgcagtgttgaggaattccttactctgtccctaggtctcagtctcgtttctgagtagcagcaatagggttttcatcattcatcatagtgacaactgtgagcattccacacctggaccgtggatcacttacaggtttccaagggtggccgcgcgttcctcccagaggggcgtcccggcctggagcagggagccgtgttggttgccaccggtcctacttcaaaagaattattttgtacaaaatcatcatattaatatttgagttatttttattgtatgcccggagtttgcatgagattttttctcatcacctttgtataaaaaatttttaattttttttaatcaataaatattttaaaccag

SEQ ID NO: 21300 - DNA, 2968 bp, Homo sapiens
  misc_feature 1..2968: note = ENST00000282111
  source 1..2968: mol_type = unassigned DNA
ggccaggggctgggacgccccggcggagcaggcggcggcggtggcgagttggggagccctaggctcggcgctgccggaggggcccgagccgagccgcctgcgccccggccgggcagcgccgggcccgcttcccgcggggccacgccctgtcaaactttgttgcggcggctagcgcagcgggcccgcaagcgggcgggaggggcgccgggccgggccgggcagggcgcgggcggctaggggctccgagagcggcggccccggcccgcggccccaccatgccccagctcggcggcgggggcggcggcggcggcggcggcagcgggggaggcggcggctccagcgccggggcggccggcggaggggacgacctcggggcgaacgacgagctgatccccttccaggacgaggggggcgaggagcaggagccgagcagcgatagcgcctcggcgcagcgggacctagacgaggtcaagtcgtccctggtcaacgagtcggagaaccagagcagcagctcggactcggaggcggagaggcgcccgcagcccgtccgggacactttccagaagccgcgggactatttcgccgaagtgagaaggcctcaggacagcgcgttctttaaaggacccccgtaccctgggtaccccttcctgatgatcccggacctgagcagcccgtacctctccaacggacccctgtctcccggaggagcgcgcacctacctgcagatgaaatggcccctcctcgatgtcccctccagcgccacagtcaaggacacgaggtcaccatctccagcacacttgtctaataaagttcctgtcgttcagcacccgcatcacatgcatccgctgactcccctcatcacctacagcaatgaccacttctcccccggctcccctcccacccacctctccccagagatcgatccaaagacaggaatcccccggccccctcacccatccgagctgtcaccgtattacccactctctcccggagctgtcggacaaatcccccaccccctcggctggctcgtcccacagcaaggccagcccatgtactcccttcctcccggtggcttccggcacccttaccccgccctcgccatgaacgcctcgatgtccagcctggtctccagtcggttctctcctcacatggtggctcctgcccaccctggcctgcccacctcagggatcccccaccctgccatcgtctcccccatcgtcaagcaggaaccggcaccccccagcctgagccctgcagtgagcgtgaaatcaccagtcaccgtgaaaaaggaggaggaaaagaagccccacgtgaagaagcctctgaatgccttcatgttgtatatgaaggagatgagggccaaggtggtggctgagtgcaccctgaaggaaagtgcagccattaaccagatccttggaagaaagtggcacaacctgtctcgagaagaacaggccaagtactacgagctggcccggaaggagcggcagcttcactcgcagctctacccaacctggtcagcccgggacaactatggtaagaaaaagaagaggaagagagaaaagcagctgtcccagacacagtcacagcagcaagtccaggaggcagagggtgccctggcctccaagagcaagaagccatgtgttcagtacctgccccccgagaagccctgtgacagccctgcctcctcccacgggagcatgctggactccccggccactccctctgcagctttggcctcaccagctgcccctgctgccacccattcggagcaagcccagcccctctccctcaccaccaaaccagaaacccgggcccagctggctctccactctgccgccttcctgtcggctaaggctgcagcctcctcctctgggcagatgggcagccagcctcccctcctgtcccggcccctcccccttgggtccatgcccacagctctgctggcctctcccccgtccttccccgccacgctccatgcccaccaggccctcccggtgctacaggcccagcctctttccctggtcaccaagtctgcccactaagctccccccgacccctgcaggctgtcacatgactcattgagtagtaatgattcagaagaaaaagaaaaaggagactttattggtcaatatttgaccactctggactgttctgtaaagtggctggtaacaacagcactttacagtttgtagatgtaaccagtagctgatcttaaggcttttttaaaaaacaaaacaaaacaacaaaaaaaaatctttataagaaagagaactgaaaagtagcgtgctattcgtcctgtaggtgctgtggtggatggacctgggcagagggcacttctctctcttacctctcttgcactttctgtctcctgtctcttctcgcccctgccgcctgccccagcttccccgactccatctgcagctctgccattgtgacatttcctgttacccagcccaagttttcatcgtctgctcaataccgtgggttcttcttcgtcctctgtcctctgcccagtgtgaggccatcaccatgtgagaagacatcttggcctgatttgctgccaccagcgtcccctccctcagtgggcccgaactcgccagccccagctttcagtggagaaagcggtcctctgaaatggtttcctcccaacccccgcatttaaagggactcaaggtgcctgccacttcctcagcgaagaagtctgtgttcctccccgtccttgccagtggcgatcatcccttcacaatcccagagtggcaggcgggaccggccccatggtctggctcctgtcacctgggtccgtgccagcacaatctgccaaagttctagagaccctgttcccttccccatcacctcacatgcttcttctgtgtgtatttctttttgtttttatggtttttggagcaatttaaactcccagttgtttattttcacaaaagaaaataaaattgcagttgcaagacctttt

SEQ ID NO: 21301 - DNA, 537 bp, Homo sapiens
  misc_feature 1..537: note = ENST00000494519
  source 1..537: mol_type = unassigned DNA
ctgggtaccccttcctgatgatcccggacctgagcagcccgtacctctccaacggacccctgtctcccggaggagcgcgcaccacggagtcttgctctgtcgcccaggctggagtgcactgacgtgatctcggctcactgcaagctctgcctcctgggttcacgccattctcccgcctcagcctcccgagtagctgggactacaggcgccggccaccacacccggctaattttggtgcatgtatttctatttttatttttcgtttgccatttcttccagtttccttggttaaagttttcagctaagtacttacctttatagtcagagataacgcctactctacacctgcaagtatcattctcccaccctaccttttctcctggctgattccagcaatgtgggactggctggggggtaaggggctagcacatggtacaagaccagctcccaagagcaagtgttgagtgcaaccactatggaaaacagtatagaggttcttcaaaaaacaaaaaattaattaaaaattaaagaattata

SEQ ID NO: 21302 - DNA, 559 bp, Homo sapiens
  misc_feature 1..559: note = ENST00000442813
  source 1..559: mol_type = unassigned DNA
aaacaggtgcttggggcagctaaaaataaccaccctgggaagtgaaactgtggcagtgccaaggagctaagaacgtggtgatttaccagaagtcttcagaggcaagccatcttcaattcagaaggggaatcccacatgtgtgttgaatatgaggcattgtttaagacacctcctgccctcaccacattggcaaactgacagcgtcaacttgaaacaagtctgcacattgtggccattttcactccacaacaaatgtttggtctccctctgtcacccaggctagagtgcagcgaaatcacagctcactgcagcctcgacctcctgggctcaagagatcctcccacctcagccttctcagtagctgggactacaggatataagtggattcgtatggtgtgtagccttttgattctggcttcctctgctcactaatatgcacttgaaattcatccacattgctgcagtacctgcagatgaaatggcccctcctcgatgtcccctccagcgccacagtcaaggacacgaggtcaccatctccagcacacttgtctaataaagt

SEQ ID NO: 21303 - DNA, 715 bp, Homo sapiens
  misc_feature 1..715: note = ENST00000490744
  source 1..715: mol_type = unassigned DNA
ctgtctttatagcattcacacagagttgccaggggaaggcaaagcatttttggagcccctctttggagaaataacagtcactacaagttacagataatgaggaagacacatgtggaggaggaatccaaagtttatttctccatgaatgaggcgggctttctagagacttggttcaccagtgactcttgtcattggtcttgtgggtcctgtccctctcttccaggacgctggcttctgtatcacagccagctggaagatactcttcacagagatagaatccgtgcagctagagagggggtgcattagtcctgcctcccctgaatatgtccttgactgactggtgagagctgctagggagttgacagagggcaaggacaatgacacaagcacctgctaggctccagagcaccagggacatagggcaggatgctcccatttgatgttcgttaaggtgctctggcagggcgagggaacagtctgacatatctctctttggaagcaggaatcccccggccccctcacccatccgagctgtcaccgtattacccactctctcccggagctgtcggacaaatcccccaccccctcggctggctcgtcccacagcaaggccagcccatgtactcccttcctcccggtggcttccggcacccttaccccgccctcgccatgaacgcctcgatgtccaggtgagtcccggggctggggctgtccg

SEQ ID NO: 21304 - DNA, 2499 bp, Homo sapiens
  misc_feature 1..2499: note = ENST00000321394
  source 1..2499: mol_type = unassigned DNA
aaaaatgccgaccccgccccttccccggagcctcacttccgtcacagtcctgtttctctccctgttgtccctgcctctttttccttcccgccgtgccccgcggccgggccggggcagccgggaagcgggtggggtggtgtgttacccagtagctcctgggacatcgctcgggtacgctccacgccgtcgcagccactgctgtggtcgccggtcggccgaggggccgcgatactggttgcccgcggtgtaagcagaattcgacgtgtatcgctgccgtcaagatggaggggcctttgtccgtgttcggtgaccgcagcactggggaaacgatccgctcccaaaacgttatggctgcagcttcgattgccaatattgtaaaaagttctcttggtccagttggcttggataaaatgttggtggatgatattggtgatgtaaccattactaacgatggtgcaaccatcctgaagttactggaggtagaacatcctgcagctaaagttctttgtgagctggctgatctgcaagacaaagaagttggagatggaactacttcagtggttattattgcagcagaactcctaaaaaatgcagatgaattagtcaaacagaaaattcatcccacatcagttattagtggctatcgacttgcttgcaaggaagcagtgcgttatatcaatgaaaacctaattgttaacacagatgaactgggaagagattgcctgattaatgctgctaagacatccatgtcttccaaaatcattggaataaatggtgatttctttgctaacatggtagtagatgctgtacttgctattaaatacacagacataagaggccagccacgctatccagtcaactctgttaatattttgaaagcccatgggagaagtcaaatggagagtatgctcatcagtggctatgcactcaactgtgtggtgggatcccagggcatgcccaagagaatcgtaaatgcaaaaattgcttgccttgacttcagcctgcaaaaaacaaaaatgaagcttggtgtacaggtggtcattacagaccctgaaaaactggaccaaattagacagagagaatcagatatcaccaaggagagaattcagaagatcctggcaactggtgccaatgttattctaaccactggtggaattgatgatatgtgtctgaagtattttgtggaggctggtgctatggcagttagaagagttttaaaaagggaccttaaacgcattgccaaagcttctggagcaactattctgtcaaccctggccaatttggaaggtgaagaaacttttgaagctgcaatgttgggacaggcagaagaagtggtacaggagagaatttgtgatgatgagctgatcttaatcaaaaatactaaggctcgtacgtctgcatcgattatcttacgtggggcaaatgatttcatgtgtgatgagatggagcgctctttacatgatgcactttgtgtagtgaagagagttttggagtcaaaatctgtggttcccggtgggggtgctgtagaagcagccctttccatataccttgaaaactatgcaaccagcatggggtctcgggaacagcttgcgattgcagagtttgcaagatcacttcttgttattcccaatacactagcagttaatgctgcccaggactccacagatctggttgcaaaattaagagcttttcataatgaggcccaggttaacccagaacgtaaaaatctaaaatggattggtcttgatttgagcaatggtaaacctcgagacaacaaacaagcaggggtgtttgaaccaaccatagttaaagttaagagtttgaaatttgcaacagaagctgcaatcaccattcttcgaattgatgatcttattaaattacatccagaaagtaaagatgataaacatggaagttatgaagatgctgttcactctggagcccttaatgattgatctgatgttccttttatttataacaatgttaaatgcaattgtcttgtaccttgagttgagtattacacattaaagtaaagtacaagctgtaaacttgggtttttgtgatgtaggaaatggtttccatctgtactttggtcctctgatttcacatattgcaacctagtactttattagtttaaaaagaaattgaggttgttcaaagtttaagcaattcattctctctgaacacacattgctattcccatcccacccccaatgcacagggctgcaacaccacgacttctgcccattctctccagtgtgtgtaacagggtcacaagaattcgacagccagatgctccaagagggtggcccaaggctatagcccctccttcaatattgacctaacgggggagaaaagatttagattgtttattcttctgtggacacagtttaaaatcttaaacttgtctttttcctcttaatgtatcagcatgctaccctttcaaactcaaattttcattttaactgcttaggaataaatttacacctttgtgaaaattca

SEQ ID NO: 21305 - DNA, 1403 bp, Homo sapiens
  misc_feature 1..1403: note = ENST00000544255
  source 1..1403: mol_type = unassigned DNA
tcctgggacatcgctcgggtacgctccacgccgtcgcagccactgctgtggtcgccggtcggccgaggggccgcgatactggttgcccgcggtgtaagcagaattcgacgtgtatcgctgccgtcaagatggaggggcctttgtccgtgttcggtgaccgcagcactggggaaacgatccgctcccaaaacggatgtaaccattactaacgatggtgcaaccatcctgaagttactggaggtagaacatcctgcagctaaagttctttgtgagctggctgatctgcaagacaaagaagttggagatggaactacttcagtggcatgcccaagagaatcgtaaatgcaaaaattgcttgccttgacttcagcctgcaaaaaacaaaaatgaagcttggtgtacaggtggtcattacagaccctgaaaaactggaccaaattagacagagagaatcagatatcaccaaggagagaattcagaagatcctggcaactggtgccaatgttattctaaccactggtggaattgatgatatgtgtctgaagtattttgtggaggctggtgctatggcagttagaagagttttaaaaagggaccttaaacgcattgccaaagcttctggagcaactattctgtcaaccctggccaatttggaaggtgaagaaacttttgaagctgcaatgttgggacaggcagaagaagtggtacaggagagaatttgtgatgatgagctgatcttaatcaaaaatactaaggctcgtacgtctgcatcgattatcttacgtggggcaaatgatttcatgtgtgatgagatggagcgctctttacatgatgcactttgtgtagtgaagagagttttggagtcaaaatctgtggttcccggtgggggtgctgtagaagcagccctttccatataccttgaaaactatgcaaccagcatggggtctcgggaacagcttgcgattgcagagtttgcaagatcacttcttgttattcccaatacactagcagttaatgctgcccaggactccacagatctggttgcaaaattaagagcttttcataatgaggcccaggttaacccagaacgtaaaaatctaaaatggattggtcttgatttgagcaatggtaaacctcgagacaacaaacaagcaggggtgtttgaaccaaccatagttaaagttaagagtttgaaatttgcaacagaagctgcaatcaccattcttcgaattgatgatcttattaaattacatccagaaagtaaagatgataaacatggaagttatgaagatgctgttcactctggagcccttaatgattgatctgatgttccttttatttataacaatgttaaatgcaattgtcttgtaccttgagttgagtattacacattaaagtaaagt

SEQ ID NO: 21306 - DNA, 1671 bp, Homo sapiens
  misc_feature 1..1671: note = ENST00000420894
  source 1..1671: mol_type = unassigned DNA
tccacgccgtcgcagccactgctgtggtcgccggtcggccgaggggccgcgatactggttgcccgcggtgtaagcagaattcgacgtgtatcgctgccgtcaagatggaggggcctttgtccgtgttcggtgaccgcagcactggggaaacgatccgctcccaaaacgttatggctgcagcttcgattgccaatattgtaaaaagttctcttggtccagttggcttggataaaatgttggtggatgatattggtgatgtaaccattactaacgatggtgcaaccatcctgaagttactggaggtagaacatcctgcagctaaagttctttgtgagctggctgatctgcaagacaaagaagttggagatggaactacttcagtggttattattgcagcagaactcctaaaaaatgcagatgaattagtcaaacagaaaattcatcccacatcagttattagtggctatcgacttgcttgcaaggaagcagtgcgttatatcaatgaaaacctaattgttaacacagatgaactgggaagagattgcctgattaatgctgctaagacatccatgtcttccaaaatcattggaataaatggtgatttctttgctaacatggtagtagatgctgtacttgctattaaatacacagacataagaggccagccacgctatccagtcaactctgttaatattttgaaagcccatgggagaagtcaaatggagagtatgctcatcagtggctatgcactcaactgtgtggtgggatcccagggcatgcccaagagaatcgtaaatgcaaaaattgcttgccttgacttcagcctgcaaaaaacaaaaatgaagcttggtgtacaggtggtcattacagaccctgaaaaactggaccaaattagacagagagaatcagatatcaccaaggagagaattcagaagatcctggcaactggtgccaatgttattctaaccactggtggaattgatgatatgtgtctgaagtattttgtggaggctggtgctatggcagttagaagagttttaaaaagggaccttaaacgcattgccaaagcttctggagcaactattctgtcaaccctggccaatttggaaggtgaagaaacttttgaagctgcaatgttgggacaggcagaagaagtggtacaggagagaatttgtgatgatgagctgatcttaatcaaaaatactaaggctcgtacgtctgcatcgattatcttacgtggggcaaatgatttcatgtgtgatgagatggagcgctctttacatgatgcactttgtgtagtgaagagagttttggagtcaaaatctgtggttcccggtgggggtgctgtagaagcagccctttccatataccttgaaaactatgcaaccagcatggattggtcttgatttgagcaatggtaaacctcgagacaacaaacaagcaggggtgtttgaaccaaccatagttaaagttaagagtttgaaatttgcaacagaagctgcaatcaccattcttcgaattgatgatcttattaaattacatccagaaagtaaagatgataaacatggaagttatgaagatgctgttcactctggagcccttaatgattgatctgatgttccttttatttataacaatgttaaatgcaattgtcttgtaccttgagttgag

SEQ ID NO: 21307 - DNA, 1878 bp, Homo sapiens
  misc_feature 1..1878: note = ENST00000392168
  source 1..1878: mol_type = unassigned DNA
gtcctgtttctctccctgttgtccctgcctctttttccttcccgccgtgccccgcggccgggccggggcagccgggaagcgggtggggtggtgtgttacccagtagctcctgggacatcgctcgggtacgctccacgccgtcgcagccactgctgtggtcgccggtcggccgaggggccgcgatactggttgcccgcggtgtaagcagaattcgacgtgtatcgctgccgtcaagatggaggggcctttgtccgtgttcggtgaccgcagcactggggaaacgatccgctcccaaaacggatgtaaccattactaacgatggtgcaaccatcctgaagttactggaggtagaacatcctgcagctaaagttctttgtgagctggctgatctgcaagacaaagaagttggagatggaactacttcagtggttattattgcagcagaactcctaaaaaatgcagatgaattagtcaaacagaaaattcatcccacatcagttattagtggctatcgacttgcttgcaaggaagcagtgcgttatatcaatgaaaacctaattgttaacacagatgaactgggaagagattgcctgattaatgctgctaagacatccatgtcttccaaaatcattggaataaatggtgatttctttgctaacatggtagtagatgctgtacttgctattaaatacacagacataagaggccagccacgctatccagtcaactctgttaatattttgaaagcccatgggagaagtcaaatggagagtatgctcatcagtggctatgcactcaactgtgtggtgggatcccagggcatgcccaagagaatcgtaaatgcaaaaattgcttgccttgacttcagcctgcaaaaaacaaaaatgaagcttggtgtacaggtggtcattacagaccctgaaaaactggaccaaattagacagagagaatcagatatcaccaaggagagaattcagaagatcctggcaactggtgccaatgttattctaaccactggtggaattgatgatatgtgtctgaagtattttgtggaggctggtgctatggcagttagaagagttttaaaaagggaccttaaacgcattgccaaagcttctggagcaactattctgtcaaccctggccaatttggaaggtgaagaaacttttgaagctgcaatgttgggacaggcagaagaagtggtacaggagagaatttgtgatgatgagctgatcttaatcaaaaatactaaggctcgtacgtctgcatcgattatcttacgtggggcaaatgatttcatgtgtgatgagatggagcgctctttacatgatgcactttgtgtagtgaagagagttttggagtcaaaatctgtggttcccggtgggggtgctgtagaagcagccctttccatataccttgaaaactatgcaaccagcatggggtctcgggaacagcttgcgattgcagagtttgcaagatcacttcttgttattcccaatacactagcagttaatgctgcccaggactccacagatctggttgcaaaattaagagcttttcataatgaggcccaggttaacccagaacgtaaaaatctaaaatggattggtcttgatttgagcaatggtaaacctcgagacaacaaacaagcaggggtgtttgaaccaaccatagttaaagttaagagtttgaaatttgcaacagaagctgcaatcaccattcttcgaattgatgatcttattaaattacatccagaaagtaaagatgataaacatggaagttatgaagatgctgttcactctggagcccttaatgattgatctgatgttccttttatttataacaatgttaaatgcaattgtcttgtaccttgagttg

SEQ ID NO: 21308 - DNA, 566 bp, Homo sapiens
  misc_feature 1..566: note = ENST00000546204
  source 1..566: mol_type = unassigned DNA
gactagacattgtttctgtatagtatatctaaatatcctgtgtaggcaggacttaagggaactttatgtagacttattttattaaaatgccattttttttgagaaattgatggtcttggcaaaaaaaaatttttaaaaatgctattacaagaattgtacttttgttttgaacagtactaaggctcgtacgtctgcatcgattatcttacgtggggcaaatgatttcatgtgtgatgagatggagcgctctttacatgatgcactttgtgtagtgaagagagttttggagtcaaaatctgtggttcccggtgggggtgctgtagaagcagccctttccatataccttgaaaactatgcaaccagcatggggtctcgggaacagcttgcgattgcagagtttgcaagatcacttcttgttattcccaatacactagcagttaatgctgcccaggactccacagatctggttgcaaaattaagagcttttcataatgaggcccaggttaacccagaacgtaaaaatctaaaatggtaagcatggtttcccgctctttgttaacctctgc

SEQ ID NO: 21309 - DNA, 780 bp, Homo sapiens
  misc_feature 1..780: note = ENST00000539756
  source 1..780: mol_type = unassigned DNA
cgctcgggtacgctccacgccgtcgcagccactgctgtggtcgccggtcggccgaggggccgcgatactggttgcccgcggtgtaagcagaattcgacgtgtatcgctgccgtcaagatggaggggcctttgtccgtgttcggtgaccgcagcactggggaaacgatccgctcccaaaacggcatgcccaagagaatcgtaaatgcaaaaattgcttgccttgacttcagcctgcaaaaaacaaaaatgaagcttggtgtacaggtggtcattacagaccctgaaaaactggaccaaattagacagagagaatcagatatcaccaaggagagaattcagaagatcctggcaactggtgccaatgttattctaaccactggtggaattgatgatatgtgtctgaagtattttgtggaggctggtgctatggcagttagaagagttttaaaaagggaccttaaacgcattgccaaagcttctggagcaactattctgtcaaccctggccaatttggaaggtgaagaaacttttgaagctgcaatgttgggacaggcagaagaagtggtacaggagagaatttgtgatgatgagctgatcttaatcaaaaatactaaggctcgtacgtctgcatcgattatcttacgtggggcaaatgatttcatgtgtgatgagatggagcgctctttacatgatgcactttgtgtagtgaagagagttttggagtcaaaatctgtggttcccggtgggggtgctgtagaagcagccctttccatatacctt

SEQ ID NO: 21310 - DNA, 873 bp, Homo sapiens
  misc_feature 1..873: note = ENST00000536807
  source 1..873: mol_type = unassigned DNA
catggtggtatgtgcctgtagtcccagctactaaggaggctgaggtaggagtattaattgaacccaggagtgccagtccaatgtgggcaacatagcaagaccctgtctcgggagtgggtgcgtgtgtgcgcatgtgttgcgcgcacgcgtgcgtagtagcagcagtatcaattttgtgcaataaaattttgaataaccaattttatgcaaattgatatcaatagagaggagtaatgctgtattgaaattacctgttgccttccctgcttttttagggtgaaaaggtaataaaaagcatgtctaaaagtgatatgaattgcagatagtgataatgttgtaacattttggtgacaagtaatgcttgctgctttaatagattagattactaaaaggaagtcccttgaaattacccttgatttttcacgtgtgtaccctttgtccattccaaacctgttactgtccttaacttttggcgtagaaatggtgatttctttgctaacatggtagtagatgctgtacttgctattaaatacacagacataagaggccagccacgctatccagtcaactctgttaatattttgaaagcccatgggagaagtcaaatggagagtatgctcatcagtggctatgcactcaactgtgtggtgggatcccagggcatgcccaagagaatcgtaaatgcaaaaattgcttgccttgacttcagcctgcaaaaaacaaaaatgaagcttggtgtacaggtggtcattacagaccctgaaaaactggaccaaattagacagagagaatcagatatcaccaaggagagaattcagaagatcctggcaactggtgccaatgttattctaaccactggtggaattgatgata

SEQ ID NO: 21311 - DNA, 918 bp, Homo sapiens
  misc_feature 1..918: note = ENST00000538530
  source 1..918: mol_type = unassigned DNA
gctcgggtacgctccacgccgtcgcagccactgctgtggtcgccggtcggccgaggggccgcgatactggttgcccgcggtgtaagcagaattcgacgtgtatcgctgccgtcaagatggaggggcctttgtccgtgttcggtgaccgcagcactggggaaacgatccgctcccaaaacgttatggctgcagcttcgattgccaatattgtaaaaagttctcttggtccagttggcttggataaaatgttggtggatgatattggttggttcatattttttcctgcgaatttcttaggatgtaaccattactaacgatggtgcaaccatcctgaagttactggaggtagaacatcctgcagctaaagttctttgtgagctggctgatctgcaagacaaagaagttggagatggaactacttcagtgaccagtgaatgttttctcaacaggttattattgcagcagaactcctaaaaaatgcagatgaattagtcaaacagaaaattcatcccacatcagttattagtggctatcgacttgcttgcaaggaagcagtgcgttatatcaatgaaaacctaattgttaacacagatgaactgggaagagattgcctgattaatgctgctaagacatccatgtcttccaaaatcattggaataaatggtgatttctttgctaacatggtagtagatgctgtacttgctattaaatacacagacataagaggccagccacgctatccagtcaactctgttaatattttgaaagcccatgggagaagtcaaatggagagtatgctcatcagtggctatgcactcaactgtgtggtgggatcccagggcatgcccaagagaatcgtaaatgcaaaaattgcttgccttgacttcagcctgcaaaaaacaaaaatgaagcttggtg

SEQ ID NO: 21312 - DNA, 561 bp, Homo sapiens
  misc_feature 1..561: note = ENST00000543532
  source 1..561: mol_type = unassigned DNA
tttttccttcccgccgtgccccgcggccgggccggggcagccgggaagcgggtggggtggtgtgttacccagtagctcctgggacatcgctcgggtacgctccacgccgtcgcagccactgctgtggtcgccggtcggccgaggggccgcgatactggttgcccgcggtgtaagcagaattcgacgtgtatcgctgccgtcaagatggaggggcctttgtccgtgttcggtgaccgcagcactggggaaacgatccgctcccaaaacgttatggctgcagcttcgattgccaatattgtaaaaagttctcttggtccagttggcttggataaaatgttggtggatgatattggtgatgtaaccattactaacgatggtgcaaccatcctgaagttactggaggtagaacatcctgcagctaaagttctttgtgagctggctgatctgcaagacaaagaagttggagatggaactacttcagtggcatgcccaagagaatcgtaaatgcaaaaattgcttgccttgacttcagcctgcaaaaaacaaaaatgaagcttggtg

SEQ ID NO: 21313 - DNA, 658 bp, Homo sapiens
  misc_feature 1..658: note = ENST00000467544
  source 1..658: mol_type = unassigned DNA
tttttgatgtaatagttgtaaactgtgttgtcttaacgttttgattaataactaaattttaatttgaaaaccttcaatttaaatgttttagcatttaagtagtaatatttgaagttaaaaacttggaccagtatcttttttctcatttgactaccacattttctcctaataatagattttagtggctatgcttatgggatagattaaacttgccatgatctgaagagggagggttttttcatgtcctcctcctatatgaaatggctgaacggatattattacttacgacattttggctctgtgttaagcatgatgaatgcaaagagtttgagtagtgactttataagcgtttttctcccccacacttttaaacagggaagcagtgcgttatatcaatgaaaacctaattgttaacacagatgaactgggaagagattgcctgattaatgctgctaagacatccatgtcttccaaaatcattggaataaatggtgatttctttgctaacatggtagtagatgctgtacttgctattaaatacacagacataagaggccagccacgctatccagtcaactctgttaatattttgaaagcccatgggagaagtcaaatggagagtatgctcatcagtggctatgcactcaactgtgtggtg

SEQ ID NO: 21314 - DNA, 557 bp, Homo sapiens
  misc_feature 1..557: note = ENST00000538128
  source 1..557: mol_type = unassigned DNA
tttttccttcccgccgtgccccgcggccgggccggggcagccgggaagcgggtggggtggtgtgttacccagtagctcctgggacatcgctcgggtacgctccacgccgtcgcagccactgctgtggtcgccggtcggccgaggggccgcgatactggttgcccgcggtgtaagcagaattcgacgtgtatcgctgccgtcaagatggaggggcctttgtccgtgttcggtgaccgcagcactggggaaacgatccgctcccaaaacggatgtaaccattactaacgatggtgcaaccatcctgaagttactggaggtagaacatcctgcagctaaagttctttgtgagctggctgatctgcaagacaaagaagttggagatggaactacttcagtgggaagcagtgcgttatatcaatgaaaacctaattgttaacacagatgaactgggaagagattgcctgattaatgctgctaagacatccatgtcttccaaaatcattggaataaatggtgatttctttgctaacatggtagtagatgctgtacttgctatt

SEQ ID NO: 21315 - DNA, 561 bp, Homo sapiens
  misc_feature 1..561: note = ENST00000543517
  source 1..561: mol_type = unassigned DNA
agtagctcctgggacatcgctcgggtacgctccacgccgtcgcagccactgctgtggtcgccggtcggccgaggggccgcgatactggttgcccgcggtgtaagcagaattcgacgtgtatcgctgccgtcaagatggaggggcctttgtccgtgttcggtgaccgcagcactggggaaacgatccgctcccaaaacgttatggctgcagcttcgattgccaatattgtaaaaagttctcttggtccagttggcttggataaaatgttggtggatgatattggtgatgtaaccattactaacgatggtgcaaccatcctgaagttactggaggtagaacatcctgcagctaaagttctttgtgagctggctgatctgcaagacaaagaagttggagatggaactacttcagtgggaagcagtgcgttatatcaatgaaaacctaattgttaacacagatgaactgggaagagattgcctgattaatgctgctaagacatccatgtcttccaaaatcattggaataaatggtgatttctttgctaacatggtagtagatgct

SEQ ID NO: 21316 - DNA, 706 bp, Homo sapiens
  misc_feature 1..706: note = ENST00000539948
  source 1..706: mol_type = unassigned DNA
tttgtttttattttttgtagaaatgggtttcgctatgttgcccaaaggggtctcaaactcctggcatcaagcgatcctcctgcctcggcctcgcagtgttgggattacacctgtgagccacagtgtctggccccatttacactcttagtaggtggtttttaaataattaacacagatttgtagatttgggaaatacgggggctgttggatgtcatttacctttaggctgaaattactgtctttcagagttgtggcttatcctcatttcttttttatttttaattgattgtctacagttatggctgcagcttcgattgccaatattgtaaaaagttctcttggtccagttggcttggataaaatgttggtggatgatattggtgatgtaaccattactaacgatggtgcaaccatcctgaagttactggaggtagaacatcctgcagctaaagttctttgtgagctggctgatctgcaagacaaagaagttggagatggaactacttcagtggttattattgcagcagaactcctaaaaaatgcagatgaattagtcaaacagaaaattcatcccacatcagttattagtggctatcgacttgcttgcaaggaagcagtgcgttatatcaatgaaaacctaattgttaacacagatgaactgggaagagattgcctgattaatgctgctaagacatccatgtcttcc

SEQ ID NO: 21317 - DNA, 709 bp, Homo sapiens
  misc_feature 1..709: note = ENST00000545764
  source 1..709: mol_type = unassigned DNA
attaacacagatttgtagatttgggaaatacgggggctgttggatgtcatttacctttaggctgaaattactgtctttcagagttgtggcttatcctcatttcttttttatttttaattgattgtctacagttatggctgcagcttcgattgccaatattgtaaaaagttctcttggtccagttggcttggataaaatgttggtggatgatattggtgtaagtacacataactgttgtgttagtttccttaaagtaaaactatcttcagtgttttgctatgttctttctttgactttatcagaatccacgtactggaaggtgatattaaaggtgaacgtgtattataatggggctgtgttgatttctataagtggttcatattttttcctgcgaatttcttaggatgtaaccattactaacgatggtgcaaccatcctgaagttactggaggtagaacatcctgcagctaaagttctttgtgagctggctgatctgcaagacaaagaagttggagatggaactacttcagtggttattattgcagcagaactcctaaaaaatgcagatgaattagtcaaacagaaaattcatcccacatcagttattagtggctatcgacttgcttgcaaggaagcagtgcgttatatcaatgaaaacctaattgttaacacagatgaactgggaagagattgcctgattaatgctgct

SEQ ID NO: 21318 - DNA, 691 bp, Homo sapiens
  misc_feature 1..691: note = ENST00000537390
  source 1..691: mol_type = unassigned DNA
tttttccttcccgccgtgccccgcggccgggccggggcagccgggaagcgggtggggtggtgtgttacccagtagctcctgggacatcgctcgggtacgctccacgccgtcgcagccactgctgtggtcgccggtcggccgaggggccgcgatactggttgcccgcggtgtaagcagaattcgacgtgtatcgctgccgtcaagatggaggggcctttgtccgtgttcggtgaccgcagcactggggaaacgatccgctcccaaaacgataaagagagttttaatgagcaaaaaacttgcagaatctgaaggaaaaggctggtatagctgtacgaagtggcagagcatgaaattgttatggctgcagcttcgattgccaatattgtaaaaagttctcttggtccagttggcttggataaaatgttggtggatgatattggtgatgtaaccattactaacgatggtgcaaccatcctgaagttactggaggtagaacatcctgcagctaaagttctttgtgagctggctgatctgcaagacaaagaagttggagatggaactacttcagtggttattattgcagcagaactcctaaaaaatgcagatgaattagtcaaacagaaaattcatcccacatcagttattagtggctatcgacttgcttgcaaggaagcagtgcgttatatcaatg

SEQ ID NO: 21319 - DNA, 535 bp, Homo sapiens
  misc_feature 1..535: note = ENST00000536394
  source 1..535: mol_type = unassigned DNA
actcgagtgcattgaccccaggagacggcagcgctaacttagcagagcgtttgctgtcaggcctttggatacctacagagcttactgtttcttgatagattcctaatttttttcgtaaacaaatctgaaagtcaccaccttccccgttgactaccgatttctctcctcacagataaagagagttttaatgagcaaaaaacttgcagaatctgaaggaaaaggctggtatagctgtacgaagtggcagagcatgaaattgttatggctgcagcttcgattgccaatattgtaaaaagttctcttggtccagttggcttggataaaatgttggtggatgatattggtgatgtaaccattactaacgatggtgcaaccatcctgaagttactggaggtagaacatcctgcagctaaagttctttgtgagctggctgatctgcaagacaaagaagttggagatggaactacttcagtggttattattgcagcagaactcctaaaaaatgcagatgaattagtcaaacagaaaattcatc

SEQ ID NO: 21320 - DNA, 572 bp, Homo sapiens
  misc_feature 1..572: note = ENST00000536607
  source 1..572: mol_type = unassigned DNA
acgctccacgccgtcgcagccactgctgtggtcgccggtcggccgaggggccgcgatactggttgcccgcggtgtaagcagaattcgacgtgtatcgctgccgtcaagatggaggggcctttgtccgtgttcggtgaccgcagcactggggaaacgatccgctcccaaaacgttatggctgcagcttcgattgccaatattgtaaaaagttctcttggtccagttggcttggataaaatgttggtggatgatattggtgtaagtacacataactgttgtgttagtttccttaaagtaaaactatcttcagtgttttgctatgttctttctttgactttatcagaatccacgtactggaaggtgatattaaaggtgaacgtgtattataatggggctgtgttgatttctataagtggttcatattttttcctgcgaatttcttaggatgtaaccattactaacgatggtgcaaccatcctgaagttactggaggtagaacatcctgcagctaaagttctttgtgagctggctgatctgcaagacaaagaagttggagatggaactacttcagt

SEQ ID NO: 21321 - DNA, 1135 bp, Homo sapiens
  misc_feature 1..1135: note = ENST00000546023
  source 1..1135: mol_type = unassigned DNA
ctttttccttcccgccgtgccccgcggccgggccggggcagccgggaagcgggtggggtggtgtgttacccagtagctcctgggacatcgctcgggtacgctccacgccgtcgcagccactgctgtggtcgccggtcggccgaggggccgcgatactggttgcccgcggtgtaagcagaattcgacgtgtatcgctgccgtcaagatggaggggcctttgtccgtgttcggtgaccgcagcactggggaaacgatccgctcccaaaacgaaagggcctcggggccccgcagccggacccagcccacccgccgttctctggggcagggcgctgtggccccacttttcccacagcgaggaggagccccgccgcgcgcggcagggttttgagaccggcaacgcgtggatgtggtgtccggggcggcgttggaaacgcgccctccgcgggaaagcgggcctcccgggctcgcacgtgcgggccacgcctcgcacccccttttgtttcagggcgaccccctgagtgtccatgttaaacgccaggttttattttaggaccatttaccagaaaaagagtaggtccatccgcgcgccctcggatgagcccggtgccctgtccgcccgcagctgcagtcgaggtcgggcgtccggcgtccagccgtatccgggttgacagcttcttacagtagagttagcccaggaaacgccactcgagtgcattgaccccaggagacggcagcgctaacttagcagagcgtttgctgtcaggcctttggatacctacagagcttactgtttcttgatagattcctaatttttttcgtaaacaaatctgaaagtcaccaccttccccgttgactaccgatttctctcctcacagataaagagagttttaatgagcaaaaaacttgcagaatctgaaggaaaaggctggtatagctgtacgaagtggcagagcatgaaattggtggttattactttttttttttttccccgccatcagattccaccccgcatcaaagctgtgccaaataggctcgctttgtttagggacagggtcccacctgtcgcccagacgagagtgccatcatagctcactgcattctccaagcacaggtccgcgccgccgcatccggcttt

SEQ ID NO: 21322 - DNA, 153 bp, Homo sapiens
  misc_feature 1..153: note = ENST00000553143
  source 1..153: mol_type = unassigned DNA
acgcacgccaagtcttcagagggcctggatgggtgtgactccaaggagctaatcgtcccgtgcaggtgctacctttttacccacacttaagtgacgcaaaatgcccttcaatggcgagaagcagtgtgtgggagaggaccagccaagcgattc

SEQ ID NO: 21323 - DNA, 1788 bp, Homo sapiens
  misc_feature 1..1788: note = ENST00000547153
  source 1..1788: mol_type = unassigned DNA
gggacactggggctgggggggtttgttgggctggtgagttttcgaggtgactgtgctgtgctcggtgaggggacgcccagagagccctgacccggggtcactccgtcgccgttctcctcttgtctacgtgctggacccggtgctacctttttacccacacttaagtgacgcaaaatgcccttcaatggcgagaagcagtgtgtgggagaggaccagccaagcgattctgattcttcccggttttccgaaagcatggcttcgctcagtgactatgaatgctccaggcagagctttgcaagtgactcctccagcaaatccagctctcctgcttcaacaagccctccaagggttgtaacatttgatgaagtgatggctacagcaaggaacttatcaaacttgactcttgctcatgagattgctgtaaatgagaactttcaattgaaacaagaggctctcccagaaaagagtttggctggtcgagtgaagcacattgttcaccaggccttctgggacgtcttggattcagaactaaatgctgaccctcctgagtttgaacatgccatcaaactgtttgaagaaatcagagagattcttctctcttttctcactcccggtggcaaccggcttcgcaaccaaatctgtgaagttttggacacagacctcattaggcagcaggctgagcacagtgctgttgacatccaaggcctggccaactatgtcatcagtacgatgggaaagctgtgtgctcccgtgcgagataatgatatcagagagttaaaggctactggcaacatcgtggaggtgctgagacaaatattccatgtcctggacctcatgcaaatggacatggccaattttacaattatgagtctcagaccgcaccttcaacgccagttggtggaatatgagagaaccaagttccaggaaattttggaagaaactccaagaaaagccgaggttgcaggtgcctcatgaggctgaccttgcttttggaaccagagagagcagtcaccgtgccagcctgtgagagtgaagtctctgccgatccctaagagaagagccaacgtttcactctaaacgcatgctccttctgctttaccggtcattctcaagtctgactacaaattagaatcatctggggcgtttaaacacagaggcctgagccctgcctcagacagaataaatcaaagtctccaggagctgtgcccatgaactctttttttcctttttaaagctccccaggtgattctaaagtcagccaggattgagaaccactatgccacactgttgcttttgttcaaggtaactaaatgggctcttaaatgtgtcagctgtaaatgattaaacttgcagtataaatgcttattactgccacattgtaattatattcacgatgatttccactcgcgctctctcagttggatgtcttttaaatgaaagactgcaagtcttttacatctttataaaacagaactagcaaaccaaaaacaacatttgccaactgaggagaaacaagagttgtgaaattctgggggtggtgttgctttagtgtggcaaacagaactactcataaattatccctgctcaagtgctgggtccaagaagaatttcagtctctctctactctgcacctgtgttcaggctgtatttcttggcaattgtcaccttataaattctaccaaatgtataattgtataagaactgtggtataaaaagcaatttgtttctagtgggaaaccttagaactgggcctaaagcaaaataaagtgaattttgtcctaaggcaga

SEQ ID NO: 21324 - DNA, 2219 bp, Homo sapiens
  misc_feature 1..2219: note = ENST00000299045
  source 1..2219: mol_type = unassigned DNA
gggacactggggctgggggggtttgttgggctggtgagttttcgaggtgactgtgctgtgctcggtgaggggacgcccagagagccctgacccggggtcactccgtcgccgttctcctcttgtctacgtgctggacccggtgctacctttttacccacacttaagtgacgcaaaatgcccttcaatggcgagaagcagtgtgtgggagaggaccagccaagcgattctgattcttcccggttttccgaaagcatggcttcgctcagtgactatgaatgctccaggcagagctttgcaagtgactcctccagcaaatccagctctcctgcttcaacaagccctccaagggttgtaacatttgatgaagtgatggctacagcaaggaacttatcaaacttgactcttgctcatgagattgctgtaaatgagaactttcaattgaaacaagaggctctcccagaaaagagtttggctggtcgagtgaagcacattgttcaccaggccttctgggacgtcttggattcagaactaaatgctgaccctcctgagtttgaacatgccatcaaactgtttgaagaaatcagagagattcttctctcttttctcactcccggtggcaaccggcttcgcaaccaaatctgtgaagttttggacacagacctcattaggcagcaggctgagcacagtgctgttgacatccaaggcctggccaactatgtcatcagtacgatgggaaagctgtgtgctcccgtgcgagataatgatatcagagagttaaaggctactggcaacatcgtggaggtgctgagacaaatattccatgtcctggacctcatgcaaatggacatggccaattttacaattatgagtctcagaccgcaccttcaacgccagttggtggaatatgagagaaccaagttccaggaaattttggaagaaactccaagtgctcttgatcagactacagaatggataaaagaatctgtaaatgaagaattattttctctttctgagagtgctttaactcctggggccgaaaatacctccaagccaagcctgagccctactttggtgctaaataatagttacttgaaactgttacagtgggattatcagaaaaaagaattaccagagacacttatgacagatggagcacgtcttcaggaactaacagaaaagctgaatcaattgaaaattattgcctgcctgtccctaattaccaacaacatggtgggtgctattacaggaggcctgcctgagcttgcaagcaggttaacaaggatttcagctgttctacttgaaggcatgaacaaagagacctttaacttgaaggaagtcctgaattctattggtattcagacttgtgttgaggttaacaagaccctgatggaaagaggtttacccactttaaatgctgagattcaagctaatcttataggtcaattttcaagcattgaagaggaggacaatcctatctggtccttgattgataaacgaattaagctttacatgagaaggctactttgtcttccaagccctcaaaaatgcatgcctcctatgccaggaggcctagctgtcattcagcaggagctagaagccctaggctctcaatatgcaaacattgtgaatctcaacaaacaagtgtatggaccattttatgcaaatatacttcgaaagctgctcttcaatgaggaagccatggggaaggtagatgcttcacctcctactaactaaagaagaactgacattggacgagagattggaaatccagtactttggtatccagtccacttccattgatggcattagagatccagcacattctcagtactgtggtgcagtattagcccaaatctgtgtaatgggtaatattagcattacagaagacacacacatcacatagaccctcagaagacgtaaacatcacatagaccctatttgtgcatcattttcaagtttaaaacaaatatttgtaatgaacagaaaacaatttgtaattaattatattacctatataatacttgtaaatgttttcttaaccatttatatttggcttatgacatttaacccctaaggagttgtttttctcacttgttattatcaaacctaatggtttttaattttggtacaactccttaaagggttgaaggttgtgacaataactgagggaactgatgttctgaataaatgatgtgaagtaaacacaattgtatttgaaa

SEQ ID NO: 21325 - DNA, 3198 bp, Homo sapiens
  misc_feature 1..3198: note = ENST00000546625
  source 1..3198: mol_type = unassigned DNA
ggggggtttgttgggctggtgagttttcgaggtgactgtgctgtgctcggtgaggggacgcccagagagccctgacccggggtcactccgtcgccgttctcctcttgtctacgtgctggacccggtgctacctttttacccacacttaagtgacgcaaaatgcccttcaatggcgagaagcagtgtgtgggagaggaccagccaagcgattctgattcttcccggttttccgaaagcatggcttcgctcagtgactatgaatgctccaggcagagctttgcaagtgactcctccagcaaatccagctctcctgcttcaacaagccctccaagggttgtaacatttgatgaagtgatggctacagcaaggaacttatcaaacttgactcttgctcatgagattgctgtaaatgagaactttcaattgaaacaagaggctctcccagaaaagagtttggctggtcgagtgaagcacattgttcaccaggccttctgggacgtcttggattcagaactaaatgctgaccctcctgagtttgaacatgccatcaaactgtttgaagaaatcagagagattcttctctcttttctcactcccggtggcaaccggcttcgcaaccaaatctgtgaagttttggacacagacctcattaggcagcaggctgagcacagtgctgttgacatccaaggcctggccaactatgtcatcagtacgatgggaaagctgtgtgctcccgtgcgagataatgatatcagagagttaaaggctactggcaacatcgtggaggtgctgagacaaatattccatgtcctggacctcatgcaaatggacatggccaattttacaattatgagtctcagaccgcaccttcaacgccagttggtggaatatgagagaaccaagttccaggaaattttggaagaaactccaagtgagtataatataatgtgtatttatattgaaattaggttaaaatgatgattttaaatgttaaaatttaaattaaattaaattaaattaaattaaattaataaataaataaaatttaatttaatttaaattaattaaaatttaaaatgttaaaggttaaaatgaaaattaggtgatgttttcatttttgacttcatatatagtatcactaaagaattttggcctttctattaaacatttttttaccttccaaaattgacatcacaaacttacagttgtttattctgtccaggaactgtgctaagcactattcgtttcttcattcattcaagatatatttattgagtgcctcctgtgtttcagacactgcttaggtgcagtggatactgcagcgaacagaatggaatacagttgccgtccccaaggagctgacattctagtaggcatgacaaataaataaacatatattgtcaggtgtattattaagtgctatgaagaaaaataggataaagggacagtaatgggtcagaagtgaggacagcattgttttttagatgtgatggactgggaaggtctctgtaagtaacatttgagtaaagtttgcaaagaaatgaggaaggggcatgtaaagatggggaaaagaacgttctagcctgagggactgcaggtacaaaggcactgaagcagaaactgcttatgagtttgacaaacacagggcagacattgtgacgggagtagagttggtaaggggagagtggtaagagatgaggctgaaaaggagataaaggcaggtcacatagagcattgttagtaaatgagaggagtttggatttcattccatgtgcggtggaaactcatcagagagttttaatcaggggagcaacatctgattttcatttttgaagaatattcttgttcctggctacagaataggtcatgtgggaacaaagagggaaacagaggtaccaattaggtggtattacagttgctcaggcaagaaatgatggtggcttgttccagatggtaatggtggaaggagtgagaagagaccagattctggatacattttgaaagtggagtaatcagatttgctgaagattggataagggagaaaagagttgagggtgactctaaggtttttggcctcgtacaaccgggtgaatggtcatacagtttgagtgaaactggtgagaccaggagaaagaaggttgggagatgacatggaatcaagagttcagtttggtgatgtaaacttttgagatttcatttgacatcaatgtggagatgttaggtaggcatttagatatgaattatgagtttacaggaataatggaaactgtatatgtatttgggaatcatcagtatatgtatgatatataaagccatggaactgggtactagttaacacttagaaaatccttatcacactctaagtactttacctgtacaaactaatttaatccttgcaacaactatatgaagttaccccccattttatgggtgcggaaactgaggcactgtgaggttaagtcactggcctatgtaacacacttaaaagtataggagctcacctaggaaggcagcttggctccatagtccatgttcctgtccattatattacactgggtgagactacctagggggagtgagtgtggactctgaaagaaactgacgtggggcactccagcagctagaagctgaagttgagatgaggaggagggtctaacaatggagactatgagggagtagccagagaggtagtgtgacagtcaggagaggcgggtgtcctgtaagatacgtgaagaaggtatttggagaaggaaggcatgtttggatttgacaagcattgctaagtggtcaagaaagacacaggccaacttgaccattggatttgactgtttgatgatggtcagtaaccttgatgagagtggtttcagtggatttgtgtgcattaaagccagactgggcagggcacagtggctcacacctgtaatcctagcactttgggaggccgaggcaggcacatcacctgagatcaggagttcaagaccagcctggccaacatgctgaaaccccttctctactaaaatctaaaaattagccgggatgatggcaggtgcctgtaatcccagctgctcgggaggttgagatgggagaatcgcttgaacccaggagatggtggttgcagtgagccaaggtcgcatcattgcactccagcctggggggctgagcaagactccgtctcggaaaaaaaaaaaaaaaaaaaaa

SEQ ID NO: 21326 - DNA, 985 bp, Homo sapiens
  misc_feature 1..985: note = ENST00000553098
  source 1..985: mol_type = unassigned DNA
ctggtgagttttcgaggtgactgtgctgtgctcggtgaggggacgcccagagagccctgacccggggtcactccgtcgccgttctcctcttgtctacgtgctggacccgggatttcatgcatcaccctgacagccagtggaagttgcctgatttgaagaggcccagggccgaagatacccagtcatgtgtggaagcagcttcaatgccattttgtgagaggttgagggccccagagggggaagcacaggtgctacctttttacccacacttaagtgacgcaaaatgcccttcaatggcgagaagcagtgtgtgggagaggaccagccaagcgattctgattcttcccggttttccgaaagcatggcttcgctcagtgactatgaatgctccaggcagagctttgcaagtgactcctccagcaaatccagctctcctgcttcaacaagccctccaagggttgtaacatttgatgaagtgatggctacagcaaggaacttatcaaacttgactcttgctcatgagattgctgtaaatgagaactttcaattgaaacaagaggctctcccagaaaagagtttggctggtcgagtgaagcacattgttcaccaggccttctgggacgtcttggattcagaactaaatgctgaccctcctgagtttgaacatgccatcaaactgtttgaagaaatcagagagattcttctctcttttctcactcccggtggcaaccggcttcgcaaccaaatctgtgaagttttggacacagacctcattaggcagcaggctgagcacagtgctgttgacatccaaggcctggccaactatgtcatcagtacgatgggaaagctgtgtgctcccgtgcgagataatgatatcagagagttaaaggctactggcaacatcgtggaggtgctgagacaaatattccatgtcctggacctcatgcaaatggacatggccaattttacaattatgagtctcaga

SEQ ID NO: 21327 - DNA, 534 bp, Homo sapiens
  misc_feature 1..534: note = ENST00000549906
  source 1..534: mol_type = unassigned DNA
ctgtgctgtgctcggtgaggggacgcccagagagccctgacccggggtcactccgtcgccgttctcctcttgtctacgtgctggacccggtgctacctttttacccacacttaagtgacgcaaaatgcccttcaatggcgagaagcagtgtgtgggagaggaccagccaagcgattctgattcttcccggttttccgaaagcatggcttcgctcagtgactatgaatgctccaggcagagctttgcaagtgactcctccagcaaatccagctctcctgctttgctttatgaacatcttactgcatgaagcctttctggaaagacttttggatatcactggattattggaccaaagtatatagacatttttaaggagaatcttgagtcagacctggcaaaagaaattaacagcagccaccccagcaacaagccctccaagggttgtaacatttgatgaagtgatggctacagcaaggaacttatcaaacttgactcttgctcatgagattgctgtaaatgagaactttcaattga

SEQ ID NO: 21328 - DNA, 625 bp, Homo sapiens
  misc_feature 1..625: note = ENST00000551802
  source 1..625: mol_type = unassigned DNA
aaggcggggtcaggggccatcaagctcggctcctagttcatgtcttcccactccgcgtccccttgtttgacctcgaactgccgtcccgcgtgggagcggggagcggggcaccgagtggccgccccgcgtgtcggggtggacacggacttcgggcctcggaggccgcttcgccgctgtttaaatcctgctggacaggtgctacctttttacccacacttaagtgacgcaaaatgcccttcaatggcgagaagcagtgtgtgggagaggaccagccaagcgattctgattcttcccggttttccgaaagcatggcttcgctcagtgactatgaatgctccaggcagagctttgcaagtgactcctccagcaaatccagctctcctgcttcaacaagccctccaagggttgtaacatttgatgaagtgatggctacagcaaggaacttatcaaacttgactcttgctcatgagattgctgtaaatgagaactttcaattgaaacaagaggctctcccagaaaagagtttggctggtcgagtgaagcacattgttcaccaggccttctgggacgtcttggattcagaactaaatgctgaccctcctgagtttgaacatgccatcaaact

SEQ ID NO: 21329 - DNA, 1067 bp, Homo sapiens
  misc_feature 1..1067: note = ENST00000548428
  source 1..1067: mol_type = unassigned DNA
gggtgaggtcgtgcagactgctgctgcgtccccttgccgggacctttggttaaggggaagaggtggagaaaagccgattgggcctgggctcgaacgctgaaccctcaggtgttgcttgtgcttcccaaagctgctactgtaggtggcaccactgggggtaatagcaatgatttgaggtggcatatggatgaacatagttacttgttttcgttactattaagaaaatctgttccattaagtaagcagtttcacaatgatagagtttccttttaaaataaatatatttaaatgcaaaaatctagtcaagatagagacgcggttactaaattatagtaaaggtaaggagggagacgtagaaatagtcatgaagagtggcactcaaacgacttaagtttgggaaatcttagatggttgtcctgctaccttaactgtgaagaaactggacaagttgtccttgtccccagtgggtgtctcagcacccatggtcaccagcccagtcagggactttgctcttcttacctgccaacggataatgagttaatctcagtggttcccacttgaggaggctccctgccgtggtccttttcctctcttctctagggatttcatgcatcaccctgacagccagtggaagttgcctgatttgaagaggcccagggccgaagatacccagtcatgtgtggaagcagcttcaatgccattttgtgagaggttgagggccccagagggggaagcacaggtgctacctttttacccacacttaagtgacgcaaaatgcccttcaatggcgagaagcagtgtgtgggagaggaccagccaagcgattctgattcttcccggttttccgaaagcatggcttcgctcagtgactatgaatgctccaggcagagctttgcaagtgactcctccagcaaatccagctctcctgcttcaacaagccctccaagggttgtaacatttgatgaagtgatggctacagcaaggaacttatcaaacttgactcttgctcatgagattgctgtaaatgagaactttcaattgaaacaagaggctctcccagaaaagag

SEQ ID NO: 21330 - DNA, 544 bp, Homo sapiens
  misc_feature 1..544: note = ENST00000551228
  source 1..544: mol_type = unassigned DNA
tggcactcaaacgacttaagtttgggaaatcttagatggttgtcctgctaccttaactgtgaagaaactggacaagttgtccttgtccccagtgggtgtctcagcacccatggtcaccagcccagtcagggactttgctcttcttacctgccaacggataatgagttaatctcagtggttcccacttgaggaggctccctgccgtggtccttttcctctcttctctagggatttcatgcatcaccctgacagccagtggaagttgcctgatttgaagaggcccagggccgaagatacccagtcatgtgtggaagcagcttcaatgccattttgtgagaggttgagggccccagagggggaagcacagtgacctgctatcgtgttggaggctttgcttggagtcatcttcagtcttttctgttgactttacctttgaccagtgattaaatcctccaggtgctacctttttacccacacttaagtgacgcaaaatgcccttcaatggcgagaagcagtgtgtgggagaggaccagccaagcgattc

SEQ ID NO: 21331 - DNA, 389 bp, Homo sapiens
  misc_feature 1..389: note = ENST00000552690
  source 1..389: mol_type = unassigned DNA
ctgagcacagtgctgttgacatccaaggcctggccaactatgtcatcagtacgatgggaaagctgtgtgctcccgtgcgagataatgatatcagagagttaaaggctactggcaacatcgtggaggtgctgagacaaatattccatgtcctggacctcatgcaaatggacatggccaattttacaattatgagtctcagaccgcaccttcaacgccagttggtggaatatgagagaaccaagttccaggaaattttggaagaaactccaagaactgtgctaagcactattcgtttcttcattcattcaagatatatttattgagtgcctcctgtgtttcagacactgcttaggtgcagtggatactgcagcgaacagaatggaatacag

SEQ ID NO: 21332 - DNA, 3067 bp, Homo sapiens
  misc_feature 1..3067: note = ENST00000371505
  source 1..3067: mol_type = unassigned DNA
gtgaggcgagcgccggggctcccggagcggatccctacctgtttcaaggacctgccagtctgagaagcttcttgtcataaggccatccaggggccacgcacccctaccttgccagcctccagcatgcaggataccgtaacgacatcagcattgttggaccccagccactcctcagtctccacccaggacaattcctccactggaggacacacttcaagcacaagcccacagctctcaaagccttcaatcacaccagtccctgcaaagtccaggaacccacatcccagggccaatatccgtcggatgcgccggatcattgctgaggatcctgagtggtcactggccatcgtgcccctcctcacagagctctgcattcagcacattatcaggaacttccagaaaaaccctatcctgaagcagatgctcccggaacaccagcagaaggtcctgaaccacctgtcccctgacctaccactggctgtgaccgccaacctgatagacagtgagaactactggctccgctgctgcatgcatcgctggcccgtgtgccacgtggcccaccatggcggcagctggaaacgcatgttcttcgagcggcacctggagaacctgctaaagcactttatcccaggcaccacagaccctgcggtgatcctcgacctgctgccgctctgccggaattacgtgcgcagggtccacgtcgatcagttccttccgccggtgcagctcccggcccagctccggccgggcgaccagtccgactcaggcagcgagggagagatggaggagcccaccgttgaccactaccaactgggcgatctggtagctggcctgagccacctggaggagctggacctggtgtacgatgtcaaggactgcggcatgaatttcgagtggaatctcttcctcttcacctaccgtgactgcctctccttggcagccgccatcaaggcatgccacaccctcaagatcttcaagctgacccgaagcaaggtggatgatgacaaggcacgcatcataattcgaagccttctggaccacccagtcctcgaggagctggacttgtcacaaaacctcattggagaccgtggtgcacgaggtgctgccaagctgctgagccacagccgcctgcgtgtgctcaacctggctaacaaccaggtgcgtgcacccggtgcccagtccctggctcacgctctggcacacaacaccaacctcatttccctcaacctacgtctcaactgcatcgaggatgagggtggccaggctcttgcccatgccttgcagaccaacaagtgcctcaccacgctgcacctcggtggcaatgagctgtctgagcccaccgccacactcctgtcacaggtgctcgccatcaacaccacactcaccagcatcaacctgtcctgcaaccacatcgggctggacggtgggaagcagctcctggaaggcatgtcagacaacaagaccctcctggaatttgacttgcgcctgtcagatgtggcccaggaaagcgagtacctcattggccaggccctctacgcaaaccgagaagcagcccgccagcgggccctgaatcccagccacttcatgtcaaccataactgccaatggccctgagaactctgtgggataaaatgacctgacttggatcatggccccagccccatccctcatttcatacccctgccatgcctgctgcagagtatcacactggttcagagggagcggggagggggactgtgaataaccttggagtgatcaagggttgtatggatggagacatgaggcagggaagggagcctggcatgggggaagaaagggtatgcagtagggacccagcctttgtgcccagggaaaggatattactggacacccacaaatgaccaacttctttcaggaacagggaagtcagagaggtgtctgagggactgtgcctgccagattctcccgttggggctgcctgcctccctgactccccaccattttcttctctaccaaacagatccttgatcttcaaacacacacacacacacacacacacacacacacacacacacacacacaccctctggctacagcagggctatgcctggctctctctgccaccctcatccctgtagatgcatttccctgttgcttgactctgctttaagtgatccagttctacaggccacgccatcccctagttccccaactcccaacctgggaaggggacaatgagctgacaccaggggctcagacccagtggactcctctggggaggcaactgtagatgacaacttccagggaaggatgacacaatccctgccacccaccccagagagcttccctgggagggagggaaagaagtgccacactgggacaggaagtcagtgagtcatccacgactttattatccaccagtttgatttgtacaatctttgcgcttaaatccacgacaaaaaggccacagtgtgatgcacccaattgacagagacctgtcttctccccagccaggcccagcccaccccacaagcccttgtccccaggacacatggagccttccaggtgccctacatgagtcccccatcactctgtagctgtccaccctggggccacacctacaggaatcacatcagcccccagggccacaagagacctagctgactgattcaggctgagcgccattgcccatcctccttgggctgattcattggcccagagcctccagaactgtgtccccaaagggcaggtcatgggctacaaccccagtccaggagtgcctgctctccagggactccttccgctaagcaggcgctgagcagagcaccaaagggggcttgggagtgactgcatgtgtgtgcctgtctaggcaacctagagtctgtctgtgcctgacaccctctgacagttccggagtgcaaacgtgtaggtgtgagggtgtgtgtgtgtgtgtgtgtgtgtatagccacagctgctagcagaagttctaattagagaaacaagaacattcagtgtaaagtttaattttagagattaattaattttctggttttcattttccctggcaatcagtaaagctaccaagaaaa

SEQ ID NO: 21333 - DNA, 616 bp, Homo sapiens
  misc_feature 1..616: note = ENST00000371504
  source 1..616: mol_type = unassigned DNA
cgcatgttcttcgagcggcacctggagaacctgctaaagcactttatcccaggcaccacagaccctgcggtgatcctcgacctgctgccgctctgccggaattacgtgcgcagggtccacgtcgatcagttccttccgccggtgcagctcccggcccagctccggccgggcgaccagtccgactcaggcagcgagggagagatggaggagcccaccgttgaccactaccaactgggcgatctggtagctggcctgagccacctggaggagctggacctggtgtacgatgtcaaggactgcggcatgaatttcgagtggaatctcttcctcttcacctaccgtgactgcctctccttggcagccgccatcaaggcatgccacaccctcaaggacggtgggaagcagctcctggaaggcatgtcagacaacaagaccctcctggaatttgacttgcgcctgtcagatgtggcccaggaaagcgagtacctcattggccaggccctctacgcaaaccgagaagcagcccgccagcgggccctgaatcccagccacttcatgtcaaccataactgccaatggccctgagaactctgtgggataaaatgacctgacttgga

SEQ ID NO: 21334 - DNA, 758 bp, Homo sapiens
  misc_feature 1..758: note = ENST00000525663
  source 1..758: mol_type = unassigned DNA
agagtccagggagagtgcgcgggcggccgccggctgaatgaagcctgggacgcgggagccgcgccgcgcgcagtgtctgcagtgccggaggtctgggaggctccgggcgaagcctccctgctgcaggttatgatgatgtcagacaatgctaaaggcagagcagctcattcatggaagaaaagagggagtatttcttctctaagtaatcatgaattttggcgaaaggaaattcatgggcgcatcaaagattctatgagtactgtgtcttatatggaagaacccagtcagcgtgatgatatctctcgccttacagttcagatggaaaacacctatcagttgggtgtgttcttttatctctcactcctattttaaacttctaaattggtgactgattctcttaaaaatgatatttgataacctggcattgtcttcaattctagcacaatataagggactttaatgaattgagtgatttgatgttgctttagtttcttcctcagcaaaaaggtaacaacacttgctgtcttacttttctttactaatgtttcccaaatgccaaacaattcactgggtggcactgatgcatacagtatactactgacttaacaaattcactgagtatttctgggtacatagatatgacttaaatgaaagagataagtattgatattttatccaacaaaaccaatcagtgttgttaggtgaaggaaaaaaaaaaactcaaagcaaaggcaaatgactcatagtcccctgttgac

SEQ ID NO: 21335 - DNA, 2001 bp, Homo sapiens
  misc_feature 1..2001: note = ENST00000282670
  source 1..2001: mol_type = unassigned DNA
gagtccagggagagtgcgcgggcggccgccggctgaatgaagcctgggacgcgggagccgcgccgcgcgcagtgtctgcagtgccggaggtctgggaggctccgggcgaagcctccctgctgcaggttatgatgatgtcagacaatgctaaaggcagagcagctcattcatggaagaaaagagggagtatttcttctctaagtaatcatgaattttggcgaaaggaaattcatgggcgcatcaaagattctatgagtactgtgtcttatatggaagaacccagtcagcgtgatgatatctctcgccttacagttcagatggaaaacacctatcagttgggtcctcccaaacattttcctgtggtcaccgtcaatcatattttgaaagatgtagtaaccagctatctacaagtagaagaatatgaaccagagctctgtagacagatgactaaaaccatttctgaggttattaaagcccaggtcaaggacttgatgattccacggtataaactaattgtgattgttcacattggacaactgaacaggcagagcatacttattggaagcagatgcctctgggatcctaaaagtgataccttttcatcttatgttttcagaaattcttctctcttcgctcttgcaaatgtctatgcagtttaccttgagtgattgaaaataagaaatctagctcttacttttgaaaattctgaggcaggctgtatgtctgtacacaaaagttttactgccaaaaactttgagaaagaaacaacactgatatttcaagcaactggaagcttttgaattttttcatattctagtaaagatttggggaggggagggtagccacagaaagaatcttgtttatctaaagcaggaacttgatcttggttttgctggattgctttccatagacatagattcttattaaatatttgttttggtactaattattttaattattctttaattagagtgttacaatttcctgcattgttttttaataaaaagaagctttagaaaaactatggctatataccctgaccaataaatgatagtagaatattcaacatggtatacacaaatgataaataatgtgcctcagtgctgcatataaaagaatactggttttcattttgtacttaataaattgagcagcattcattaagtgcaattattgttacatgtacctgacagttgaaactgctgaggtagaattaatggcttcataacaattatcgtggtcccacgggctgcaagctaaaactagaagctcttgtggcttgcctgcactttacacaattgtgggagaaccgaaagttggctcttcagtaatggaaactataaagtgaataaaggctttttgggacactgaagtagacattgtgatattaaatatacatgatgcttaatactaaatgtgtctgtaacacataaaatcatttattggaaagagacattgcttttaaatatcctaggctaacaaactttttcacaaaatatatggctggcaccttaacaaataaagcatgtgtagttaccattttactcctatgaatttaatactaaagtgacccagtgaggtttttgaatagacgggtgctaaaatttacagggctgaaatagcttattattctgctggttaatgtatcttacgccacggatcatttatttttatgaagctttcaagtctttgtgtgcaagtaaaatgatgttgtggcgttgttcttggatggtaagtggactgcctagaggacatttgttaaaggtcaaagacaaattgtacacatatggagaaaattagcaatgctgtagtcttaaggaaaaaatgatttatcattcatatcaaaaagagtttagcaaatggaaaaccagttaatgctttaattttaaaatgttttggtgtcttacttttccctaaaaatgacatgtagtaaaaaatggatacttttaaaatcccttcccttctgctattttctggcttttaaagtgattattcaaaatg

SEQ ID NO: 21336 - DNA, 1010 bp, Homo sapiens
  misc_feature 1..1010: note = ENST00000528352
  source 1..1010: mol_type = unassigned DNA
aatgaagcctgggacgcgggagccgcgccgcgcgcagtgtctgcagtgccggaggtctgggaggctccgggcgaagcctccctgctgcaggttatgatgatgtcagacaatgctaaaggcagagcagctcattcatggaagaaaagagggagtatttcttctctaagtaatcatgaattttggcgaaaggaaattcatgggcgcatcaaagattctatgagtactgtgtcttatatggaagaacccagtcagcgtgatgatatctctcgccttacagttcagatggaaaacacctatcagttggcacaatataagggactttaatgaattgagtgatttgatgttgctttagtttcttcctcagcaaaaagcattgtattagactctgaggaggataaaatccgagcttgcttaccatttcactggaaacgcaggtcctcccaaacattttcctgtggtcaccgtcaatcatattttgaaagatgtagtaaccagctatctacaagtagaagaatatgaaccagagctctgtagacagatgactaaaaccatttctgaggttattaaagcccaggtcaaggacttgatgattccacggtataaactaattgtgattgttcacattggacaactgaacaggcagagcatacttattggaagcagatgcctctgggatcctaaaagtgataccttttcatcttatgttttcagaaattcttctctcttcgctcttgcaaatgtctatgcagtttaccttgagtgattgaaaataagaaatctagctcttacttttgaaaattctgaggcaggctgtatgtctgtacacaaaagttttactgccaaaaactttgagaaagaaacaacactgatatttcaagcaactggaagcttttgaattttttcatattctagtaaagatttggggaggggagggtagccacagaaagaatcttgtttatctaaagcaggaacttgatcttggttttgctggattgctttccatagacata

SEQ ID NO: 21337 - DNA, 492 bp, Homo sapiens
  misc_feature 1..492: note = ENST00000491611
  source 1..492: mol_type = unassigned DNA
tgtctgcagtgccggaggtctgggaggctccgggcgaagcctccctgctgcaggttatgatgatgtcagacaatgctaaaggcagagcagctcattcatggaagaaaagagggagtatttcttctctaagtaatcatgaattttggcgaaaggaaattcatgggcgcatcaaagaccctggaagtctgtggattacacatacaatgccttttacaggtgggaaactgactataaaggagtagcaatcccagcacatgtcagaagtaaagctaatttgagttttgtaccacctcttcttctccatgaatttttaatatggtgttcagtagaaaagaaattgagtttttatgaataccttctgtattatgcaattctatgagtactgtgtcttatatggaagaacccagtcagcgtgatgatatctctcgccttacagttcagatggaaaacacctatcagttgggtgtgttcttttatctctcactcctattt

SEQ ID NO: 21338 - DNA, 360 bp, Homo sapiens
  misc_feature 1..360: note = ENST00000448074
  source 1..360: mol_type = unassigned DNA
ggcacatgttcatgtcatgcaatgacattagtatatgaccaaagtgatgatatggctaatattcctgggatgcaggaggaagaagattcatttgaagcttctcctctgaacgtggatgaaatgtggtcgagaatataagctctagcatcagataaacctgggtgtgcaccccagctctgcctctctgtgtgattctgggcaggttactcaatgtatataaatctctgtttccccacctgccaaatggagataacagtgagattcacctcagagatctattggaagactatataagcattgtattagactctgaggaggataaaatccgagcttgcttaccatttcactggaaacgcaggt

SEQ ID NO: 21339 - DNA, 819 bp, Homo sapiens
  misc_feature 1..819: note = ENST00000489510
  source 1..819: mol_type = unassigned DNA
ttcaatagagtccacccagaagattaaatccctccatgtttccatactcttttgattagcctatggggtgggtgggtgtgatttgaaattactttttagaaataaattttatgtgtattttcaggtcctcccaaacattttcctgtggtcaccgtcaatcatattttgaaagatgtagtaaccagctatctacaagtagaagaatatgaaccagagctctgtagacagatgactaaaaccatttctgaggttattaaagcccaggtcaaggacttgatgattccacggtataaactaattgtgattgttcacattggacaactgaacaggcagagcatacttattggaagcagatgcctctgggatcctaaaagtgataccttttcatcttatgttttcagaaattcttctctcttcgctcttgcaaatgtctatgcagtttaccttgagtgattgaaaataagaaatctagctcttacttttgaaaattctgaggcaggctgtatgtctgtacacaaaagttttactgccaaaaactttgagaaagaaacaacactgatatttcaagcaactggaagcttttgaattttttcatattctagtaaagatttggggaggggagggtagccacagaaagaatcttgtttatctaaagcaggaacttgatcttggttttgctggattgctttccatagacatagattcttattaaatatttgttttggtactaattattttaattattctttaattagagtgttacaatttcctgcattgttttttaataaaaagaagctttagaaaaactatggctatata

SEQ ID NO: 21340 - DNA, 3040 bp, Homo sapiens
  misc_feature 1..3040: note = ENST00000554976
  source 1..3040: mol_type = unassigned DNA
cttaactcgttgagcgcggctggaaatccaagcgcttctaggtgctggttcaatgcctggttcatgatttatttcattctctccctccatcttgcaataggttacttttaatcatttagatctatgacactatgctaaacgttataggagacaaaaagactgtgaacaaacaagaagaaccaaacgaaaagagccaagtccaggattctcgttcagatcagcaagtcattgggatcgagctcctagggcagctactacatctgttatgtcctcaagataatcccagcacctagcactgtgcctggcacaaagtagatcttcaatgaaagaacgaaacgagccgttatatttacacagatgtatttcactcagtcctctggaagagatgcctagtgtgaaagagattccaagaataaataccataaacagcaccgagcccaaatcccacagcaaacatccttattaaaggcaaggaacgtggggcgagttccttttctcagaagattttacgagaacgcaactgttgcgaagaaggaacagacattcgaggttctgagtccaatgggaactcatttaactttttattttgcagcagatttcaaagtctgcacccagcccctcccaggacacaggtctccttgcagctgcctttaacctaagcgtatcctctctccactttaaaccaaacgccgctgcatggagccctgggagcctgagccatgagaatcctgtaaagaggagttggagcacacagctgtattaaaaaggcaaatcgaaggccgggcgcggtgactcacgcctgtcatcctagcactttgggaggccgaggcggctgaatcacttgaggttaggagtttgagatcagcccgggcaacatggtgaaaccccgtctctacaaaaatagaaaaattagccgagcgtgatggtggatgcctgtaatcctagctcctcgggaggctaaggagtataatgtctcaggaaggcgattatgggaggtggaccatatctagtagtgatgaaagtgaggaagaaaagccaaaaccagacaagccatctacctcttctcttctctgtgccaggcaaggagcagcaaatgagcccaggtacacctgttccgaggcccagaaagctgcacacaagaggaaaatatcacctgtgaaattcagcaatacagattcagttttacctcccaaaaggcagaaaagcggttcccaggaggacctcggctggtgtctgtccagcagtgatgatgagctgcaaccagaaatgccgcagaagcaggctgagaaagtggtgatcaaaaaggagaaagacatctctgctcccaatgacggcactgcccaaagaactgaaaatcatggcgctcccgcctgccacaggctcaaagaggaggaagacgagtatgagacatcaggggagggccaggacatttgggacatgctggataaagggaaccccttccagttttacctcactagagtctctggagttaagccaaagtataactctggagccctccacatcaagggacagtcttatgagtagatgttacaatcgtattccttggataaatgatgcatctgcactttagaaaagtgcccaaggtcgtagagctgatattttatctcctttatttgggacgcttgtttcttcagctcagtttaactactgctttgacgtggactggctcgtaaaacagtatccaccagagttcaggaagaagccaatcctgcttgtgcatggtgataagcgagaggctaaggctcacctccatgcccaggccaagccttacgagaacatctctctctgccaggcaaagttggatattgcgtttggaacacaccacacgaaaatgatgctgctgctctatgaagaaggcctccgggttgtcatacacacctccaacctcatccatgctgactggcaccagaaaactcaagggttcgtaggggcctgctcacttcctggcagtgtgtgtgttgataaagaatatggttgagccccttatacccacgaattgctgatggaacccacaaatctggagagtcgccaacacattttaaagctgatctcatcagttacttgatggcttataatgccccttctctcaaggagtggatagatgtcattcacaagcacgatctctctgaaacaaatgtttatcttattggttcaaccccaggacgctttcaaggaagtcaaaaagataattggggacattttagacttaagaagcttctgaaagaccatgcctcatccatgcctaacgcagagtcctggcctgtcgtaggtcagttttcaagcgttggctccttgggagccgatgaatcaaagtggttatgttctgagtttaaagagagcatgctgacactggggaaggaaagcaagactccaggaaaaagctctgttcctctttacttgatctatccttctgtggaaaatgtgcggaccagtttagaaggatatcctgctgggggctctcttccctatagcatccagacagctgaaaaacagaattggctgcattcctattttcacaaatggtcagctgagacttctggccgcagcaatgccatgccacatattaagacatatatgaggccttctccagacttcagtaaaattgcttggttccttgtcacaagcgcaaatctgtccaaggctgcctggggagcattggagaagaatggcacccagctgatgatccgctcctacgagctcggggtccttttcctcccttcagcatttggtctagacagtttcaaagtgaaacagaagttcttcgctggcagccaggagccaatggccacctttcctgtgccatatgatttgcctccagaactgtatggaagtaaagatcggccatggatatggaacattccttatgtcaaagcaccggatacgcatgggaacatgtgggtgccctcctgagaatcttgaggcactgtgaaatttaagtgtaagacattgagccacaaacatggaatctcttctttgtactggatgtccacttcccttaaagtcttatttgcacccttac

SEQ ID NO: 21341 - DNA, 2370 bp, Homo sapiens
  misc_feature 1..2370: note = ENST00000393452
  source 1..2370: mol_type = unassigned DNA
actgcgcgcatgcgcggcggccgccgaaggggcgggatccgaggcaagcgttggttctgtgcgcctcagagttggagcacacagctgtattaaaaaggcaaatcgaaggccgggcgcggtgactcacgcctgtcatcctagcactttgggaggccgaggcggctgaatcacttgaggttaggagtttgagatcagcccgggcaacatggtgaaaccccgtctctacaaaaatagaaaaattagccgagcgtgatggtggatgcctgtaatcctagctcctcgggaggctaaggagtataatgtctcaggaaggcgattatgggaggtggaccatatctagtagtgatgaaagtgaggaagaaaagccaaaaccagacaagccatctacctcttctcttctctgtgccaggcaaggagcagcaaatgagcccaggtacacctgttccgaggcccagaaagctgcacacaagaggaaaatatcacctgtgaaattcagcaatacagattcagttttacctcccaaaaggcagaaaagcggttcccaggaggacctcggctggtgtctgtccagcagtgatgatgagctgcaaccagaaatgccgcagaagcaggctgagaaagtggtgatcaaaaaggagaaagacatctctgctcccaatgacggcactgcccaaagaactgaaaatcatggcgctcccgcctgccacaggctcaaagaggaggaagacgagtatgagacatcaggggagggccaggacatttgggacatgctggataaagggaaccccttccagttttacctcactagagtctctggagttaagccaaagtataactctggagccctccacatcaaggatattttatctcctttatttgggacgcttgtttcttcagctcagtttaactactgctttgacgtggactggctcgtaaaacagtatccaccagagttcaggaagaagccaatcctgcttgtgcatggtgataagcgagaggctaaggctcacctccatgcccaggccaagccttacgagaacatctctctctgccaggcaaagttggatattgcgtttggaacacaccacacgaaaatgatgctgctgctctatgaagaaggcctccgggttgtcatacacacctccaacctcatccatgctgactggcaccagaaaactcaaggaatatggttgagccccttatacccacgaattgctgatggaacccacaaatctggagagtcgccaacacattttaaagctgatctcatcagttacttgatggcttataatgccccttctctcaaggagtggatagatgtcattcacaagcacgatctctctgaaacaaatgtttatcttattggttcaaccccaggacgctttcaaggaagtcaaaaagataattggggacattttagacttaagaagcttctgaaagaccatgcctcatccatgcctaacgcagagtcctggcctgtcgtaggtcagttttcaagcgttggctccttgggagccgatgaatcaaagtggttatgttctgagtttaaagagagcatgctgacactggggaaggaaagcaagactccaggaaaaagctctgttcctctttacttgatctatccttctgtggaaaatgtgcggaccagtttagaaggatatcctgctgggggctctcttccctatagcatccagacagctgaaaaacagaattggctgcattcctattttcacaaatggtcagctgagacttctggccgcagcaatgccatgccacatattaagacatatatgaggccttctccagacttcagtaaaattgcttggttccttgtcacaagcgcaaatctgtccaaggctgcctggggagcattggagaagaatggcacccagctgatgatccgctcctacgagctcggggtccttttcctcccttcagcatttgcccctgcgaagagaataaaggatgaagtggaggcttcgttctctgggtctagacagtttcaaagtgaaacagaagttcttcgctggcagccaggagccaatggccacctttcctgtgccatatgatttgcctccagaactgtatggaagtaaagatcggccatggatatggaacattccttatgtcaaagcaccggatacgcatgggaacatgtgggtgccctcctgagaatcttgaggcactgtgaaatttaagtgtaagacattgagccacaaacatggaatctcttctttgtactggatgtccacttcccttaaagtcttatttgcacccttacaaaatctttccaaaggtcactcttatgaatggatgttggttatacttttaatggacattaacattcctaataaagtattagtttcttaa

SEQ ID NO: 21342 - DNA, 910 bp, Homo sapiens
  misc_feature 1..910: note = ENST00000554180
  source 1..910: mol_type = unassigned DNA
gcgcatgcgcggcggccgccgaaggggcgggatccgaggcaagcgttggttctgtgcgcctcaggagtataatgtctcaggaaggcgattatgggaggtggaccatatctagtagtgatgaaagtgaggaagaaaagccaaaaccagacaagccatctacctcttctcttctctgtgccaggcaaggagcagcaaatgagcccaggtacacctgttccgaggcccagaaagctgcacacaagaggaaaatatcacctgtgaaattcagcaatacagattcagttttacctcccaaaaggcagaaaagcggttcccaggaggacctcggctggtgtctgtccagcagtgatgatgagctgcaaccagaaatgccgcagaagcaggctgagaaagtggtgatcaaaaaggagaaagacatctctgctcccaatgacggcactgcccaaagaactgaaaatcatggcgctcccgcctgccacaggctcaaagaggaggaagacgagtatgagacatcaggggagggccaggacatttgggacatgctggataaagggaaccccttccagttttacctcactagagtctctggagttaagccaaagtataactctggagccctccacatcaaggatattttatctcctttatttgggacgcttgtttcttcagctcagtttaactactgctttgacgtggactggctcgtaaaacagtatccaccagagttcaggaagaagccaatcctgcttgtgcatggtgataagcgagaggctaaggctcacctccatgcccaggccaagccttacgagaacatctctctctgccaggcaaagttggatattgcgtttggaacacaccacacgaaaatgatgctgctgctctatgaagaaggcctccgggttgtcataca

SEQ ID NO: 21343 - DNA, 2068 bp, Homo sapiens
  misc_feature 1..2068: note = ENST00000393454
  source 1..2068: mol_type = unassigned DNA
atccgaggcaagcgttggttctgtgcgcctcaggagtataatgtctcaggaaggcgattatgggaggtggaccatatctagtagtgatgaaagtgaggaagaaaagccaaaaccagacaagccatctacctcttctcttctctgtgccaggcaaggagcagcaaatgagcccaggtacacctgttccgaggcccagaaagctgcacacaagaggaaaatatcacctgtgaaattcagcaatacagattcagttttacctcccaaaaggcagaaaagcggttcccaggaggacctcggctggtgtctgtccagcagtgatgatgagctgcaaccagaaatgccgcagaagcaggctgagaaagtggtgatcaaaaaggagaaagacatctctgctcccaatgacggcactgcccaaagaactgaaaatcatggcgctcccgcctgccacaggctcaaagaggaggaagacgagtatgagacatcaggggagggccaggacatttgggacatgctggataaagggaaccccttccagttttacctcactagagtctctggagttaagccaaagtataactctggagccctccacatcaaggatattttatctcctttatttgggacgcttgtttcttcagctcagtttaactactgctttgacgtggactggctcgtaaaacagtatccaccagagttcaggaagaagccaatcctgcttgtgcatggtgataagcgagaggctaaggctcacctccatgcccaggccaagccttacgagaacatctctctctgccaggcaaagttggatattgcgtttggaacacaccacacgaaaatgatgctgctgctctatgaagaaggcctccgggttgtcatacacacctccaacctcatccatgctgactggcaccagaaaactcaaggaatatggttgagccccttatacccacgaattgctgatggaacccacaaatctggagagtcgccaacacattttaaagctgatctcatcagttacttgatggcttataatgccccttctctcaaggagtggatagatgtcattcacaagcacgatctctctgaaacaaatgtttatcttattggttcaaccccaggacgctttcaaggaagtcaaaaagataattggggacattttagacttaagaagcttctgaaagaccatgcctcatccatgcctaacgcagagtcctggcctgtcgtaggtcagttttcaagcgttggctccttgggagccgatgaatcaaagtggttatgttctgagtttaaagagagcatgctgacactggggaaggaaagcaagactccaggaaaaagctctgttcctctttacttgatctatccttctgtggaaaatgtgcggaccagtttagaaggatatcctgctgggggctctcttccctatagcatccagacagctgaaaaacagaattggctgcattcctattttcacaaatggtcagctgagacttctggccgcagcaatgccatgccacatattaagacatatatgaggccttctccagacttcagtaaaattgcttggttccttgtcacaagcgcaaatctgtccaaggctgcctggggagcattggagaagaatggcacccagctgatgatccgctcctacgagctcggggtccttttcctcccttcagcatttggtctagacagtttcaaagtgaaacagaagttcttcgctggcagccaggagccaatggccacctttcctgtgccatatgatttgcctccagaactgtatggaagtaaagatcggccatggatatggaacattccttatgtcaaagcaccggatacgcatgggaacatgtgggtgccctcctgagaatcttgaggcactgtgaaatttaagtgtaagacattgagccacaaacatggaatctcttctttgtactggatgtccacttcccttaaagtcttatttgcacccttacaaaatctttccaaaggtcactcttatgaatggatgttggttatacttttaatggacattaacattcctaataaagtattagtttcttaattc

SEQ ID NO: 21344 - DNA, 876 bp, Homo sapiens
  misc_feature 1..876: note = ENST00000553617
  source 1..876: mol_type = unassigned DNA
cgaggcaagcgttggttctgtgcgcctcaggcaaggagcagcaaatgagcccaggtacacctgttccgaggcccagaaagctgcacacaagaggaaaatatcacctgtgaaattcagcaatacagattcagttttacctcccaaaaggcagaaaagcggttcccaggaggacctcggctggtgtctgtccagcagtgatgatgagctgcaaccagaaatgccgcagaagcaggctgagaaagtggtgatcaaaaaggagaaagacatctctgctcccaatgacggcactgcccaaagaactgaaaatcatggcgctcccgcctgccacaggctcaaagaggaggaagacgagtatgagacatcaggggagggccaggacatttgggacatgctggataaagggaaccccttccagttttacctcactagagtctctggagttaagccaaagtataactctggagccctccacatcaaggatattttatctcctttatttgggacgcttgtttcttcagctcagtttaactactgctttgacgtggactggctcgtaaaacagtatccaccagagttcaggaagaagccaatcctgcttgtgcatggtgataagcgagaggctaaggctcacctccatgcccaggccaagccttacgagaacatctctctctgccaggcaaagttggatattgcgtttggaacacaccacacgaaaatgatgctgctgctctatgaagaaggcctccgggttgtcatacacacctccaacctcatccatgctgactggcaccagaaaactcaaggaatatggttgagccccttatacccacgaattgctgatggaacccacaaatctggagagtcgccaacacattt

SEQ ID NO: 21345 - DNA, 3702 bp, Homo sapiens
  misc_feature 1..3702: note = ENST00000335725
  source 1..3702: mol_type = unassigned DNA
gttggttctgtgcgcctcagagttggagcacacagctgtattaaaaaggcaaatcgaaggccgggcgcggtgactcacgcctgtcatcctagcactttgggaggccgaggcggctgaatcacttgaggttaggagtttgagatcagcccgggcaacatggtgaaaccccgtctctacaaaaatagaaaaattagccgagcgtgatggtggatgcctgtaatcctagctcctcgggaggctaaggagtataatgtctcaggaaggcgattatgggaggtggaccatatctagtagtgatgaaagtgaggaagaaaagccaaaaccagacaagccatctacctcttctcttctctgtgccaggcaaggagcagcaaatgagcccaggtacacctgttccgaggcccagaaagctgcacacaagaggaaaatatcacctgtgaaattcagcaatacagattcagttttacctcccaaaaggcagaaaagcggttcccaggaggacctcggctggtgtctgtccagcagtgatgatgagctgcaaccagaaatgccgcagaagcaggctgagaaagtggtgatcaaaaaggagaaagacatctctgctcccaatgacggcactgcccaaagaactgaaaatcatggcgctcccgcctgccacaggctcaaagaggaggaagacgagtatgagacatcaggggagggccaggacatttgggacatgctggataaagggaaccccttccagttttacctcactagagtctctggagttaagccaaagtataactctggagccctccacatcaaggatattttatctcctttatttgggacgcttgtttcttcagctcagtttaactactgctttgacgtggactggctcgtaaaacagtatccaccagagttcaggaagaagccaatcctgcttgtgcatggtgataagcgagaggctaaggctcacctccatgcccaggccaagccttacgagaacatctctctctgccaggcaaagttggatattgcgtttggaacacaccacacgaaaatgatgctgctgctctatgaagaaggcctccgggttgtcatacacacctccaacctcatccatgctgactggcaccagaaaactcaaggaatatggttgagccccttatacccacgaattgctgatggaacccacaaatctggagagtcgccaacacattttaaagctgatctcatcagttacttgatggcttataatgccccttctctcaaggagtggatagatgtcattcacaagcacgatctctctgaaacaaatgtttatcttattggttcaaccccaggacgctttcaaggaagtcaaaaagataattggggacattttagacttaagaagcttctgaaagaccatgcctcatccatgcctaacgcagagtcctggcctgtcgtaggtcagttttcaagcgttggctccttgggagccgatgaatcaaagtggttatgttctgagtttaaagagagcatgctgacactggggaaggaaagcaagactccaggaaaaagctctgttcctctttacttgatctatccttctgtggaaaatgtgcggaccagtttagaaggatatcctgctgggggctctcttccctatagcatccagacagctgaaaaacagaattggctgcattcctattttcacaaatggtcagctgagacttctggccgcagcaatgccatgccacatattaagacatatatgaggccttctccagacttcagtaaaattgcttggttccttgtcacaagcgcaaatctgtccaaggctgcctggggagcattggagaagaatggcacccagctgatgatccgctcctacgagctcggggtccttttcctcccttcagcatttggtctagacagtttcaaagtgaaacagaagttcttcgctggcagccaggagccaatggccacctttcctgtgccatatgatttgcctccagaactgtatggaagtaaagatcggccatggatatggaacattccttatgtcaaagcaccggatacgcatgggaacatgtgggtgccctcctgagaatcttgaggcactgtgaaatttaagtgtaagacattgagccacaaacatggaatctcttctttgtactggatgtccacttcccttaaagtcttatttgcacccttacaaaatctttccaaaggtcactcttatgaatggatgttggttatacttttaatggacattaacattcctaataaagtattagtttcttaattcacttttatatgttttggaaagaaaattagtgaacttctctatgttaaaaatacgtactgcttgagtatcccctgtctgaaatgcttgggaccagaagtgtttcagcttttggatttttttgaattttggaatatttgcatagcataatgagatatcttgggaatgggacccaaatctaaacacaaaattcatttatgtttcatatacaccttatatacaataacctaaaggtgattttatatgatattttgagtaattttatgcatgaaacaaagttttgacaggcttttgaccgtgattcatcacatgagttcaggcatggaaattttcatttggagcatcatgtcagcactcaaaaagttctggatcttggagcagttcagattttcagattagggatgctcaaatctatatagatataaaattatcctcacagtaacatagaatctcttggtgctgtcagctgttgggaattgaagattgactttgtgcttccaccctccatccagaaaggcacccttcattccaccagaactttacccaggaagaacacgatcatttcctttttcaccgatgccctctctcagctttctgagtacgtctcttggggtcgctggaggtgatcctaggatctgtctctgagaccaatgtgctgtttcagccccctgcagctaagaattgtattgactgtcctcacagcggcttttcatagctttcagcttcagctttacgaggcttctcctctctccctggcaccctgctggctgcctcactgcttacagacaggtcccaccaaacccaaacacctgcctagggtaaatgggtctctcttctatccccagaaactttcagaggaagcagctcatagaaacatacaaaagcacacaagtattttgggaaaaaatcctaaaaggtgacttaatttgatgccttaaattcacaagtgaggaagctaaggcctagaaggttaaggatgtccccagggtcacacagtgagcggggctcagagcttgagtgtctttgtgctttgtgtacattgtgttctccctagggtgctttagaccctgtttgttttcttctgcatgaggctgatttccagtttgtcatcaacctctttatcttataatttaggatagagttgaacgttagtcttgaaagattttctaaagtagtctttcaaactgttcctcagaggcctaggattttccaaaagtaccttaggaaccttgtaggctgcagtgggggtgtggcgatagagcaggaggcagggagacagggctgcagggcctcccaccttccaacagacaggctctgctgtatctgttgtacatactgggattctgtaaaggacattatctggggtgttgtatgtatttttgtgtgttctgctttttttaaataaacttgaaaagctactgaactaa

SEQ ID NO: 21346 - DNA, 524 bp, Homo sapiens
  misc_feature 1..524: note = ENST00000555565
  source 1..524: mol_type = unassigned DNA
gttctgtgcgcctcagagttggagcacacagctgtattaaaaaggcaaatcgaaggccgggcgcggtgactcacgcctgtcatcctagcactttgggaggccgaggcggctgaatcacttgaggttaggagtttgagatcagcccgggcaacatggtgaaaccccgtctctacaaaaatagaaaaattagccgagcgtgatggtggatgcctgtaatcctagctcctcgggaggctaagatattttatctcctttatttgggacgcttgtttcttcagctcagtttaactactgctttgacgtggactggctcgtaaaacagtatccaccagagttcaggaagaagccaatcctgcttgtgcatggtgataagcgagaggctaaggctcacctccatgcccaggccaagccttacgagaacatctctctctgccaggcaaagttggatattgcgtttggaacacaccacacgaaaatgatgctgctgctctatgaagaaggcctccgggttgtcatacacacct

SEQ ID NO: 21347 - DNA, 748 bp, Homo sapiens
  misc_feature 1..748: note = ENST00000556867
  source 1..748: mol_type = unassigned DNA
cgcggactcggtgcggtctctcgcgggctgcggtcgggcccgggatcctgctcctggccgagtcgcggtgcgcgggctgctggggtccggcagggctggaggcggaccgcgaggaagcggcgcggccgggaagatggggcagggtcgcctcggccccggggcctcggtttcctccgatcacagcgcctcagggggcgcgcacgggcgctgcggagacctgtgtcctgccggggcgcggcgctaggggcccctgctcgggtttttattcccagacctaagcttacaggagtataatgtctcaggaaggcgattatgggaggtggaccatatctagtagtgatgaaagtgaggaagaaaagccaaaaccagacaagccatctacctcttctcttctctgtgccaggcaaggagcagcaaatgagcccaggtacacctgttccgaggcccagaaagctgcacacaagaggaaaatatcacctgtgaaattcagcaatacagattcagttttacctcccaaaaggcagaaaagcggttcccaggaggacctcggctggtgtctgtccagcagtgatgatgagctgcaaccagaaatgccgcagaagcaggctgagaaagtggtgatcaaaaaggagaaagacatctctgctcccaatgacggcactgcccaaagaactgaaaatcatggcgctcccgcctgccacaggctcaaagaggaggaagacgagtatgagacatcaggggagggcca

SEQ ID NO: 21348 - DNA, 879 bp, Homo sapiens
  misc_feature 1..879: note = ENST00000553569
  source 1..879: mol_type = unassigned DNA
ctctcgcgggctgcggtcgggcccgggatcctgctcctggccgagtcgcggtgcgcgggctgctggggtccggcagggctggaggcggaccgcgaggaagcggcgcggccgggaagatggggcagggtcgcctcggccccggggcctcggtttcctccgatcacagcgcctcagggggcgcgcacgggcgctgcggagacctgtgtcctgccggggcgcggcgctaggggcccctgctcgggtttttattcccagacctaagcttacagagttggagcacacagctgtattaaaaaggcaaatcgaaggccgggcgcggtgactcacgcctgtcatcctagcactttgggaggccgaggcggctgaatcacttgaggttaggagtttgagatcagcccgggcaacatggtgaaaccccgtctctacaaaaatagaaaaattagccgagcgtgatggtggatgcctgtaatcctagctcctcgggaggctaaggtaggagaattgcttgaacctgggaggcagagaggttggagtgagccgagattgcgccattgcgctccagcctgagcggcagagcgagactctgtctcaaaaaaataaatgtaaatcggactccccttcttaaagccctcagtggggtcccattgatcattgcataaaatccaatttctttaacaagtcttctcccctcacccgcttcggaccactgcctgccttgcctaagtcctttcttatgacctctttcccacctctgccggctgggttccctctacttgggaatgctcttcaccccatcatttagacagcaggttccttttggccctctgggtctcatttatatgttactttttaagtatattccaaaggtcacccctattt

SEQ ID NO: 21349 - DNA, 910 bp, Homo sapiens
  misc_feature 1..910: note = ENST00000553527
  source 1..910: mol_type = unassigned DNA
atcctgctcctggccgagtcgcggtgcgcgggctgctggggtccggcagggctggaggcggaccgcgaggaagcggcgcggccgggaagatggggcagggtcgcctcggccccggggcctcggtttcctccgatcacagcgcctcagggggcgcgcacgggcgctgcggagacctgtgtcctgccggggcgcggcgctaggggcccctgctcgggtttttattcccagacctaagcttacagagttggagcacacagctgtattaaaaaggcaaatcgaaggccgggcgcggtgactcacgcctgtcatcctagcactttgggaggccgaggcggctgaatcacttgaggttaggagtttgagatcagcccgggcaacatggtgaaaccccgtctctacaaaaatagaaaaattagccgagcgtgatggtggatgcctgtaatcctagctcctcgggaggctaaggagtataatgtctcaggaaggcgattatgggaggtggaccatatctagtagtgatgaaagtgaggaagaaaagccaaaaccagacaagccatctacctcttctcttctctgtgccaggcaaggagcagcaaatgagcccaggtacacctgttccgaggcccagaaagctgcacacaagaggaaaatatcacctgtgaaattcagcaatacagattcagttttacctcccaaaaggcagaaaagcggttcccaggaggacctcggctggtgtctgtccagcagtgatgatgagctgcaaccagaaatgccgcagaagcaggctgagaaagtggtgatcaaaaaggagaaagacatctctgctcccaatgacggcactgcccaaagaactgaaaatcatggcgctcccgcctgccacaggctcaaagaggaggaagacgagtatgag

SEQ ID NO: 21350 - DNA, 728 bp, Homo sapiens
  misc_feature 1..728: note = ENST00000553989
  source 1..728: mol_type = unassigned DNA
aacgccttcagcaagagccctctcacttcctttgtcttcaacccattctccgcagagttggagcacacagctgtattaaaaaggcaaatcgaaggccgggcgcggtgactcacgcctgtcatcctagcactttgggaggccgaggcggctgaatcacttgaggttaggagtttgagatcagcccgggcaacatggtgaaaccccgtctctacaaaaatagaaaaattagccgagcgtgatggtggatgcctgtaatcctagctcctcgggaggctaaggagtataatgtctcaggaaggcgattatgggaggtggaccatatctagtagtgatgaaagtgaggaagaaaagccaaaaccagacaagccatctacctcttctcttctctgtgccaggcaaggagcagcaaatgagcccaggtacacctgttccgaggcccagaaagctgcacacaagaggaaaatatcacctgtgaaattcagcaatacagattcagttttacctcccaaaaggcagaaaagcggttcccaggaggacctcggctggtgtctgtccagcagtgatgatgagctgcaaccagaaatgccgcagaagcaggctgagaaagtggtgatcaaaaaggagaaagacatctctgctcccaatgacggcactgcccaaagaactgaaaatcatggcgctcccgcctgccacaggctcaaagaggaggaagacgagtatgagacatc

SEQ ID NO: 21351 - DNA, 2488 bp, Homo sapiens
  misc_feature 1..2488: note = ENST00000545686
  source 1..2488: mol_type = unassigned DNA
ccattctccgcagagttggagcacacagctgtattaaaaaggcaaatcgaaggccgggcgcggtgactcacgcctgtcatcctagcactttgggaggccgaggcggctgaatcacttgaggttaggagtttgagatcagcccgggcaacatggtgaaaccccgtctctacaaaaatagaaaaattagccgagcgtgatggtggatgcctgtaatcctagctcctcgggaggctaaggagtataatgtctcaggaaggcgattatgggaggtggaccatatctagtagtgatgaaagtgaggaagaaaagccaaaaccagacaagccatctacctcttctcttctctgtgccaggcaaggagcagcaaatgagcccaggtacacctgttccgaggcccagaaagctgcacacaagaggaaaatatcacctgtgaaattcagcaatacagattcagttttacctcccaaaaggcagaaaagcggttcccaggaggacctcggctggtgtctgtccagcagtgatgatgagctgcaaccagaaatgccgcagaagcaggctgagaaagtggtgatcaaaaaggagaaagacatctctgctcccaatgacggcactgcccaaagaactgaaaatcatggcgctcccgcctgccacaggctcaaagaggaggaagacgagtatgagacatcaggggagggccaggacatttgggacatgctggataaagggaaccccttccagttttacctcactagagtctctggagttaagccaaagtataactctggagccctccacatcaaggatattttatctcctttatttgggacgcttgtttcttcagctcagtttaactactgctttgacgtggactggctcgtaaaacagtatccaccagagttcaggaagaagccaatcctgcttgtgcatggtgataagcgagaggctaaggctcacctccatgcccaggccaagccttacgagaacatctctctctgccaggcaaagttggatattgcgtttggaacacaccacacgaaaatgatgctgctgctctatgaagaaggcctccgggttgtcatacacacctccaacctcatccatgctgactggcaccagaaaactcaaggaactcacctgtgagtgaatctctgatccaggaggagcctcactcagcctgggaactttgaggtgctattgcaaggggaggtcctccacgtctgtccagcccaacctggtcattttacacacggaggcaaaggcccagagagatcacagagcttacccaaaatgaatatggttgagccccttatacccacgaattgctgatggaacccacaaatctggagagtcgccaacacattttaaagctgatctcatcagttacttgatggcttataatgccccttctctcaaggagtggatagatgtcattcacaagcacgatctctctgaaacaaatgtttatcttattggttcaaccccaggacgctttcaaggaagtcaaaaagataattggggacattttagacttaagaagctttgcataattatcaaagcaggaaatgcagatcagtcttctgcagtgttttagctgcttctgaaagaccatgcctcatccatgcctaacgcagagtcctggcctgtcgtaggtcagttttcaagcgttggctccttgggagccgatgaatcaaagtggttatgttctgagtttaaagagagcatgctgacactggggaaggaaagcaagactccaggaaaaagctctgttcctctttacttgatctatccttctgtggaaaatgtgcggaccagtttagaaggatatcctgctgggggctctcttccctatagcatccagacagctgaaaaacagaattggctgcattcctattttcacaaatggtcagctgagacttctggccgcagcaatgccatgccacatattaagacatatatgaggccttctccagacttcagtaaaattgcttggttccttgtcacaagcgcaaatctgtccaaggctgcctggggagcattggagaagaatggcacccagctgatgatccgctcctacgagctcggggtccttttcctcccttcagcatttggtctagacagtttcaaagtgaaacagaagttcttcgctggcagccaggagccaatggccacctttcctgtgccatatgatttgcctccagaactgtatggaagtaaagatcggccatggatatggaacattccttatgtcaaagcaccggatacgcatgggaacatgtgggtgccctcctgagaatcttgaggcactgtgaaatttaagtgtaagacattgagccacaaacatggaatctcttctttgtactggatgtccacttcccttaaagtcttatttgcacccttacaaaatctttccaaaggtcactcttatgaatggatgttggttatacttttaatggacattaacattcctaataaagtattagtttcttaa

SEQ ID NO: 21352 - DNA, 2200 bp, Homo sapiens
  misc_feature 1..2200: note = ENST00000555178
  source 1..2200: mol_type = unassigned DNA
ccgcagagttggagcacacagctgtattaaaaaggcaaatcgaaggccgggcgcggtgactcacgcctgtcatcctagcactttgggaggccgaggcggctgaatcacttgaggttaggagtttgagatcagcccgggcaacatggtgaaaccccgtctctacaaaaatagaaaaattagccgagcgtgatggtggatgcctgtaatcctagctcctcgggaggctaaggagtataatgtctcaggaaggcgattatgggaggtggaccatatctagtagtgatgaaagtgaggaagaaaagccaaaaccagacaagccatctacctcttctcttctctgtgccaggcaaggagcagcaaatgagcccaggtacacctgttccgaggcccagaaagctgcacacaagaggaaaatatcacctgtgaaattcagcaatacagattcagttttacctcccaaaaggcagaaaagcggttcccaggaggacctcggctggtgtctgtccagcagtgatgatgagctgcaaccagaaatgccgcagaagcaggctgagaaagtggtgatcaaaaaggagaaagacatctctgctcccaatgacggcactgcccaaagaactgaaaatcatggcgctcccgcctgccacaggctcaaagaggaggaagacgagtatgagacatcaggggagggccaggacatttgggacatgctggataaagggaaccccttccagttttacctcactagagtctctggagttaagccaaagtataactctggagccctccacatcaaggatattttatctcctttatttgggacgcttgtttcttcagctcagtttaactactgctttgacgtggactggctcgtaaaacagtatccaccagagttcaggaagaagccaatcctgcttgtgcatggtgataagcgagaggctaaggctcacctccatgcccaggccaagccttacgagaacatctctctctgccaggaaaatgatgctgctgctctatgaagaaggcctccgggttgtcatacacacctccaacctcatccatgctgactggcaccagaaaactcaaggaatatggttgagccccttatacccacgaattgctgatggaacccacaaatctggagagtcgccaacacattttaaagctgatctcatcagttacttgatggcttataatgccccttctctcaaggagtggatagatgtcattcacaagcacgatctctctgaaacaaatgtttatcttattggttcaaccccaggacgctttcaaggaagtcaaaaagataattggggacattttagacttaagaagcttctgaaagaccatgcctcatccatgcctaacgcagagtcctggcctgtcgtaggtcagttttcaagcgttggctccttgggagccgatgaatcaaagtggttatgttctgagtttaaagagagcatgctgacactggggaaggaaagcaagactccaggaaaaagctctgttcctctttacttgatctatccttctgtggaaaatgtgcggaccagtttagaaggatatcctgctgggggctctcttccctatagcatccagacagctgaaaaacagaattggctgcattcctattttcacaaatggtcagctgagacttctggccgcagcaatgccatgccacatattaagacatatatgaggccttctccagacttcagtaaaattgcttggttccttgtcacaagcgcaaatctgtccaaggctgcctggggagcattggagaagaatggcacccagctgatgatccgctcctacgagctcggggtccttttcctcccttcagcatttggtctagacagtttcaaagtgaaacagaagttcttcgctggcagccaggagccaatggccacctttcctgtgccatatgatttgcctccagaactgtatggaagtaaagatcggccatggatatggaacattccttatgtcaaagcaccggatacgcatgggaacatgtgggtgccctcctgagaatcttgaggcactgtgaaatttaagtgtaagacattgagccacaaacatggaatctcttctttgtactggatgtccacttcccttaaagtcttatttgcacccttacaaaatctttccaaaggtcactcttatgaatggatgttggttatacttttaatggacattaaca

SEQ ID NO: 21353 - DNA, 597 bp, Homo sapiens
  misc_feature 1..597: note = ENST00000556498
  source 1..597: mol_type = unassigned DNA
gggttatagctctatttgcactcgctgtttagctggtccgaatttcttgtcctgcgtccaagaataatgaggttaggctgacaaccgaaggggaaaagggcggaggagtataatgtctcaggaaggcgattatgggaggtggaccatatctagtagtgatgaaagtgaggaagaaaagccaaaaccagacaagccatctacctcttctcttctctgtgccaggcaaggagcagcaaatgagcccaggtacacctgttccgaggcccagaaagctgcacacaagaggaaaatatcacctgtgaaattcagcaatacagattcagttttacctcccaaaaggcagaaaagcggttcccaggaggacctcggctggtgtctgtccagcagtgatgatgagctgcaaccagaaatgccgcagaagcaggctgagaaagtggtgatcaaaaaggagaaagacatctctgctcccaatgacggcactgcccaaagaactgaaaatcatggcgctcccgcctgccacaggctcaaagaggaggaagacgagtatgagacatcaggggagggccaggacatttgggacatgctggataaagggaa

SEQ ID NO: 21354 - DNA, 1894 bp, Homo sapiens
  misc_feature 1..1894: note = ENST00000555880
  source 1..1894: mol_type = unassigned DNA
caggagtataatgtctcaggaaggcgattatgggaggtggaccatatctagtagtgatgaaagtgaggaagaaaagccaaaaccagacaagccatctacctcttctcttctctgtgccaggcaaggagcagcaaatgagcccaggtacacctgttccgaggcccagaaagctgcacacaagaggaaaatatcacctgtgaaattcagcaatacagattcagttttacctcccaaaaggcagaaaagcggttcccaggaggacctcggctggtgtctgtccagcagtgatgatgagctgcaaccagaaatgccgcagaagcaggctgagaaagtggtgatcaaaaaggagaaagacatctctgctcccaatgacggcactgcccaaagaactgaaaatcatggcgctcccgcctgccacaggctcaaagaggaggaagacgagtatgagacatcaggggagggccaggacatttgggacatgctggataaagggaaccccttccagttttacctcactagagtctctggagttaagccaaagtataactctggagccctccacatcaaggatattttatctcctttatttgggacgcttgtttcttcagctcagtttaactactgctttgacgtggactggctcgtaaaacagtatccaccagagttcaggaagaagccaatcctgcttgtgcatggtgataagcgagaggctaaggctcacctccatgcccaggccaagccttacgagaacatctctctctgccaggcaaagttggatattgcgtttggaacacaccacacgaaaatgatgctgctgctctatgaagaaggcctccgggttgtcatacacacctccaacctcatccatgctgactggcaccagaaaactcaaggaatatggttgagccccttatacccacgaattgctgatggaacccacaaatctggagagtcgccaacacattttaaagctgatctcatcagttacttgatggcttataatgccccttctctcaaggagtggatagatgtcattcacaagcacgatctctctgaaacaaatgtttatcttattggttcaaccccaggacgctttcaaggaagtcaaaaagataattggggacattttagacttaagaagcttctgaaagaccatgcctcatccatgcctaacgcagagtcctggcctgtcgtaggtcagttttcaagcgttggctccttgggagccgatgaatcaaagtggttatgttctgagtttaaagagagcatgctgacactggggaaggaaagcaagactccaggaaaaagctctgttcctctttacttgatctatccttctgtggaaaatgtgcggaccagtttagaaggatatcctgctgggggctctcttccctatagcatccagacagctgaaaaacagaattggctgcattcctattttcacaaatggtcagctgagacttctggccgcagcaatgccatgccacatattaagacatatatgaggccttctccagacttcagtaaaattgcttggttccttgtcacaagcgcaaatctgtccaaggctgcctggggagcattggagaagaatggcacccagctgatgatccgctcctacgagctcggggtccttttcctcccttcagcatttatcggccatggatatggaacattccttatgtcaaagcaccggatacgcatgggaacatgtgggtgccctcctgagaatcttgaggcactgtgaaatttaagtgtaagacattgagccacaaacatggaatctcttctttgtactggatgtccacttcccttaaagtcttatttgcacccttacaaaatctttccaaaggtcactcttatgaatggatgttggttatacttttaatggaca

SEQ ID NO: 21355 - DNA, 318 bp, Homo sapiens
  misc_feature 1..318: note = ENST00000557782
  source 1..318: mol_type = unassigned DNA
gcaaagttggatattgcgtttggaacacaccacacgaaaatgatgctgctgctctatgaagaaggcctccgggttgtcatacacacctccaacctcatccatgctgactggcaccagaaaactcaaggccattttgtacatctctgcctgtgctagagaagagctggttaacaaacagccttctgtgttgggagaaactcggacgtttgtctagcaccatttccagaactcacctgtgagtgaatctctgatccaggaggagcctcactcagcctgggaactttgaggtgctattgcaaggggaggtcctccacgtct

SEQ ID NO: 21356 - DNA, 1076 bp, Homo sapiens
  misc_feature 1..1076: note = ENST00000556063
  source 1..1076: mol_type = unassigned DNA
acgctttcaaggaagtcaaaaagataattggggacattttagacttaagaagcttctgaaagaccatgcctcatccatgcctaacgcagagtcctggcctgtcgtaggtcagttttcaagcgttggctccttgggagccgatgaatcaaagtggttatgttctgagtttaaagagagcatgctgacactggggaaggaaagcaagactccaggaaaaagctctgttcctctttacttgatctatccttctgtggaaaatgtgcggaccagtttagaaggatatcctgctgggggctctcttccctatagcatccagacagctgaaaaacagaattggctgcattcctattttcacaaatggtcagctgagacttctggccgcagcaatgccatgccacatattaagacatatatgaggccttctccagacttcagtaaaattgcttggttccttgtcacaagcgcaaatctgtccaaggctgcctggggagcattggagaagaatggcacccagctgatgatccgctcctacgagctcggggtccttttcctcccttcagcatttggtctagacagtttcaaagtgaaacagaagttcttcgctggcagccaggagccaatggccacctttcctgtgccatatgatttgcctccagaactgtatggaagtaaaggtgagacacagataaaggaaaaccacgggtggatatgcataagaaaaacaaacagagcccaggagaagcctttggtctcagtgggatcctggctcatggaaccctctggaagctcaagtttgcagagggccctttgccagcctgtctggggccttgtagccactggttagtcttggaatccctttgcactcctataattactatacagatccttcctgacttacactggggctacatgctgataaacccctcatgaattgaaaatatcataagtcaaaaatgcatttaatgcgtcaaatctactgagcaccatagcttagtctagcctaccctaaacatgatcagacctcttaaattagtctacacttgggcaaaataaatcaaagactgttttataataaa

SEQ ID NO: 21357 - DNA, 2544 bp, Homo sapiens
  misc_feature 1..2544: note = ENST00000527636
  source 1..2544: mol_type = unassigned DNA
ggccgcgtccaggcacaggccatgcagtgacgcccccccacccctccacctttgcccggagcgcgggcagcagcccagcgcgccagccggccccggggcaggagcggtgctaggcaggggtggggtggccgggcccagggaccgggagccggggagggagccgggcaccgagcagagggcgggggaagcggcgccgaagtttgcctcggactcgccgggcgctgcggtggctccctgggccgaggactgttgctgccgctgccgccgccgcttcattgcacattcaagtggaaaattttcaggagtcagcagaaacattgtgtccaaaaaagactgagtcgcagttaccaccaaacccaggaggagactctccctggaaaacttcccttccctttcggtttattttcttgaaaaggctccaggcttcggcttggaaaatcccaccgccaaaattgagcccagcagctggagcggcagtgagagccctgccgaaaacatggaaaggatgagtgactctgcagataagccaattgacaatgatgcagaaggggtctggagccccgacatcgagcaaagctttcaggaggccctggctatctatccaccatgtgggaggaggaaaatcatcttatcagacgaaggcaaaatgtatggtaggaatgaattgatagccagatacatcaaactcaggacaggcaagacgaggaccagaaaacaggtgtctagtcacattcaggttcttgccagaaggaaatctcgtgattttcattccaagctaaaggatcagactgcaaaggataaggccctgcagcacatggcggccatgtcctcagcccagatcgtctcggccactgccattcataacaagctggggctgcctgggattccacgcccgaccttcccaggggcgccggggttctggccgggaatgattcaaacagggcagccaggatcctcacaagacgtcaagccttttgtgcagcaggcctaccccatccagccagcggtcacagcccccattccagggtttgagcctgcatcggccccagctccctcagtccctgcctggcaaggtcgctccattggcacaaccaagcttcgcctggtggaattttcagcttttctcgagcagcagcgagacccagactcgtacaacaaacacctcttcgtgcacattgggcatgccaaccattcttacagtgacccattgcttgaatcagtggacattcgtcagatttatgacaaatttcctgaaaagaaaggtggcttaaaggaactgtttggaaagggccctcaaaatgccttcttcctcgtaaaattctgggctgatttaaactgcaatattcaagatgatgctggggctttttatggtgtaaccagtcagtacgagagttctgaaaatatgacagtcacctgttccaccaaagtttgctcctttgggaagcaagtagtagaaaaagtagagacggagtatgcaaggtttgagaatggccgatttgtataccgaataaaccgctccccaatgtgtgaatatatgatcaacttcatccacaagctcaaacacttaccagagaaatatatgatgaacagtgttttggaaaacttcacaattttattggtggtaacaaacagggatacacaagaaactctactctgcatggcctgtgtgtttgaagtttcaaatagtgaacacggagcacaacatcatatttacaggcttgtaaaggactgaacatggttatttatatatatagatatctgtatatacacacacacatatgtgcacacacacactctctctccattatcgaacgactgactgtaaacctcaccacacagggtggtgccctggccccgaggtcaccccgacttttctaaatcttgtttgagtgaagtcattttttcatgtgttcatactatcattgtagctgtgaagttctggtacagttgtaaaaagagaaattgagttgtttctctatgttcttcagatgtgcagcccacaattcctcgggaaaggtgaacctgaacaacccaagtctctctctgcagagccctgtttctaattgtggtagaaaatattgagacagagcatttgccatgggacatttacagcctttatacaaatgtatttagttctcttttttccaacataaaattcttgttttaagatacaagtaaaattaatctttaaatataaatgtaaattagtacacaaaactaagaatctttagacttatctttgtaactaattagggtggaagttatgaaagaatgtaattcactaaattattttttaaatgaaacctttttttttctttttgaaaccaaatgttaaactatagccttaagaaatgcttggtagaagtgtcctaatgagacaaatttgtacttttatcctcaaggttaacactaatctcctaatccattaaactcttgaacaggtattacaaaggaagaaaacttcaccccttatccttaacatatatagtatatttaaaaaatataaaattgtattgtactaatgtgatgatggattatttaatg

SEQ ID NO: 21358 - DNA, 477 bp, Homo sapiens
  misc_feature 1..477: note = ENST00000527376
  source 1..477: mol_type = unassigned DNA
gtgacgcccccccacccctccacctttgcccggagcgcgggcagcagcccagcgcgccagccggccccggggcaggagcggtgctaggcaggggtggggtggccgggcccagggaccgggagccggggagggagccgggcaccgagcagagggcgggggaagcggcgccgaagtttgcctcggactcgccgggcgctgcggtggctccctgggccgaggtttattttcttgaaaaggctccaggcttcggcttggaaaatcccaccgccaaaattgagcccagcagctggagcggcagtgagagccctgccgaaaacatggaaaggatgagtgactctgcagataagccaattgacaatgatgcagaaggggtctggagccccgacatcgagcaaagctttcaggaggccctggctatctatccaccatgtgggaggaggaaaatcatcttatcagacgaaggcaaaatgtatggta

SEQ ID NO: 21359 - DNA, 3063 bp, Homo sapiens
  misc_feature 1..3063: note = ENST00000527575
  source 1..3063: mol_type = unassigned DNA
tcgcagttaccaccaaacccaggaggagactctccctggaaaacttcccttccctttcggtttattttcttgaaaaggctccaggcttcggcttggaaaatcccaccgccaaaattgagcccagcagctggagcggcagtgagagccctgccgaaaacatggaaaggatgagtgactctgcagataagccaattgacaatgatgcagaaggggtctggagccccgacatcgagcaaagctttcaggaggccctggctatctatccaccatgtgggaggaggaaaatcatcttatcagacgaaggcaaaatgtatggtaggaatgaattgatagccagatacatcaaactcaggacaggcaagacgaggaccagaaaacaggtgtctagtcacattcaggttcttgccagaaggaaatctcgtgattttcattccaagctaaaggatcagactgcaaaggataaggccctgcagcacatggcggccatgtcctcagcccagatcgtctcggccactgccattcataacaagctggggctgcctgggattccacgcccgaccttcccaggggcgccggggttctggccgggaatgattcaaacagggcagccaggatcctcacaagacgtcaagccttttgtgcagcaggcctaccccatccagccagcggtcacagcccccattccagggtttgagcctgcatcggccccagctccctcagtccctgcctggcaaggtcgctccattggcacaaccaagcttcgcctggtggaattttcagcttttctcgagcagcagcgagacccagactcggctgatttaaactgcaatattcaagatgatgctggggctttttatggtgtaaccagtcagtacgagagttctgaaaatatgacagtcacctgttccaccaaagtttgctcctttgggaagcaagtagtagaaaaagtagagacggagtatgcaaggtttgagaatggccgatttgtataccgaataaaccgctccccaatgtgtgaatatatgatcaacttcatccacaagctcaaacacttaccagagaaatatatgatgaacagtgttttggaaaacttcacaattttattggtggtaacaaacagggatacacaagaaactctactctgcatggcctgtgtgtttgaagtttcaaatagtgaacacggagcacaacatcatatttacaggcttgtaaaggactgaacatggttatttatatatatagatatctgtatatacacacacacatatgtgcacacacacactctctctccattatcgaacgactgactgtaaacctcaccacacagggtggtgccctggccccgaggtcaccccgacttttctaaatcttgtttgagtgaagtcattttttcatgtgttcatactatcattgtagctgtgaagttctggtacagttgtaaaaagagaaattgagttgtttctctatgttcttcagatgtgcagcccacaattcctcgggaaaggtgaacctgaacaacccaagtctctctctgcagagccctgtttctaattgtggtagaaaatattgagacagagcatttgccatgggacatttacagcctttatacaaatgtatttagttctcttttttccaacataaaattcttgttttaagatacaagtaaaattaatctttaaatataaatgtaaattagtacacaaaactaagaatctttagacttatctttgtaactaattagggtggaagttatgaaagaatgtaattcactaaattattttttaaatgaaacctttttttttctttttgaaaccaaatgttaaactatagccttaagaaatgcttggtagaagtgtcctaatgagacaaatttgtacttttatcctcaaggttaacactaatctcctaatccattaaactcttgaacaggtattacaaaggaagaaaacttcaccccttatccttaacatatatagtatatttaaaaaatataaaattgtattgtactaatgtgatgatggattatttaatgaaaaagaaaaaatggctctttttgcaataagtagatacatactgaaaaaatctaaacttacaatgtttatagtcttgtgtgtgcagttatattttatatggacgaccaaattttttattaagatgagtaaatatttgaaccactgaattttaataacaaaattttaaaattggcatgaatacggaatactgcactgtgagatgcaaagtatacagaatctgtggctgggagaaaatttcatcaaatagacaagtaaaaggctcatcagttttagcatctctgctccccagaaaattgtaagcatcctcaccagcctgtggatacattctttatttctagtgacccaatatgcatattaacctgctataactagggctatatgtgtaggtatgtgtatacatatacacaaatgcacatatagagttaacacatttagtgaacacttgtttagtgtcactcagtttgctaggtgctgatatgtacgtatatctcaatgtgtctgtagacttagatacatcctcttgaagcacatccatttctttagcgtctctcagtaagttacagtacttgtttgacttaggtttaagaggcccagctacctatctctgaccttttcaaataggctcatttgggagattcttttgccaggagagattcaactttccaatctaagtattccagagcattgcccaggcagagttggtttgatgtggccagatgttttgagttatttcccttaagtgtttcactggggagagaacagggagtgctcctccagcttcccaaagaaatatgtttttgtaagtggtaggaacatgtgcacacaatagaacatgaaataagttttttaacttgtaaaacatgtcaagatttttccaccaagctagaaaataaaaaacttagttctaccacatccaattaacttacacacccccttccctgtctcaacacctgctttgaccctgcttttctattattacatcagtcagcatcttgtggtccctaacatgaggatgtggctggctcgtggg

SEQ ID NO: 21360 - DNA, 1134 bp, Homo sapiens
  misc_feature 1..1134: note = ENST00000525312
  source 1..1134: mol_type = unassigned DNA
aaagacgtttaaaaaccccagcttgactctggcgggctgagggtgctgccgtgccactgctgcaggatggagctctcttcctggtggagacttgattcacaaggacgctaattattcattcttcctccgtgcagcccgctgaaacaattgctgtgcttgttcggtgcacagtgtggcgtcggacagtcaggcctttttatgtaactgatggcgctgtaggaatgaattgatagccagatacatcaaactcaggacaggcaagacgaggaccagaaaacaggtgtctagtcatatacaggtcttagcaagaaagaaagttcgagaaattcaagccgccattaaggtacgtctggcttgcccacttgtagggggcttttcatctccatggttacaggcttttcctttgttttcctcccttcccctaccctgcaggtgtctagtcacattcaggttcttgccagaaggaaatctcgtgattttcattccaagctaaaggtatgcgcttttctgctttttggcttgtggttgctatgcatctcacttcctgttttccatggtgactggtgaatgcctggtgctgggattctcgtaacctagtttccttgcatgtgagagctgtttacatttctttgtgtttaatctctctgtttctgtactagcctcacattaaactcaatgtgtgtgagcgcgtgtgtgtgtttgcgtgtgtgtgtgcgtgtgtatgtgtgtgttcctaataacaatgcaaatgcagcagagagctggtcttgataacttttcagcacagaaacatgattttttttttttaaccttcagatgtccaccaagcagccatgggctaggaaagcttaaaaaaagaaaagtccagagatgcaaaattgagtagaaattatttagaaagaatcatttccaaagtggtcatgaaattacctttttaaaaaatttagaaattattttaactcatgcttttgatgtatttttaagaagacttataaaaaatacgtctttttcatgcatgtctcttccctcagagtattttcagccagatttcttccacattgcttactactgttttttaagtgaatggcgctcttattaaaagagaaatctgagcagtggcctttaaaaaaaaaa

SEQ ID NO: 21361 - DNA, 8477 bp, Homo sapiens
  misc_feature 1..8477: note = ENST00000526600
  source 1..8477: mol_type = unassigned DNA
tgagaggcttcacattctgttggaaaatggatttaatccctaaaaaaagccttgccccattgggtcttcccagtaaatgttgagaggtacggtaggttgagtgtggtttagccttctggctgtgttatttatccatgcatgtttgctttttttggcctattttgtggctctgtattttagtccatgtgctcgtggctgtgcctgtgtaacctgcctggtagccatgcgttatgtattaagttggtgtgtcactgtcaccttcaaggatcagactgcaaaggataaggccctgcagcacatggcggccatgtcctcagcccagatcgtctcggccactgccattcataacaagctggggctgcctgggattccacgcccgaccttcccaggggcgccggggttctggccgggaatgattcaaacagggcagccaggatcctcacaagacgtcaagccttttgtgcagcaggcctaccccatccagccagcggtcacagcccccattccagggtttgagcctgcatcggccccagctccctcagtccctgcctggcaaggtcgctccattggcacaaccaagcttcgcctggtggaattttcagcttttctcgagcagcagcgagacccagactcgtacaacaaacacctcttcgtgcacattgggcatgccaaccattcttacagtgacccattgcttgaatcagtggacattcgtcagatttatgacaaatttcctgaaaagaaaggtggcttaaaggaactgtttggaaagggccctcaaaatgccttcttcctcgtaaaattctgggctgatttaaactgcaatattcaagatgatgctggggctttttatggtgtaaccagtcagtacgagagttctgaaaatatgacagtcacctgttccaccaaagtttgctcctttgggaagcaagtagtagaaaaagtagagacggagtatgcaaggtttgagaatggccgatttgtataccgaataaaccgctccccaatgtgtgaatatatgatcaacttcatccacaagctcaaacacttaccagagaaatatatgatgaacagtgttttggaaaacttcacaattttattggtggtaacaaacagggatacacaagaaactctactctgcatggcctgtgtgtttgaagtttcaaatagtgaacacggagcacaacatcatatttacaggcttgtaaaggactgaacatggttatttatatatatagatatctgtatatacacacacacatatgtgcacacacacactctctctccattatcgaacgactgactgtaaacctcaccacacagggtggtgccctggccccgaggtcaccccgacttttctaaatcttgtttgagtgaagtcattttttcatgtgttcatactatcattgtagctgtgaagttctggtacagttgtaaaaagagaaattgagttgtttctctatgttcttcagatgtgcagcccacaattcctcgggaaaggtgaacctgaacaacccaagtctctctctgcagagccctgtttctaattgtggtagaaaatattgagacagagcatttgccatgggacatttacagcctttatacaaatgtatttagttctcttttttccaacataaaattcttgttttaagatacaagtaaaattaatctttaaatataaatgtaaattagtacacaaaactaagaatctttagacttatctttgtaactaattagggtggaagttatgaaagaatgtaattcactaaattattttttaaatgaaacctttttttttctttttgaaaccaaatgttaaactatagccttaagaaatgcttggtagaagtgtcctaatgagacaaatttgtacttttatcctcaaggttaacactaatctcctaatccattaaactcttgaacaggtattacaaaggaagaaaacttcaccccttatccttaacatatatagtatatttaaaaaatataaaattgtattgtactaatgtgatgatggattatttaatgaaaaagaaaaaatggctctttttgcaataagtagatacatactgaaaaaatctaaacttacaatgtttatagtcttgtgtgtgcagttatattttatatggacgaccaaattttttattaagatgagtaaatatttgaaccactgaattttaataacaaaattttaaaattggcatgaatacggaatactgcactgtgagatgcaaagtatacagaatctgtggctgggagaaaatttcatcaaatagacaagtaaaaggctcatcagttttagcatctctgctccccagaaaattgtaagcatcctcaccagcctgtggatacattctttatttctagtgacccaatatgcatattaacctgctataactagggctatatgtgtaggtatgtgtatacatatacacaaatgcacatatagagttaacacatttagtgaacacttgtttagtgtcactcagtttgctaggtgctgatatgtacgtatatctcaatgtgtctgtagacttagatacatcctcttgaagcacatccatttctttagcgtctctcagtaagttacagtacttgtttgacttaggtttaagaggcccagctacctatctctgaccttttcaaataggctcatttgggagattcttttgccaggagagattcaactttccaatctaagtattccagagcattgcccaggcagagttggtttgatgtggccagatgttttgagttatttcccttaagtgtttcactggggagagaacagggagtgctcctccagcttcccaaagaaatatgtttttgtaagtggtaggaacatgtgcacacaatagaacatgaaataagttttttaacttgtaaaacatgtcaagatttttccaccaagctagaaaataaaaaacttagttctaccacatccaattaacttacacacccccttccctgtctcaacacctgctttgaccctgcttttctattattacatcagtcagcatcttgtggtccctaacatgaggatgtggctggctcgtgggaaacagcaaaacactaagcctgacctctcccaaattgggaagaccagaggagaaagtgcaaaactgtccccatttggaatgcccattccttctagaaaccagttggacagtgctcctctgcccttcataaacagactactgttgggtccctgattccaggctggcctgtgaaggattgccccaggtgtcccctttcacggttgtcacatttacagtgacttctgttgaacacccctcttagggatgtttcttttgctcttatttcctgcatctttccttaagggaagccccatcctctcccaggaccaggagtttatgaccaggcgagcacaaatggctaaaagccaagctgtcctagaacttcagtgggagagctgtctggttcatattctacccaggaatggtacttttcagtgcagccaggagggctcttgggatttcctttccaaagcacaaaaatactgggacccaagaagaacagctagaggacaactctgttggcacagagacggggacagcccagtctgctgacctcacagggtcagctgggcccccctggtgcttcaccacctgcatcctcttgctcagaatgcctttgcagttgagttttctgggtttctatgattgaccttgaggtttactccttgctcttacaacatttctaaggatttttaaaagtttacttcttgtcttgttcttctaaagctttctccaggacagatattttccctgtcttaaccactggtccagtcatcccagtgggcttctctttgtctctcccagattagacctttgggtgagattggcatcacaacatctaatctgagtctgtcttttgtccttcattctgtatggcagtctccctttgttataaaagctttctaaagcatactaaagaagccttcccagagccccgtcttgcttctcttccaggtgctctatcccctcgagaccctctggtgccaggcttgcttcacggccatcttgtgttgtcactgcagagtttggaggccagttttccacagcctaaacagggaggagctgcagaatggggctctggtctctgggcattcatttccctcatagaggctgagaataaaacaaggacttattcacacatgttctagaaccccagaatggcccaagttacctgagaccagggtttctcaaccttgacaccattgacattttggactgggtaattctttgttctgcagagctgtcctttgcactgtaggagatttactaatatccctggcctctacccagtagtaccactagcacctattccccacccagcgtgtctccagatattgtcaaatatcccatcgggtgcaaaatgatccctggtcaagatctgttgcccaagatgttacaggtcacaatgaccacatttgaaattgttttccctttcattttaccctgtgaaagcatctctcctagagccttgcaagaggcaggtgacattgtgtccatatttcttcctgtttcagaacttctgtttcacaacaatttctctctcgctacaagtattctttcactcagcactggggaagttgggaacagctggtcaccatcatccctttaatcaactcacacctgtttaaagagtgtttctgatttgaccttcatcccttagtttactggcgttaaaaaaagtctcagcaattttcattatttctcgtgggtctcattatcaaacctttacttatttcggcatatttcctctgggcttcttctagtttctgccttacaagcaatgctgttctgtaaatttattgaaacctctggaacatttcacctttagagatggaggatggaaggattggtaccagaagagggctaagatacgttttctgtcttgagctgaaagcacagtctactctccttcgttttgtcgatgagaaagttgaggccagaggggaggtgacatgtttagagtcacccagctggttagtgacagaaaaagcgtgagagttgtctaggattcctgccactttggtccctggcctctcctgggggaggctgctgttcttaggtgctctaagcttaatccctcagaatgtgtggacaggtcagcttagaagagatggggagattcaggatccccctgtgccagagcacagcctcaccggatgctgcttcccacactgaagtgtcctgtccgaccattgctatctgaggcatccacaagcaggtaggaaagctggcgagccattttacttcctgaggacaattccccagccacaggctctgagtcaaatttctatttggtaagcatcctagcagcaaagtcctgcactcagaccagccaaaaaacagcccccattccaagtacttggtgtcaaaagtccccgaacgacttttaaacccaagtcttcttaaggtttcagtactgtggtggctttagcagttgtttttgtgcaactataaattatttaaatcatctgagatgacagtcaattttacaaaccaggtacatattaatttgtataattttgtatatgctctggtacactacctgaactaacgaagggtagaactaattctgtttgtcagtgttcacacctgtaacattaggaggatatgtctgcattgcttatttctttatgttggtgtttctgtggcaaagccctgcacatggcatttctgaaaagccttaaatctttaagatgttgcatgtagggtatgcagtgcaaaaggctgcctcagaactgtgagcccttttgtaagctggaagcatttctcttactactgttacttttgtaggaagttttcaattcagagctgccaaagtgttcccgtaagcagtgccttagtaataccttagtcatgccgccagccttttcttacaccaattcctaatgttcatttacgaattggcccaatattggaaacaaaacaagcaaaaattgtcttcatttttgttttgtaagcccattttttctccagttctataggaaactgactgcttggtgtaaaatccgaaactggacacaagtcagttctttcaccacactcaaatgtatataccaaaacaaaaggttgcaacttcatagtttactatgaaaagcaaattgtactttttaatgttgccttttaaattcatgaccaaatacttagctatttgtgaatcttctgcactctagcatgaaagtgcctttggtttgagattccagcttagaaaagtgctgccataataacgataatttgtagagagaccaaaaatattttgagatcaccgtaatgcctttggtttaccgggatgagtaaccaaccacaggcctctgttcacaagagcacgacgtggtccccgcctgctgctagtctgtctgccactgggggcctcccaacatccatagcacacttcagcggaaggaccccagaaactgttgtgtttgtgtgtgctgatgacctagtgtgtcatttcacctcgtcacccagccctgcgtccggatgaggggacttctgcacaaatgacagaatctcggctggtggacagatactacagctttctcctcctccttgtgttcgtgttcagtctctgtggagactttcttttccattcaaatgacagtgcgcacttatctggtttacacaatgataccattttgaaagttggaagcctcaaactgagacgacagtgcagaacaaaacaaaagtgagttagggtcgttaaaattgaagtgttcttcttagggcaaacatgttgactccgagtattgtgtatgaatgtgctacgagaaacttccaaagagcaccattcacaatttggcattttcaaagaatgttccagccctcaaaggggcaactctttaaagtccttgttggcttttatccaaaccttgtagaaattgggaaagctgatagaggtaaggaagacgagtgaaaaggacaagaaggccaaacaccagccaaaaagaaactaggaaaaaaagattttctttgctaatatagatgtaaaaataacatcagacatctttgaaaattagcctctaaactcttaatacatacgttctgtgtgtctctacctggcgtctttaagaatatcctctctgggctctgaaattttaggagtgattcttatccactccaagttgtaagtatttgtagaaatttgtgcaaacaaacaaaaactatcaaatgaaaagaaaatgtactcaacctaacttatagttagcagctggaattctcaactcttccctgccagcactataccacagtgtggaagaaattagtcaaatgcttgttttcctgcttctcttttcaactgttactgtgctttgtttgaaagtagttttctctctcaaagccgttgcttatatcgttaagaatgaaggtttgtgtttaaaatttattgcattgcaaagggtagtttcactgaagtcatgcaccattaaataagatgaaatatttgtatttattgtcctacttcctaagccgtaacttcttttcctctgtgaatttgcattgagtcactcatgctacactacatcgctttagtatttgagatggcatttatgtttcctctcgtttatcatgaaatggggtcagattccatcagattccacctctgtcaggtggactcttgtctgccttccatgatgagattttttttctccttcccctttctttaagagaggctgacagatctaggtgtcaatcaattggaaaccagtctctgattttttttcattagttattttctatcattagtttcactgtgtaaattagatatcaactgcacttctttaaaaaaaaatacatctccctattacctccttgaaagatttacttctgtaggcctttttcaataggctcatgactgcagacaaggaaaaaaaaagtaaaaacaaaaacagtatgtgcctgaaaatgacaaaaaaaaaatttgtaacatttaaaaaagaaacctgaatagcctttaattctttaataatacacttaaattttatgtaaatcggttttcgccacgtgtgtttgttcacattctaaatgacttaatgggattctcacggtctgtgtctttgtgtcacgtgtataaaatgggcttgtgatgtaagcgtttcatctggtcagtggttcctttgatattgtactgctgctgggagtgggctgtggaacctgccttcgggtaactgggttcctcttgggtagattggagagatgggggtgggcgtgggcaaattctcacacatgttttcttaacctatttgcagaaactttcaaaaggcatttgattaaacctcttggcagtacagtattcttgtatttgttaacgtctgtgtttaggtactggtacctttttgttttaaaatgttctaagtgttggctttaaagtgaatttatctttagtatgatagttatatgaaaattataggatttgtgtgcagagaatttttttataaagtgctttgt

SEQ ID NO: 21362 - DNA, 1281 bp, Homo sapiens
  misc_feature 1..1281: note = ENST00000638666
  source 1..1281: mol_type = unassigned DNA
attgagcccagcagctggagcggcagtgagagccctgccgaaaacatggaaaggatgagtgactctgcagataagccaattgacaatgatgcagaaggggtctggagccccgacatcgagcaaagctttcaggaggccctggctatctatccaccatgtgggaggaggaaaatcatcttatcagacgaaggcaaaatgtatggtaggaatgaattgatagccagatacatcaaactcaggacaggcaagacgaggaccagaaaacaggtgtctagtcacattcaggttcttgccagaaggaaatctcgtgattttcattccaagctaaaggatcagactgcaaaggataaggccctgcagcacatggcggccatgtcctcagcccagatcgtctcggccactgccattcataacaagctggggctgcctgggattccacgcccgaccttcccaggggcgccggggttctggccgggaatgattcaaacagggcagccaggatcctcacaagacgtcaagccttttgtgcagcaggcctaccccatccagccagcggtcacagcccccattccagggtttgagcctgcatcggccccagctccctcagtccctgcctggcaaggtcgctccattggcacaaccaagcttcgcctggtggaattttcagcttttctcgagcagcagcgagacccagactcgtacaacaaacacctcttcgtgcacattgggcatgccaaccattcttacagtgacccattgcttgaatcagtggacattcgtcagatttatgacaaatttcctgaaaagaaaggtggcttaaaggaactgtttggaaagggccctcaaaatgccttcttcctcgtaaaattctgggctgatttaaactgcaatattcaagatgatgctggggctttttatggtgtaaccagtcagtacgagagttctgaaaatatgacagtcacctgttccaccaaagtttgctcctttgggaagcaagtagtagaaaaagtagagacggagtatgcaaggtttgagaatggccgatttgtataccgaataaaccgctccccaatgtgtgaatatatgatcaacttcatccacaagctcaaacacttaccagagaaatatatgatgaacagtgttttggaaaacttcacaattttattggtggtaacaaacagggatacacaagaaactctactctgcatggcctgtgtgtttgaagtttcaaatagtgaacacggagcacaacatcatatttacaggcttgtaaaggactga

SEQ ID NO: 21363 - DNA, 3075 bp, Homo sapiens
  misc_feature 1..3075: note = ENST00000334310
  source 1..3075: mol_type = unassigned DNA
tcgcagttaccaccaaacccaggaggagactctccctggaaaacttcccttccctttcggtttattttcttgaaaaggctccaggcttcggcttggaaaatcccaccgccaaaattgagcccagcagctggagcggcagtgagagccctgccgaaaacatggaaaggatgagtgactctgcagataagccaattgacaatgatgcagaaggggtctggagccccgacatcgagcaaagctttcaggaggccctggctatctatccaccatgtgggaggaggaaaatcatcttatcagacgaaggcaaaatgtatggtaggaatgaattgatagccagatacatcaaactcaggacaggcaagacgaggaccagaaaacaggtgtctagtcacattcaggttcttgccagaaggaaatctcgtgattttcattccaagctaaaggtaacaagcatggatcagactgcaaaggataaggccctgcagcacatggcggccatgtcctcagcccagatcgtctcggccactgccattcataacaagctggggctgcctgggattccacgcccgaccttcccaggggcgccggggttctggccgggaatgattcaaacagggcagccaggatcctcacaagacgtcaagccttttgtgcagcaggcctaccccatccagccagcggtcacagcccccattccagggtttgagcctgcatcggccccagctccctcagtccctgcctggcaaggtcgctccattggcacaaccaagcttcgcctggtggaattttcagcttttctcgagcagcagcgagacccagactcggctgatttaaactgcaatattcaagatgatgctggggctttttatggtgtaaccagtcagtacgagagttctgaaaatatgacagtcacctgttccaccaaagtttgctcctttgggaagcaagtagtagaaaaagtagagacggagtatgcaaggtttgagaatggccgatttgtataccgaataaaccgctccccaatgtgtgaatatatgatcaacttcatccacaagctcaaacacttaccagagaaatatatgatgaacagtgttttggaaaacttcacaattttattggtggtaacaaacagggatacacaagaaactctactctgcatggcctgtgtgtttgaagtttcaaatagtgaacacggagcacaacatcatatttacaggcttgtaaaggactgaacatggttatttatatatatagatatctgtatatacacacacacatatgtgcacacacacactctctctccattatcgaacgactgactgtaaacctcaccacacagggtggtgccctggccccgaggtcaccccgacttttctaaatcttgtttgagtgaagtcattttttcatgtgttcatactatcattgtagctgtgaagttctggtacagttgtaaaaagagaaattgagttgtttctctatgttcttcagatgtgcagcccacaattcctcgggaaaggtgaacctgaacaacccaagtctctctctgcagagccctgtttctaattgtggtagaaaatattgagacagagcatttgccatgggacatttacagcctttatacaaatgtatttagttctcttttttccaacataaaattcttgttttaagatacaagtaaaattaatctttaaatataaatgtaaattagtacacaaaactaagaatctttagacttatctttgtaactaattagggtggaagttatgaaagaatgtaattcactaaattattttttaaatgaaacctttttttttctttttgaaaccaaatgttaaactatagccttaagaaatgcttggtagaagtgtcctaatgagacaaatttgtacttttatcctcaaggttaacactaatctcctaatccattaaactcttgaacaggtattacaaaggaagaaaacttcaccccttatccttaacatatatagtatatttaaaaaatataaaattgtattgtactaatgtgatgatggattatttaatgaaaaagaaaaaatggctctttttgcaataagtagatacatactgaaaaaatctaaacttacaatgtttatagtcttgtgtgtgcagttatattttatatggacgaccaaattttttattaagatgagtaaatatttgaaccactgaattttaataacaaaattttaaaattggcatgaatacggaatactgcactgtgagatgcaaagtatacagaatctgtggctgggagaaaatttcatcaaatagacaagtaaaaggctcatcagttttagcatctctgctccccagaaaattgtaagcatcctcaccagcctgtggatacattctttatttctagtgacccaatatgcatattaacctgctataactagggctatatgtgtaggtatgtgtatacatatacacaaatgcacatatagagttaacacatttagtgaacacttgtttagtgtcactcagtttgctaggtgctgatatgtacgtatatctcaatgtgtctgtagacttagatacatcctcttgaagcacatccatttctttagcgtctctcagtaagttacagtacttgtttgacttaggtttaagaggcccagctacctatctctgaccttttcaaataggctcatttgggagattcttttgccaggagagattcaactttccaatctaagtattccagagcattgcccaggcagagttggtttgatgtggccagatgttttgagttatttcccttaagtgtttcactggggagagaacagggagtgctcctccagcttcccaaagaaatatgtttttgtaagtggtaggaacatgtgcacacaatagaacatgaaataagttttttaacttgtaaaacatgtcaagatttttccaccaagctagaaaataaaaaacttagttctaccacatccaattaacttacacacccccttccctgtctcaacacctgctttgaccctgcttttctattattacatcagtcagcatcttgtggtccctaacatgaggatgtggctggctcgtggg

SEQ ID NO: 21364 - DNA, 1637 bp, Homo sapiens
  misc_feature 1..1637: note = ENST00000358409
  source 1..1637: mol_type = unassigned DNA
gtggccccgccgccactccctccggctccctccctcccgccgcggcgcgcatctcattccagccctcattccgcgcattccagcgtcctcctcgcacactcgaggccagggggcgggagggccgcagctccggcgccgccgcgtcccgccagaacgatcgccgcggccggaagagttggcgctcggggcggactccttggaactggcttagcgcacccatcccaccttcccgcaccctgggaccggtccaacgagcgctcctccaagcggagccttggagggcacggccggcaccattacctccaacgagtggagctctcccacctcccctgaggggagcaccgcctctgggggcagtcaggcactggacaagcccatcgacaatgacgcagagggcgtgtggagcccggatattgagcagagtttccaggaggccctcgccatctacccgccctgtggcaggcgcaaaatcatcctgtcggacgagggcaagatgtatggtcggaacgagctgattgcccgctacatcaagctccggacagggaagacccgcaccaggaagcaggtctccagccacatccaggtgctggctcgtcgcaaagctcgcgagatccaggccaagctaaagttttggcaaggagctttgccaggccaagccggaacgtcccatgatgtgaagcctttctctcagcaaacctatgctgtccagcctccgctgcctctgccagggtttgagtctcctgcagggcccgccccatcgccctctgcgcccccggcacccccatggcagggccgcagcgtggccagctccaagctctggatgttggagttctctgccttcctggagcagcagcaggacccggacacgtacaacaagcacctgttcgtgcacattggccagtccagcccaagctacagcgacccctacctcgaagccgtggacatccgccaaatctatgacaaattcccggagaaaaagggtggactcaaggatctcttcgaacggggaccctccaatgccttttttcttgtgaagttctgggcagacctcaacaccaacatcgaggatgaaggcagctccttctatggggtctccagccagtatgagagccccgagaacatgatcatcacctgctccacgaaggtctgctctttcggcaagcaggtggtggagaaagttgagacagagtatgctcgctatgagaatggacactactcttaccgcatccaccggtccccgctctgtgagtacatgatcaacttcatccacaagctcaagcacctccctgagaagtacatgatgaacagcgtgctggagaacttcaccatcctgcaggtggtcaccaacagagacacacaggagaccttgctgtgcattgcctatgtctttgaggtgtcagccagtgagcacggggctcagcaccacatctacaggctggtgaaagaatgagagactcggggagcagggaggggggaagagacgtgtgtgcaggaaacggggacgtggggaggggacctgcaggggcagccccctgaagtgccaagagagctgagaggagcagttgtgactctacccaggaacaaactgtgcctgaacctgaggtgcccaaccccaaataaacccaagatgctgtgta

SEQ ID NO: 21365 - DNA, 578 bp, Homo sapiens
  misc_feature 1..578: note = ENST00000540314
  source 1..578: mol_type = unassigned DNA
attccagcgtcctcctcgcacactcgaggccagggggcgggagggccgcagctccggcgccgccgcgtcccgccagaacgatcgccgcggccggaagagttggcgctcggggcggactccttggaactggcttagcgcacccatcccaccttcccgcaccctgggaccggtaaggctggggcgcggggacttggtaggactttgccggagggcaggagtctgcgcggtgcgtgcggagctccctcccgggacgagactgggaagagcgaggcacgtggaggcggcgcgactgaggctgctggaggcgaagcggctccaggggcgggtaaggggggtggacactcgggactttgggggaaagggaggccggtgtggaaaggaccggagaggcagaaccgagagcatcggcaacagaagagacccagcacccatgcctcttttctgctgggcccttttcgagcctggaagggagagacctggaggtccaacgagcgctcctccaagcggagccttggagggcacggccggcaccattacctccaacgagtggagctctcccacctcccctgaggggagca

SEQ ID NO: 21366 - DNA, 570 bp, Homo sapiens
  misc_feature 1..570: note = ENST00000536826
  source 1..570: mol_type = unassigned DNA
ttccagcgtcctcctcgcacactcgaggccagggggcgggagggccgcagctccggcgccgccgcgtcccgccagaacgatcgccgcggccggaagagttggcgctcggggcggactccttggaactggcttagcgcacccatcccaccttcccgcaccctgggaccggtaaggctggggcgcggggacttggtaggactttgccggagggcaggagtctgcgcggtgcgtgcggagctccctcccgggacgagactgggaagagcgaggcacgtggaggcggcgcgactgaggctgctggaggcgaagcggctccaggggcgggtccaacgagcgctcctccaagcggagccttggagggcacggccggcaccattacctccaacgagtggagctctcccacctcccctgaggggagcaccgcctctgggggcagtcaggcactggacaagcccatcgacaatgacgcagagggcgtgtggagcccggatattgagcagagtttccaggaggccctcgccatctacccgccctgtggcaggcgcaaaatcatcctgtcggacgagggca

SEQ ID NO: 21367 - DNA, 1690 bp, Homo sapiens
  misc_feature 1..1690: note = ENST00000359864
  source 1..1690: mol_type = unassigned DNA
gtcctcctcgcacactcgaggccagggggcgggagggccgcagctccggcgccgccgcgtcccgccagaacgatcgccgcggccggaagagttggcgctcggggcggactccttggaactggcttagcgcacccatcccaccttcccgcaccctgggaccggtccaacgagcgctcctccaagcggagccttggagggcacggccggcaccattacctccaacgagtggagctctcccacctcccctgaggggagcaccgcctctgggggcagtcaggcactggacaagcccatcgacaatgacgcagagggcgtgtggagcccggatattgagcagagtttccaggaggccctcgccatctacccgccctgtggcaggcgcaaaatcatcctgtcggacgagggcaagatgtatggtcggaacgagctgattgcccgctacatcaagctccggacagggaagacccgcaccaggaagcaggtctccagccacatccaggtgctggctcgtcgcaaagctcgcgagatccaggccaagctaaaggaccaggcagctaaggacaaggccctgcagagcatggctgccatgtcgtctgcacagatcatctccgccacggccttccacagtagcatggccctcgcccggggccccggccgcccagcagtctcagggttttggcaaggagctttgccaggccaagccggaacgtcccatgatgtgaagcctttctctcagcaaacctatgctgtccagcctccgctgcctctgccagggtttgagtctcctgcagggcccgccccatcgccctctgcgcccccggcacccccatggcagggccgcagcgtggccagctccaagctctggatgttggagttctctgccttcctggagcagcagcaggacccggacacgtacaacaagcacctgttcgtgcacattggccagtccagcccaagctacagcgacccctacctcgaagccgtggacatccgccaaatctatgacaaattcccggagaaaaagggtggactcaaggatctcttcgaacggggaccctccaatgccttttttcttgtgaagttctgggcagacctcaacaccaacatcgaggatgaaggcagctccttctatggggtctccagccagtatgagagccccgagaacatgatcatcacctgctccacgaaggtctgctctttcggcaagcaggtggtggagaaagttgagacagagtatgctcgctatgagaatggacactactcttaccgcatccaccggtccccgctctgtgagtacatgatcaacttcatccacaagctcaagcacctccctgagaagtacatgatgaacagcgtgctggagaacttcaccatcctgcaggtggtcaccaacagagacacacaggagaccttgctgtgcattgcctatgtctttgaggtgtcagccagtgagcacggggctcagcaccacatctacaggctggtgaaagaatgagagactcggggagcagggaggggggaagagacgtgtgtgcaggaaacggggacgtggggaggggacctgcaggggcagccccctgaagtgccaagagagctgagaggagcagttgtgactctacccaggaacaaactgtgcctgaacctgaggtgcccaaccccaaataaacccaagatgctgtgtattttcaga

SEQ ID NO: 21368 - DNA, 801 bp, Homo sapiens
  misc_feature 1..801: note = ENST00000543035
  source 1..801: mol_type = unassigned DNA
cctccctccgcgcgctccgctccgctccgctgggcgcaccggggccggtcggcgcggggtgggcttggccccgcggccccgccttcactgcgccgcccgtcggccccggccggagcccggctctgcgcgctgacgccctgtcgtccccgcagaacgatcgccgcggccggaagagttggcgctcggggcggactccttggaactggcttagcgcacccatcccaccttcccgcaccctgggaccggtccaacgagcgctcctccaagcggagccttggagggcacggccggcaccattacctccaacgagtggagctctcccacctcccctgaggggagcaccgcctctgggggcagtcaggcactggacaagcccatcgacaatgacgcagagggcgtgtggagcccggatattgagcagagtttccaggaggccctcgccatctacccgccctgtggcaggcgcaaaatcatcctgtcggacgagggcaagatgtatggtcggaacgagctgattgcccgctacatcaagctccggacagggaagacccgcaccaggaagcaggtctccagccacatccaggtgctggctcgtcgcaaagctcgcgagatccaggccaagctaaaggaccaggcagctaaggacaaggccctgcagagcatggctgccatgtcgtctgcacagatcatctccgccacggccttccacagtagcatggccctcgcccggggccccggccgcccagcagtctcagggttttggcaaggagctttgccaggccaagccggaacgtcccatga

SEQ ID NO: 21369 - DNA, 1396 bp, Homo sapiens
  misc_feature 1..1396: note = ENST00000397122
  source 1..1396: mol_type = unassigned DNA
tctgcgcgctgacgccctgtcgtccccgcagaacgatcgccgcggccggaagagttggcgctcggggcggactccttggaactggcttagcgcacccatcccaccttcccgcaccctgggaccggtcggaacgagctgattgcccgctacatcaagctccggacagggaagacccgcaccaggaagcaggtctccagccacatccaggtgctggctcgtcgcaaagctcgcgagatccaggccaagctaaaggaccaggcagctaaggacaaggccctgcagagcatggctgccatgtcgtctgcacagatcatctccgccacggccttccacagtagcatggccctcgcccggggccccggccgcccagcagtctcagggttttggcaaggagctttgccaggccaagccggaacgtcccatgatgtgaagcctttctctcagcaaacctatgctgtccagcctccgctgcctctgccagggtttgagtctcctgcagggcccgccccatcgccctctgcgcccccggcacccccatggcagggccgcagcgtggccagctccaagctctggatgttggagttctctgccttcctggagcagcagcaggacccggacacgtacaacaagcacctgttcgtgcacattggccagtccagcccaagctacagcgacccctacctcgaagccgtggacatccgccaaatctatgacaaattcccggagaaaaagggtggactcaaggatctcttcgaacggggaccctccaatgccttttttcttgtgaagttctgggcagacctcaacaccaacatcgaggatgaaggcagctccttctatggggtctccagccagtatgagagccccgagaacatgatcatcacctgctccacgaaggtctgctctttcggcaagcaggtggtggagaaagttgagacagagtatgctcgctatgagaatggacactactcttaccgcatccaccggtccccgctctgtgagtacatgatcaacttcatccacaagctcaagcacctccctgagaagtacatgatgaacagcgtgctggagaacttcaccatcctgcaggtggtcaccaacagagacacacaggagaccttgctgtgcattgcctatgtctttgaggtgtcagccagtgagcacggggctcagcaccacatctacaggctggtgaaagaatgagagactcggggagcagggaggggggaagagacgtgtgtgcaggaaacggggacgtggggaggggacctgcaggggcagccccctgaagtgccaagagagctgagaggagcagttgtgactctacccaggaacaaactgtgcctgaacctgaggtgcccaaccccaaataaacccaagatgctgtgtattttca

SEQ ID NO: 21370 - DNA, 641 bp, Homo sapiens
  misc_feature 1..641: note = ENST00000443986
  source 1..641: mol_type = unassigned DNA
gcagaacgatcgccgcggccggaagagttggcgctcggggcggactccttggaactggcttagcgcacccatcccaccttcccgcaccctgggaccggtccaacgagcgctcctccaagcggagccttggagggcacggccggcaccattacctccaacgagtggagctctcccacctcccctgaggggagcaccgcctctgggggcagtcaggcactggacaagcccatcgacaatgacgcagagggcgtgtggagcccggatattgagcagagtttccaggaggccctcgccatctacccgccctgtggcaggcgcaaaatcatcctgtcggacgagggcaagatgtatggtctccagccacatccaggtgctggctcgtcgcaaagctcgcgagatccaggccaagctaaagttttggcaaggagctttgccaggccaagccggaacgtcccatgatgtgaagcctttctctcagcaaacctatgctgtccagcctccgctgcctctgccagggtttgagtctcctgcagggcccgccccatcgccctctgcgcccccggcacccccatggcagggccgcagcgtggccagctccaagctctggatgttggagttctctgccttcctggagcagcagc

SEQ ID NO: 21371 - DNA, 567 bp, Homo sapiens
  misc_feature 1..567: note = ENST00000544666
  source 1..567: mol_type = unassigned DNA
agggaagacccgcaccaggaagcaggtctccagccacatccaggtgctggctcgtcgcaaagctcgcgagatccaggccaagctaaagacaggtgctgagctaggcacctgtggtagagaggaccaggcagctaaggacaaggccctgcagagcatggctgccatgtcgtctgcacagatcatctccgccacggccttccacagtagcatggccctcgcccggggccccggccgcccagcagtctcagggttttggcaaggagctttgccaggccaagccggaacgtcccatgatgtgaagcctttctctcagcaaacctatgctgtccagcctccgctgcctctgccagggtttgagtctcctgcagggcccgccccatcgccctctgcgcccccggcacccccatggcagggccgcagcgtggccagctccaagctctggatgttggagttctctgccttcctggagcagcagcaggacccggacacgtacaacaagcacctgttcgtgcacattggccagtccagcccaagctacagcgacccctacctcgaagccgtggacat

SEQ ID NO: 21372 - DNA, 3687 bp, Homo sapiens
  misc_feature 1..3687: note = ENST00000381501
  source 1..3687: mol_type = unassigned DNA
gggcggggcggggcgctttgctctggactctggggcgctaggctccggactccgcggcgcagactgcacctcgcagtctccccaggtccgcccagcagccgcgcttcagccagaatactgggatcttcagtggcaggaggagtaatcagaagacggagatgaattttaacactattttggaggagattcttattaaaaggtcacagcagaaaaagaagacatcgcccttaaactacaaagagagactttttgtacttacaaagtccatgctaacctactatgagggtcgagcagagaagaaatacagaaaggggtttattgatgtttcaaaaatcaagtgtgtggaaatagtgaagaatgatgatggtgtcattccctgtcaaaataagtatccatttcaggttgttcatgatgctaacacactttacatttttgcacctagtccacaaagcagggacctgtgggtgaagaagttaaaagaagaaataaagaacaacaataatattatgattaaatatcatcctaaattctggacagatggaagttatcagtgttgtagacaaactgaaaaattagcacccggatgtgaaaaatacaatctttttgagagcagtataagaaaagcactacctccagcaccagaaacaaagaagcgaaggcctcccccaccaattccactagaagaagaagataatagtgaagaaatcgttgtagccatgtatgatttccaagcagcagaaggacatgatctcagattagagagaggccaagagtatctcattttagaaaagaatgatgttcattggtggagagcaagagataaatatgggaatgaaggatatatcccaagtaattacgtaacgggaaagaaatcaaacaacttagatcaatatgaatggtattgcagaaatatgaatagaagcaaggcagagcaactcctccgcagtgaagataaagaaggtggttttatggtaagggattccagtcaaccaggcttgtacacagtctccctttataccaagtttggaggagaaggttcatcgggttttaggcattatcatataaaggaaacaacaacatctccaaagaagtattacctagctgaaaaacatgcttttggctccattcctgagattattgaatatcataagcacaatgcagcaggacttgtcaccaggcttcggtacccagttagtgtgaaagggaagaatgcacccaccactgcaggattcagctatgagaaatgggagattaacccttcagaactgacctttatgagggaattgggaagtggactgtttggagtggtgaggcttggcaaatggcgagcccagtacaaagtcgcaatcaaagctattcgggaaggtgcaatgtgcgaggaggactttatagaagaagctaaagtgatgatgaaactgacacacccgaagttagtgcagctttatggtgtgtgcacccagcagaaaccaatatacattgttactgagttcatggaaaggggctgccttctgaatttcctccgacagagacaaggtcatttcagtagagacgtactgctgagcatgtgtcaggatgtgtgtgaagggatggagtatctggagagaaacagcttcatccacagagatctggctgccagaaattgtctagtaagtgaggcgggagttgtaaaagtatctgattttggaatggccaggtatgttctggatgatcagtacacaagttcttctggtgctaagtttcctgtgaagtggtgtccacctgaagtgtttaattacagccgcttcagcagcaaatcagatgtctggtcatttggtgttttaatgtgggaagtattcacggaaggcagaatgccttttgaaaaatacaccaattatgaagtggtaaccatggttactcgaggccaccgactctaccagccgaagttggcgtccaactatgtgtatgaggtgatgctgagatgttggcaggagaaaccagagggaaggccttctttcgaagatctgctgcgcacaatagatgaactagttgaatgtgaagaaacttttggaagataagtgatgtgtgaccagtggctcccagattcccaagcacaaggaaggatgggcattttgtggcttttaatttattgagcacttggacatgtagatcattttacttatacagtggaaacacataaataatttgcttctagaccagcctctgtctagacttgcttctagacagaatctcccagagtgtggaaatgttgccttagaaatggtgattaaaatcactcatttctattcattcctcaggcacttgagtgacagttgtttaccaggcactgtgtgtagccccagggtttggccattcaggggtgcacacatgggaccatgttagctgatgccagttgaaggccagggtatttgggaaggggaagggtattagagtcatgaccaagcaacccttctttttccctttgacttctacagaaatctgggcctgagacattgtctacaattgggttctagatacatcaggaacccatcttggataaataaatacctatcttttgttttgaaaacatctcagttttcaagactgctcttagtattacatgaacaatatttgtatgctgtatatattgtaaatatatataatatataaagttatatatttatgagaaacacgaattgtcttttaattgaaacttttaatcctgtagtataggagttcaccttcttaggactagagactgtgccttatagctgttaattcatttccccctgaacatcaaatatgcctgaagagaagaaagtctagattcttctatgagtaacgccccctcctcactcaggtaaatgtgtctggggatgcctgtccagcttaaccacgtgcatttggcctatgtaatcctgcccatggtggccgcagctaatcagaatcagatggaaaattaaaccgggtaatctacttctaagccttaagaatattccctgggacacagacactataattggaagtgctgagctctggggcagaaggatcaggtgaccttcgcaacaaagtttgcccccacctcacataggacccggaagcagcctgagctgtggcggaggatccaggaagctacggagagaagcagccagcatggtgttccgtgcctcccggacgtttttcaggaggcctggttggacttgggttcctggatggtgggattgttgtacagcctctcaggagaccctgctgtcaagactgtgtgtgtggatttctcacccttagaagctctactaagacatcaacggaattagggccttcctttttgccttgtgagcgccaaggaaaagaaactatctcggtcacgtgagcgccagcgaaaagaaactgtatcagtcatccagagaccgtttattgcccaacacgttattcttgctgttggtggggtaactagccgaggaagacacagcgccttcccttcaggagttgcgtctcctctgcaggccacgatggtctgctctggagcattgggtgaacacacaggctggctgctctgggcagcgccttcactctgaccctggagaaccatttcatttcatcctggtcagtctagagtctgtgcaccaggcagtccatccactgaaggctgtgtttattcttttcctgtgcccctcataatggaagaaagtaaactgcttatcccgagcctta

SEQ ID NO: 21373 - DNA, 2446 bp, Homo sapiens
  misc_feature 1..2446: note = ENST00000505452
  source 1..2446: mol_type = unassigned DNA
aatactgggatcttcagtggcaggaggagtaatcagaagacggagatgaattttaacactattttggaggagattcttattaaaaggtcacagcagaaaaagaagacatcgcccttaaactacaaagagagactttttgtacttacaaagtccatgctaacctactatgagggtcgagcagagaagaaatacagaaaggggtttattgatgtttcaaaaatcaagtgtgtggaaatagtgaagaatgatgatggtgtcattccctgtcaaaataagtatccatttcagtccacaaagcagggacctgtgggtgaagaagttaaaagaagaaataaagaacaacaataatattatgattaaatatcatcctaaattctggacagatggaagttatcagtgttgtagacaaactgaaaaattagcacccggatgtgaaaaatacaatctttttgagagcagtataagaaaagcactacctccagcaccagaaacaaagaagcgaaggcctcccccaccaattccactagaagaagaagataatagtgaagaaatcgttgtagccatgtatgatttccaagcagcagaaggacatgatctcagattagagagaggccaagagtatctcattttagaaaagaatgatgttcattggtggagagcaagagataaatatggatggtattgcagaaatatgaatagaagcaaggcagagcaactcctccgcagtgaagataaagaaggtggttttatggtaagggattccagtcaaccaggcttgtacacagtctccctttataccaagtttggaggagaaggttcatcgggttttaggcattatcatataaaggaaacaacaacatctccaaagaagtattacctagctgaaaaacatgcttttggctccattcctgagattattgaatatcataagcacaatgcagcaggacttgtcaccaggcttcggtacccagttagtgtgaaagggaagaatgcacccaccactgcaggattcagctatgagaaatgggagattaacccttcagaactgacctttatgagggaattgggaagtggactgtttggagtggtgaggcttggcaaatggcgagcccagtacaaagtcgcaatcaaagctattcgggaaggtgcaatgtgcgaggaggactttatagaagaagctaaagtgatgatgaaactgacacacccgaagttagtgcagctttatggtgtgtgcacccagcagaaaccaatatacattgttactgagttcatggaaaggggctgccttctgaatttcctccgacagagacaaggtcatttcagtagagacgtactgctgagcatgtgtcaggatgtgtgtgaagggatggagtatctggagagaaacagcttcatccacagagatctggctgccagaaattgtctagtaagtgaggcgggagttgtaaaagtatctgattttggaatggccaggtatgttctggatgatcagtacacaagttcttctggtgctaagtttcctgtgaagtggtgtccacctgaagtgtttaattacagccgcttcagcagcaaatcagatgtctggtcatttggtgttttaatgtgggaagtattcacggaaggcagaatgccttttgaaaaatacaccaattatgaagtggtaaccatggttactcgaggccaccgactctaccagccgaagttggcgtccaactatgtgtatgaggtgatgctgagatgttggcaggagaaaccagagggaaggccttctttcgaagatctgctgcgcacaatagatgaactagttgaatgtgaagaaacttttggaagataagtgatgtgtgaccagtggctcccagattcccaagcacaaggaaggatgggcattttgtggcttttaatttattgagcacttggacatgtagatcattttacttatacagtggaaacacataaataatttgcttctagaccagcctctgtctagacttgcttctagacagaatctcccagagtgtggaaatgttgccttagaaatggtgattaaaatcactcatttctattcattcctcaggcacttgagtgacagttgtttaccaggcactgtgtgtagccccagggtttggccattcaggggtgcacacatgggaccatgttagctgatgccagttgaaggccagggtatttgggaaggggaagggtattagagtcatgaccaagcaacccttctttttccctttgacttctacagaaatctgggcctgagacattgtctacaattgggttctagatacatcaggaacccatcttggataaataaatacctatcttttgttttgaaaacatctcagttttcaagactgctcttagtattacatgaacaatatttgtatgctgtatatattgtaaatatatataatatataaagttatatatttatgagaaa

SEQ ID NO: 21374 - DNA, 681 bp, Homo sapiens
  misc_feature 1..681: note = ENST00000515146
  source 1..681: mol_type = unassigned DNA
aggacttgtcaccaggcttcggtacccagttagtgtgaaagggaagaatgcacccaccactgcaggattcagctatgagaaatgggagattaacccttcagaactgacctttatgagggaattgggaagtggactgtttggagtggtgaggcttggcaaatggcgagcccagtacaaagtcgcaatcaaagctattcgggaaggtgcaatgtgcgaggaggactttatagaagaagctaaagtgatgatgctgccagaaattgtctagtaagtgaggcgggagttgtaaaagtatctgattttggaatggccaggtatgttctggatgatcagtacacaagttcttctggtgctaagtttcctgtgaagtggtgtccacctgaagtgtttaattacagccgcttcagcagcaaatcagatgtctggtcatttggtgttttaatgtgggaagtattcacggaaggcagaatgccttttgaaaaatacaccaattatgaagtggtaaccatggttactcgaggccaccgactctaccagccgaagttggcgtccaactatgtgtatgaggtgatgctgagatgttggcaggagaaaccagagggaaggccttctttcgaagatctgctgcgcacaatagatgaactagttgaatgtgaagaaacttttggaagataagtgatg

SEQ ID NO: 21375 - DNA, 436 bp, Homo sapiens
  misc_feature 1..436: note = ENST00000511150
  source 1..436: mol_type = unassigned DNA
aagaaaagaaaaaaaaaagacaattggtaaagattatgtaataatgccttattgcaaatacaactttctgacctgcctattcatttttttcaaatacacaatggaaatacttccataggggtaaaaacaacttattaaagggtgtttccactctctgcaaatgttgactaggttacactaaatttaatataaatagaacttacattttcctacttaaatgatagaatttttaaactaatataccatcataatgttgttttccaggctgccagaaattgtctagtaagtgaggcgggagttgtaaaagtatctgattttggaatggccaggtatgttctggatgatcagtacacaagttcttctggtgctaagtttcctgtgaagtggtgtccacctgaagtgtttaattacagccgcttcagcagcaaatcagatg

SEQ ID NO: 21376 - DNA, 814 bp, Homo sapiens
  misc_feature 1..814: note = ENST00000511471
  source 1..814: mol_type = unassigned DNA
agagtagcagtcttctgcacaggatgttgtccattcaccttggaactgccatccacaaacctagcaactcttggtaggataaagaaggtggttttatggtaagggattccagtcaaccaggcttgtacacagtctccctttataccaagtttggagggttcatcgggttttaggcattatcatataaaggaaacaacaacatctccaaagaagtattacctagctgaaaaacatgcttttggctccattcctgagattattgaatatcataagcacaatgcagcaggacttgtcaccaggcttcggtacccagttagtgtgaaagggaagaatgcacccaccactgcaggattcagctatgagaaatgggagattaacccttcagaactgacctttatgagggaattgggaagtggactgtttggagtggtgaggcttggcaaatggcgagcccagtacaaagtcgcaatcaaagctattcgggaaggtgcaatgtgcgaggaggactttatagaagaagctaaagtgatgatgaaactgacacacccgaagttagtgcagctttatggtgtgtgcacccagcagaaaccaatatacattgttactgagttcatggaaaggggctgccttctgaatttcctccgacagagacaaggtcatttcagtagagacgtactgctgagcatgtgtcaggatgtgtgtgaagggatggagtatctggagagaaacagcttcatccacagagatctggctgccagaaattgtctagtaagtgaggcgggagttgtaaaagtatctgattttggaatggcca

SEQ ID NO: 21377 - DNA, 3836 bp, Homo sapiens
  misc_feature 1..3836: note = ENST00000519097
  source 1..3836: mol_type = unassigned DNA
ttattctcagtttcccgcctatgagaggatacccctattgtttctgaaaatgctgaccgggacccacacttccaacaaaaattcctctgcccctacagcagcagcaaaagcagcagcagaagcaacagcaacagataagtgttttgatgaattgcgagatggatagggcttgagtgcccccagccctgctgataccaaatgcctttaagatacagcctttcccatcctaatctacaaaggaaacaggaaaaaggaacttaaaactccctgtgctcagacagaaatgagactgttacagcctgcttctgtgctgttccttcttgcctctaacttgtaaacaagacgtagtaggacgatgctaatggaaagtcacaaaccgctgggtttttgaaaggatccttgggacctcatgcacatttgtggaaactggatggagagatttggggaagcatggactctttagccagcttagttctctgtggagtcagcttgctcctttctgcttccttcctaccagctactttaactatgactgtggacaagggagataacgtgaacatatctttcaaaaaggtattgattaaagaagaagatgcagtgatttacaaaaatggttccttcatccattcagtgccccggcatgaagtacctgatattctagaagtacacctgcctcatgctcagccccaggatgctggagtgtactcggccaggtatataggaggaaacctcttcacctcggccttcaccaggctgatagtccggagatgtgaagcccagaagtggggacctgaatgcaaccatctctgtactgcttgtatgaacaatggtgtctgccatgaagatactggagaatgcatttgccctcctgggtttatgggaaggacgtgtgagaaggcttgtgaactgcacacgtttggcagaacttgtaaagaaaggtgcagtggacaagagggatgcaagtcttatgtgttctgtctccctgacccctatgggtgttcctgtgccacaggctggaagggtctgcagtgcaatgaaggcatacagaggatgaccccaaagatagtggatttgccagatcatatagaagtaaacagtggtaaatttaatcccatttgcaaagcttctggctggccgctacctactaatgaagaaatgaccctggtgaagccggatgggacagtgctccatccaaaagactttaaccatacggatcatttctcagtagccatattcaccatccaccggatcctcccccctgactcaggagtttgggtctgcagtgtgaacacagtggctgggatggtggaaaagcccttcaacatttctgttaaagttcttccaaagcccctgaatgccccaaacgtgattgacactggacataactttgctgtcatcaacatcagctctgagccttactttggggatggaccaatcaaatccaagaagcttctatacaaacccgttaatcactatgaggcttggcaacatattcaagtgacaaatgagattgttacactcaactatttggaacctcggacagaatatgaactctgtgtgcaactggtccgtcgtggagagggtggggaagggcatcctggacctgtgagacgcttcacaacagcttctatcggactccctcctccaagaggtctaaatctcctgcctaaaagtcagaccactctaaatttgacctggcaaccaatatttccaagctcggaagatgacttttatgttgaagtggagagaaggtctgtgcaaaaaagtgatcagcagaatattaaagttccaggcaacttgacttcggtgctacttaacaacttacatcccagggagcagtacgtggtccgagctagagtcaacaccaaggcccagggggaatggagtgaagatctcactgcttggacccttagtgacattcttcctcctcaaccagaaaacatcaagatttccaacattacacactcctcagctgtgatttcttggacaatattggatggctattctatttcttctattactatccgttacaaggttcaaggcaagaatgaagaccagcacgttgatgtgaagataaagaatgccaccatcactcagtatcagctcaagggcctagagcctgaaacagcataccaggtggacatttttgcagagaacaacatagggtcaagcaacccagccttttctcatgaactggtgaccctcccagaatctcaagcaccagcggacctcggaggggggaagatgctgcttatagccatccttggctctgctggaatgacctgcctgactgtgctgttggcctttctgatcatattgcaattgaagagggcaaatgtgcaaaggagaatggcccaagccttccaaaacagggaagaaccagctgtgcagttcaactcagggactctggccctaaacaggaaggtcaaaaacaacccagatcctacaatttatccagtgcttgactggaatgacatcaaatttcaagatgtgattggggagggcaattttggccaagttcttaaggcgcgcatcaagaaggatgggttacggatggatgctgccatcaaaagaatgaaagaatatgcctccaaagatgatcacagggactttgcaggagaactggaagttctttgtaaacttggacaccatccaaacatcatcaatctcttaggagcatgtgaacatcgaggctacttgtacctggccattgagtacgcgccccatggaaaccttctggacttccttcgcaagagccgtgtgctggagacggacccagcatttgccattgccaatagcaccgcgtccacactgtcctcccagcagctccttcacttcgctgccgacgtggcccggggcatggactacttgagccaaaaacagtttatccacagggatctggctgccagaaacattttagttggtgaaaactatgtggcaaaaatagcagattttggattgtcccgaggtcaagaggtgtatgtgaaaaagacaatgggaaggctcccagtgcgctggatggccatcgagtcactgaattacagtgtgtacacaaccaacagtgatgtatggtcctatggtgtgttactatgggagattgttagcttaggaggcacaccctactgcgggatgacttgtgcagaactctacgagaagctgccccagggctacagactggagaagcccctgaactgtgatgatgaggtgtatgatctaatgagacaatgctggcgggagaagccttatgagaggccatcatttgcccagatattggtgtccttaaacagaatgttagaggagcgaaagacctacgtgaataccacgctttatgagaagtttacttatgcaggaattgactgttctgctgaagaagcggcctaggacagaacatctgtataccctctgtttccctttcactggcatgggagacccttgacacctgctgagaaaacatgcctctgccaaaggatgtgatatataagtgtacatatgtgctgtacacctgggaccttcaccactgtagatcccatgcatggatctatgtagtatgctctgactctaataggactgtatatactgttttaagaatgggctgaaatcagaatgcctgtttgtggtttcatatgcaataatatatttttttaaaaatgtggacttcataggaaggcgtgagtacaattagtataatgcataactcattgttgtcctagatattttgatatttacctttatgttgaatgctattaaatgttttcctgtgtcaaagtaaaatattgttaataaacctaacaatgaccctgatagtacaggttaagtgagagaactatatgaattct

SEQ ID NO: 21378 - DNA, 4760 bp, Homo sapiens
  misc_feature 1..4760: note = ENST00000380036
  source 1..4760: mol_type = unassigned DNA
agtttcccgcctatgagaggatacccctattgtttctgaaaatgctgaccgggacccacacttccaacaaaaattcctctgcccctacagcagcagcaaaagcagcagcagaagcaacagcaacagataagtgttttgatgaattgcgagatggatagggcttgagtgcccccagccctgctgataccaaatgcctttaagatacagcctttcccatcctaatctacaaaggaaacaggaaaaaggaacttaaaactccctgtgctcagacagaaatgagactgttacagcctgcttctgtgctgttccttcttgcctctaacttgtaaacaagacgtagtaggacgatgctaatggaaagtcacaaaccgctgggtttttgaaaggatccttgggacctcatgcacatttgtggaaactggatggagagatttggggaagcatggactctttagccagcttagttctctgtggagtcagcttgctcctttctggaactgtggaaggtgccatggacttgatcttgatcaattccctacctcttgtatctgatgctgaaacatctctcacctgcattgcctctgggtggcgcccccatgagcccatcaccataggaagggactttgaagccttaatgaaccagcaccaggatccgctggaagttactcaagatgtgaccagagaatgggctaaaaaagttgtttggaagagagaaaaggctagtaagatcaatggtgcttatttctgtgaagggcgagttcgaggagaggcaatcaggatacgaaccatgaagatgcgtcaacaagcttccttcctaccagctactttaactatgactgtggacaagggagataacgtgaacatatctttcaaaaaggtattgattaaagaagaagatgcagtgatttacaaaaatggttccttcatccattcagtgccccggcatgaagtacctgatattctagaagtacacctgcctcatgctcagccccaggatgctggagtgtactcggccaggtatataggaggaaacctcttcacctcggccttcaccaggctgatagtccggagatgtgaagcccagaagtggggacctgaatgcaaccatctctgtactgcttgtatgaacaatggtgtctgccatgaagatactggagaatgcatttgccctcctgggtttatgggaaggacgtgtgagaaggcttgtgaactgcacacgtttggcagaacttgtaaagaaaggtgcagtggacaagagggatgcaagtcttatgtgttctgtctccctgacccctatgggtgttcctgtgccacaggctggaagggtctgcagtgcaatgaagcatgccaccctggtttttacgggccagattgtaagcttaggtgcagctgcaacaatggggagatgtgtgatcgcttccaaggatgtctctgctctccaggatggcaggggctccagtgtgagagagaaggcatacagaggatgaccccaaagatagtggatttgccagatcatatagaagtaaacagtggtaaatttaatcccatttgcaaagcttctggctggccgctacctactaatgaagaaatgaccctggtgaagccggatgggacagtgctccatccaaaagactttaaccatacggatcatttctcagtagccatattcaccatccaccggatcctcccccctgactcaggagtttgggtctgcagtgtgaacacagtggctgggatggtggaaaagcccttcaacatttctgttaaagttcttccaaagcccctgaatgccccaaacgtgattgacactggacataactttgctgtcatcaacatcagctctgagccttactttggggatggaccaatcaaatccaagaagcttctatacaaacccgttaatcactatgaggcttggcaacatattcaagtgacaaatgagattgttacactcaactatttggaacctcggacagaatatgaactctgtgtgcaactggtccgtcgtggagagggtggggaagggcatcctggacctgtgagacgcttcacaacagcttctatcggactccctcctccaagaggtctaaatctcctgcctaaaagtcagaccactctaaatttgacctggcaaccaatatttccaagctcggaagatgacttttatgttgaagtggagagaaggtctgtgcaaaaaagtgatcagcagaatattaaagttccaggcaacttgacttcggtgctacttaacaacttacatcccagggagcagtacgtggtccgagctagagtcaacaccaaggcccagggggaatggagtgaagatctcactgcttggacccttagtgacattcttcctcctcaaccagaaaacatcaagatttccaacattacacactcctcagctgtgatttcttggacaatattggatggctattctatttcttctattactatccgttacaaggttcaaggcaagaatgaagaccagcacgttgatgtgaagataaagaatgccaccatcactcagtatcagctcaagggcctagagcctgaaacagcataccaggtggacatttttgcagagaacaacatagggtcaagcaacccagccttttctcatgaactggtgaccctcccagaatctcaagcaccagcggacctcggaggggggaagatgctgcttatagccatccttggctctgctggaatgacctgcctgactgtgctgttggcctttctgatcatattgcaattgaagagggcaaatgtgcaaaggagaatggcccaagccttccaaaacgtgagggaagaaccagctgtgcagttcaactcagggactctggccctaaacaggaaggtcaaaaacaacccagatcctacaatttatccagtgcttgactggaatgacatcaaatttcaagatgtgattggggagggcaattttggccaagttcttaaggcgcgcatcaagaaggatgggttacggatggatgctgccatcaaaagaatgaaagaatatgcctccaaagatgatcacagggactttgcaggagaactggaagttctttgtaaacttggacaccatccaaacatcatcaatctcttaggagcatgtgaacatcgaggctacttgtacctggccattgagtacgcgccccatggaaaccttctggacttccttcgcaagagccgtgtgctggagacggacccagcatttgccattgccaatagcaccgcgtccacactgtcctcccagcagctccttcacttcgctgccgacgtggcccggggcatggactacttgagccaaaaacagtttatccacagggatctggctgccagaaacattttagttggtgaaaactatgtggcaaaaatagcagattttggattgtcccgaggtcaagaggtgtatgtgaaaaagacaatgggaaggctcccagtgcgctggatggccatcgagtcactgaattacagtgtgtacacaaccaacagtgatgtatggtcctatggtgtgttactatgggagattgttagcttaggaggcacaccctactgcgggatgacttgtgcagaactctacgagaagctgccccagggctacagactggagaagcccctgaactgtgatgatgaggtgtatgatctaatgagacaatgctggcgggagaagccttatgagaggccatcatttgcccagatattggtgtccttaaacagaatgttagaggagcgaaagacctacgtgaataccacgctttatgagaagtttacttatgcaggaattgactgttctgctgaagaagcggcctaggacagaacatctgtataccctctgtttccctttcactggcatgggagacccttgacacctgctgagaaaacatgcctctgccaaaggatgtgatatataagtgtacatatgtgctgtacacctgggaccttcaccactgtagatcccatgcatggatctatgtagtatgctctgactctaataggactgtatatactgttttaagaatgggctgaaatcagaatgcctgtttgtggtttcatatgcaataatatatttttttaaaaatgtggacttcataggaaggcgtgagtacaattagtataatgcataactcattgttgtcctagatattttgatatttacctttatgttgaatgctattaaatgttttcctgtgtcaaagtaaaatattgttaataaacctaacaatgaccctgatagtacaggttaagtgagagaactatatgaattctaacaagtcataggttaatatttaagacactgaaaaatctaagtgatataaatcagattcttctctctcaattttatccctcacctgtagcagccagtcccgtttcatttagtcatgtgaccactctgtcttgtgtttccacagcctgcaagtcagtccaggatgctaacatctaaaaatagacttaaatctcattgcttacaagcctaagaatctttagagaagtatacataagtttaggataaaataatgggattttcttttcttttctctggtaatattgacttgtatattttaagaaataacagaaagcctgggtgacatttgggagacatgtgacatttatatattgaattaatatccctacatgtattgcacattgtaaaaagttttagttttgatgagttgtgagtttaccttgtatactgtaggcacactttgcactgatatatcatgagtgaataaatgtcttgcctactcacgtctcat

SEQ ID NO: 21379 - DNA, 3935 bp, Homo sapiens
  misc_feature 1..3935: note = ENST00000406359
  source 1..3935: mol_type = unassigned DNA
agacagaaatgagactgttacagcctgcttctgtgctgttccttcttgcctctaacttgtaaacaagacgtagtaggacgatgctaatggaaagtcacaaaccgctgggtttttgaaaggatccttgggacctcatgcacatttgtggaaactggatggagagatttggggaagcatggactctttagccagcttagttctctgtggagtcagcttgctcctttctggaactgtggaaggtgccatggacttgatcttgatcaattccctacctcttgtatctgatgctgaaacatctctcacctgcattgcctctgggtggcgcccccatgagcccatcaccataggaagggactttgaagccttaatgaaccagcaccaggatccgctggaagttactcaagatgtgaccagagaatgggctaaaaaagttgtttggaagagagaaaaggctagtaagatcaatggtgcttatttctgtgaagggcgagttcgaggagaggcaatcaggatacgaaccatgaagatgcgtcaacaagcttccttcctaccagctactttaactatgactgtggacaagggagataacgtgaacatatctttcaaaaaggtattgattaaagaagaagatgcagtgatttacaaaaatggttccttcatccattcagtgccccggcatgaagtacctgatattctagaagtacacctgcctcatgctcagccccaggatgctggagtgtactcggccaggtatataggaggaaacctcttcacctcggccttcaccaggctgatagtccggagatgtgaagcccagaagtggggacctgaatgcaaccatctctgtactgcttgtatgaacaatggtgtctgccatgaagatactggagaatgcatttgccctcctgggtttatgggaaggacgtgtgagaaggcttgtgaactgcacacgtttggcagaacttgtaaagaaaggtgcagtggacaagagggatgcaagtcttatgtgttctgtctccctgacccctatgggtgttcctgtgccacaggctggaagggtctgcagtgcaatgaaggcatacagaggatgaccccaaagatagtggatttgccagatcatatagaagtaaacagtggtaaatttaatcccatttgcaaagcttctggctggccgctacctactaatgaagaaatgaccctggtgaagccggatgggacagtgctccatccaaaagactttaaccatacggatcatttctcagtagccatattcaccatccaccggatcctcccccctgactcaggagtttgggtctgcagtgtgaacacagtggctgggatggtggaaaagcccttcaacatttctgttaaagttcttccaaagcccctgaatgccccaaacgtgattgacactggacataactttgctgtcatcaacatcagctctgagccttactttggggatggaccaatcaaatccaagaagcttctatacaaacccgttaatcactatgaggcttggcaacatattcaagtgacaaatgagattgttacactcaactatttggaacctcggacagaatatgaactctgtgtgcaactggtccgtcgtggagagggtggggaagggcatcctggacctgtgagacgcttcacaacagcttctatcggactccctcctccaagaggtctaaatctcctgcctaaaagtcagaccactctaaatttgacctggcaaccaatatttccaagctcggaagatgacttttatgttgaagtggagagaaggtctgtgcaaaaaagtgatcagcagaatattaaagttccaggcaacttgacttcggtgctacttaacaacttacatcccagggagcagtacgtggtccgagctagagtcaacaccaaggcccagggggaatggagtgaagatctcactgcttggacccttagtgacattcttcctcctcaaccagaaaacatcaagatttccaacattacacactcctcagctgtgatttcttggacaatattggatggctattctatttcttctattactatccgttacaaggttcaaggcaagaatgaagaccagcacgttgatgtgaagataaagaatgccaccatcactcagtatcagctcaagggcctagagcctgaaacagcataccaggtggacatttttgcagagaacaacatagggtcaagcaacccagccttttctcatgaactggtgaccctcccagaatctcaagcaccagcggacctcggaggggggaagatgctgcttatagccatccttggctctgctggaatgacctgcctgactgtgctgttggcctttctgatcatattgcaattgaagagggcaaatgtgcaaaggagaatggcccaagccttccaaaacgtgagggaagaaccagctgtgcagttcaactcagggactctggccctaaacaggaaggtcaaaaacaacccagatcctacaatttatccagtgcttgactggaatgacatcaaatttcaagatgtgattggggagggcaattttggccaagttcttaaggcgcgcatcaagaaggatgggttacggatggatgctgccatcaaaagaatgaaagaatatgcctccaaagatgatcacagggactttgcaggagaactggaagttctttgtaaacttggacaccatccaaacatcatcaatctcttaggagcatgtgaacatcgaggctacttgtacctggccattgagtacgcgccccatggaaaccttctggacttccttcgcaagagccgtgtgctggagacggacccagcatttgccattgccaatagcaccgcgtccacactgtcctcccagcagctccttcacttcgctgccgacgtggcccggggcatggactacttgagccaaaaacagtttatccacagggatctggctgccagaaacattttagttggtgaaaactatgtggcaaaaatagcagattttggattgtcccgaggtcaagaggtgtatgtgaaaaagacaatgggaaggctcccagtgcgctggatggccatcgagtcactgaattacagtgtgtacacaaccaacagtgatgtatggtcctatggtgtgttactatgggagattgttagcttaggaggcacaccctactgcgggatgacttgtgcagaactctacgagaagctgccccagggctacagactggagaagcccctgaactgtgatgatgaggtgtatgatctaatgagacaatgctggcgggagaagccttatgagaggccatcatttgcccagatattggtgtccttaaacagaatgttagaggagcgaaagacctacgtgaataccacgctttatgagaagtttacttatgcaggaattgactgttctgctgaagaagcggcctaggacagaacatctgtataccctctgtttccctttcactggcatgggagacccttgacacctgctgagaaaacatgcctctgccaaaggatgtgatatataagtgtacatatgtgctgtacacctgggaccttcaccactgtagatcccatgcatggatctatgtagtatgctctgactctaataggactgtatatactgttttaagaatgggctgaaatcagaatgcctgtttgtggtttcatatgcaataatatatttttttaaaaatgtggacttcataggaaggcgtgagtacaattagtataatgcataactcattgttgtcctagatattttgatatttacctttatgttgaatgctattaaatgttttcctgtgtcaaagtaaaatattgttaataaacctaacaatgaccctgatagtacaggttaagtgagagaactatatgaattctaacaagtcataggttaatatttaagacactgaaaaatctaagtgatataaatcagattc

SEQ ID NO: 21380 - DNA, 1543 bp, Homo sapiens
  misc_feature 1..1543: note = ENST00000519080
  source 1..1543: mol_type = unassigned DNA
gttccttcttgcctctaacttgtaaacaagacgtagtaggacgatgctaatggaaagtcacaaaccgctgggtttttgaaaggatccttgggacctcatgcacatttgtggaaactggatggagagatttggggaagcatggactctttagccagcttagttctctgtggagtcagcttgctcctttctgtgccccggcatgaagtacctgatattctagaagtacacctgcctcatgctcagccccaggatgctggagtgtactcggccaggtatataggaggaaacctcttcacctcggccttcaccaggctgatagtccggagatgtgaagcccagaagtggggacctgaatgcaaccatctctgtactgcttgtatgaacaatggtgtctgccatgaagatactggagaatgcatttgccctcctgggtttatgggaaggacgtgtgagaaggcttgtgaactgcacacgtttggcagaacttgtaaagaaaggtgcagtggacaagagggatgcaagtcttatgtgttctgtctccctgacccctatgggtgttcctgtgccacaggctggaagggtctgcagtgcaatgaaggcatacagaggatgaccccaaagatagtggatttgccagatcatatagaagtaaacagtggtaaatttaatcccatttgcaaagcttctggctggccgctacctactaatgaagaaatgaccctggtgaagccggatgggacagtgctccatccaaaagactttaaccatacggatcatttctcagtagccatattcaccatccaccggatcctcccccctgactcaggagtttgggtctgcagtgtgaacacagtggctgggatggtggaaaagcccttcaacatttctgttaaagttcttccaaagcccctgaatgccccaaacgtgattgacactggacataactttgctgtcatcaacatcagctctgagccttactttggggatggaccaatcaaatccaagaagcttctatacaaacccgttaatcactatgaggcttggcaacatattcaagtgacaaatgagattgttacactcaactatttggaacctcggacagaatatgaactctgtgtgcaactggtccgtcgtggagagggtggggaagggcatcctggacctgtgagacgcttcacaacagcttctatcggactccctcctccaagaggtctaaatctcctgcctaaaagtcagaccactctaaatttgacctggcaaccaatatttccaagctcggaagatgacttttatgttgaagtggagagaaggtctgtgcaaaaaagtgatcagcagaatattaaagttccaggcaacttgacttcggtgctacttaacaacttacatcccagggagcagtacgtggtccgagctagagtcaacaccaaggcccagggggaatggagtgaagatctcactgcttggacccttagtgacattcttcctcctcaaccagaaaacatcaagatttccaacattacacactcctcagctgtgatttctt

SEQ ID NO: 21381 - DNA, 4666 bp, Homo sapiens
  misc_feature 1..4666: note = ENST00000615002
  source 1..4666: mol_type = unassigned DNA
agtttcccgcctatgagaggatacccctattgtttctgaaaatgctgaccgggacccacacttccaacaaaaattcctctgcccctacagcagcagcaaaagcagcagcagaagcaacagcaacagataagtgttttgatgaattgcgagatggatagggcttgagtgcccccagccctgctgataccaaatgcctttaagatacagcctttcccatcctaatctacaaaggaaacaggaaaaaggaacttaaaactccctgtgctcagacagaaatgagactgttacagcctgcttctgtgctgttccttcttgcctctaacttgtaaacaagacgtagtaggacgatgctaatggaaagtcacaaaccgctgggtttttgaaaggatccttgggacctcatgcacatttgtggaaactggatggagagatttggggaagcatggactctttagccagcttagttctctgtggagtcagcttgctcctttctggaactgtggaaggtgccatggacttgatcttgatcaattccctacctcttgtatctgatgctgaaacatctctcacctgcattgcctctgggtggcgcccccatgagcccatcaccataggaagggactttgaagccttaatgaaccagcaccaggatccgctggaagttactcaagatgtgaccagagaatgggctaaaaaagttgtttggaagagagaaaaggctagtaagatcaatggtgcttatttctgtgaagggcgagttcgaggagaggcaatcaggatacgaaccatgaagatgcgtcaacaagcttccttcctaccagctactttaactatgactgtggacaagggagataacgtgaacatatctttcaaaaaggtattgattaaagaagaagatgcagtgatttacaaaaatggttccttcatccattcagtgccccggcatgaagtacctgatattctagaagtacacctgcctcatgctcagccccaggatgctggagtgtactcggccaggtatataggaggaaacctcttcacctcggccttcaccaggctgatagtccggagatgtgaagcccagaagtggggacctgaatgcaaccatctctgtactgcttgtatgaacaatggtgtctgccatgaagatactggagaatgcatttgccctcctgggtttatgggaaggacgtgtgagaaggcttgtgaactgcacacgtttggcagaacttgtaaagaaaggtgcagtggacaagagggatgcaagtcttatgtgttctgtctccctgacccctatgggtgttcctgtgccacaggctggaagggtctgcagtgcaatgaaggcatacagaggatgaccccaaagatagtggatttgccagatcatatagaagtaaacagtggtaaatttaatcccatttgcaaagcttctggctggccgctacctactaatgaagaaatgaccctggtgaagccggatgggacagtgctccatccaaaagactttaaccatacggatcatttctcagtagccatattcaccatccaccggatcctcccccctgactcaggagtttgggtctgcagtgtgaacacagtggctgggatggtggaaaagcccttcaacatttctgttaaagttcttccaaagcccctgaatgccccaaacgtgattgacactggacataactttgctgtcatcaacatcagctctgagccttactttggggatggaccaatcaaatccaagaagcttctatacaaacccgttaatcactatgaggcttggcaacatattcaagtatccatggagaaacagaggctgactaaagcaaatagtgacaaatgagattgttacactcaactatttggaacctcggacagaatatgaactctgtgtgcaactggtccgtcgtggagagggtggggaagggcatcctggacctgtgagacgcttcacaacagcttctatcggactccctcctccaagaggtctaaatctcctgcctaaaagtcagaccactctaaatttgacctggcaaccaatatttccaagctcggaagatgacttttatgttgaagtggagagaaggtctgtgcaaaaaagtgatcagcagaatattaaagttccaggcaacttgacttcggtgctacttaacaacttacatcccagggagcagtacgtggtccgagctagagtcaacaccaaggcccagggggaatggagtgaagatctcactgcttggacccttagtgacattcttcctcctcaaccagaaaacatcaagatttccaacattacacactcctcagctgtgatttcttggacaatattggatggctattctatttcttctattactatccgttacaaggttcaaggcaagaatgaagaccagcacgttgatgtgaagataaagaatgccaccatcactcagtatcagctcaagggcctagagcctgaaacagcataccaggtggacatttttgcagagaacaacatagggtcaagcaacccagccttttctcatgaactggtgaccctcccagaatctcaagcaccagcggacctcggaggggggaagatgctgcttatagccatccttggctctgctggaatgacctgcctgactgtgctgttggcctttctgatcatattgcaattgaagagggcaaatgtgcaaaggagaatggcccaagccttccaaaacgtgagggaagaaccagctgtgcagttcaactcagggactctggccctaaacaggaaggtcaaaaacaacccagatcctacaatttatccagtgcttgactggaatgacatcaaatttcaagatgtgattggggagggcaattttggccaagttcttaaggcgcgcatcaagaaggatgggttacggatggatgctgccatcaaaagaatgaaagaatatgcctccaaagatgatcacagggactttgcaggagaactggaagttctttgtaaacttggacaccatccaaacatcatcaatctcttaggagcatgtgaacatcgaggctacttgtacctggccattgagtacgcgccccatggaaaccttctggacttccttcgcaagagccgtgtgctggagacggacccagcatttgccattgccaatagcaccgcgtccacactgtcctcccagcagctccttcacttcgctgccgacgtggcccggggcatggactacttgagccaaaaacagtttatccacagggatctggctgccagaaacattttagttggtgaaaactatgtggcaaaaatagcagattttggattgtcccgaggtcaagaggtgtatgtgaaaaagacaatgggaaggctcccagtgcgctggatggccatcgagtcactgaattacagtgtgtacacaaccaacagtgatgtatggtcctatggtgtgttactatgggagattgttagcttaggaggcacaccctactgcgggatgacttgtgcagaactctacgagaagctgccccagggctacagactggagaagcccctgaactgtgatgatgaggtgtatgatctaatgagacaatgctggcgggagaagccttatgagaggccatcatttgcccagatattggtgtccttaaacagaatgttagaggagcgaaagacctacgtgaataccacgctttatgagaagtttacttatgcaggaattgactgttctgctgaagaagcggcctaggacagaacatctgtataccctctgtttccctttcactggcatgggagacccttgacacctgctgagaaaacatgcctctgccaaaggatgtgatatataagtgtacatatgtgctgtacacctgggaccttcaccactgtagatcccatgcatggatctatgtagtatgctctgactctaataggactgtatatactgttttaagaatgggctgaaatcagaatgcctgtttgtggtttcatatgcaataatatatttttttaaaaatgtggacttcataggaaggcgtgagtacaattagtataatgcataactcattgttgtcctagatattttgatatttacctttatgttgaatgctattaaatgttttcctgtgtcaaagtaaaatattgttaataaacctaacaatgaccctgatagtacaggttaagtgagagaactatatgaattctaacaagtcataggttaatatttaagacactgaaaaatctaagtgatataaatcagattcttctctctcaattttatccctcacctgtagcagccagtcccgtttcatttagtcatgtgaccactctgtcttgtgtttccacagcctgcaagtcagtccaggatgctaacatctaaaaatagacttaaatctcattgcttacaagcctaagaatctttagagaagtatacataagtttaggataaaataatgggattttcttttcttttctctggtaatattgacttgtatattttaagaaataacagaaagcctgggtgacatttgggagacatgtgacatttatatattgaattaatatccctacatgtattgcacattgtaaaaagttttagttttgatgagttgtgagtttaccttgtatactgtaggcacactttgcactgatatatcatgagtgaataaatgtcttgcctactcacgtctc

SEQ ID NO: 21382 - DNA, 2782 bp, Homo sapiens
  misc_feature 1..2782: note = ENST00000358204
  source 1..2782: mol_type = unassigned DNA
attggctgcccggccccctttgttcccgggtccgggccgcaggcccgctgcggcggactgggcggcggaagttcgacggcgccgggcgagtggctgttgagcggcgccgcgggagttccgcaggtttcccgtgttcgcagcggagccggaggccagctgaacccggccgtgggatcccggataggaggaggaggggacccataggacgcgttaacatggacctggaaaacaaagtgaagaagatgggcttaggtcacgagcaaggatttggagccccttgtttaaaatgcaaagaaaaatgtgaaggattcgaactgcacttctggagaaaaatatgtcgtaactgcaagtgtggccaagaagagcatgatgtcctcttgagcaatgaagaggatcgaaaagtgggaaaactttttgaagacaccaagtataccactctgattgcaaaactaaagtcagatggaattcccatgtataaacgcaatgttatgatattgacgaatccagttgctgccaagaagaatgtctccatcaatacagttacctatgagtgggctcctcctgtccagaatcaagcattggccaggcagtacatgcagatgctacccaaggaaaagcagccagtagcaggctcagagggggcacagtaccggaagaagcagctggcaaagcagctccctgcacatgaccaggacccttcaaagtgccatgagttgtctcccagagaggtgaaggagatggagcagtttgtgaagaaatataagagcgaagctctgggagtaggagatgtcaaacttccctgtgagatggatgcccaaggccccaaacaaatgaacattcctggaggggatagaagcaccccagcagcagtgggggccatggaggacaaatctgctgagcacaaaagaactcaatattcctgctattgctgcaaactgagtatgaaagaaggtgacccagccatctatgccgaaagggctggctatgataaactgtggcacccagcttgttttgtctgcagcacctgccatgaactcctggttgacatgatttatttttggaagaatgagaagctatactgtggcagacattactgtgacagcgagaaaccccgatgtgctggctgtgacgagctgatattcagcaatgagtatacccaggcagaaaaccagaattggcacctgaaacacttctgctgctttgactgtgatagcattctagctggggagatatacgtgatggtcaatgacaagcccgtgtgcaagccctgctatgtgaagaatcacgctgtggtgtgtcaaggatgccacaatgccatcgacccagaagtgcagcgggtgacctataacaatttcagctggcatgcatccacagagtgctttctgtgctcttgctgcagcaaatgcctcattgggcagaagttcatgccagtagaagggatggttttctgttcagtggaatgtaagaagaggatgtcttaggaggagggcacccagaagtatcgagccatagctatccaaagtggtctgcatttctactgtaaaatgcaatttgaaaaaaataaaacgcaaaaaaagaaactgtaaaggaaaccaagagattttgtttaatttttttggccattttttcttcatcaattttttttcggtctcaacttttaaacttggtttaagcatttgatttgtaaaacagtaaataattgtatctttccatagcttttcaaatgtgaaatcatttttggaagcttggatctcattaaacttcatgtctctattccatttgtgccacacacttaaaagttagtgtactgaatggaaagatgagcattcctagttctacacttcttttttccccctcatgtgtaaaatgaaaagaaaactaaatttgccctaataccaaggcgctacgtttattgcctcgtcttattcactgacctttgtaatgatacacagtgaattctttttgacaaagagaaatgcagtgtagtatgcagagctgctgttttaatgcctatgcatttactctttcctgatttaggcagaggtggcattttctttattgcatttctctatttttttaatgtaccctaccttcagtattctctttgtaagttggtgacttgcatctgtggccttgaatattttattatcacatgtggcataacagtatccacactttttagttctttatttttttttttttattttgagcaattctcctgcctcagcctcccaaatagctgggattacaggtgcatgccaccacacccagctaatttttgtatttttagtagagacaggttttcaccatgttagccaggctggtctcaaactcctgacctcagatgatccgcctgccttggcctcccaaagtgctgggattacaggtgtgggagccaccatgcctgacccacacactttttacttgtatagatgatttttggcttggacataaaagccaagccacccatttgcttttaatccaaagaacatgtatagtttttgtacccagagactatgatttatattgattgcacttgcctgccatgatttagataagattttttttgcatggtttttattctttcctaatggatcctgttttataatacttccaagcctgtccatggatatatcaaatgtcttcacttgtatattttcatggctaggtatttctaatgtttattcttccctgtgtacttctacacatagctatgcactatgaaaattaaatggaatgaatgatatgtatattactcaaaataaagtttctttcactttaa

SEQ ID NO: 21383 - DNA, 873 bp, Homo sapiens
  misc_feature 1..873: note = ENST00000461440
  source 1..873: mol_type = unassigned DNA
ccccctttgttcccgggtccgggccgcaggcccgctgcggcggactgggcggcggaagttcgacggcgccgggcgagtggctgttgagcggcgccgcgggagttccgcaggtttcccgtgttcgcagcggagccggaggccagctgaacccggccgtgggatcccggataggaggaggaggggacccataggacgcgttaacatggacctggaaaacaaagtgaagaagatgggcttaggtcacgagcaaggatttggagccccttgtttaaaatgcaaagaaaaatgtgaaggattcgaactgcacttctggagaaaaatatgtcgtaactgcaagtgtggccaagaagagcatgatgtcctcttgagcaatgaagaggatcgaaaagtgggaaaactttttgaagacaccaagtataccactctgattgcaaaactaaagtcagatggaattcccatgtataaacgcaatgttatgatattgacgaatccagttgctgccaagaagaatgtctccatcaatacagttacctatgagtgggctcctcctgtccagaatcaagcattggtaaatgatatggaacagagagtttctttattgaagttcctggagtatttatttggggcagtttctttgatgacctaatcaacttcacacatcccagatctgttattcttccggggttctcattactttgacttctgattcctgttctagtcttttgaatgtaagactagatacttcataaaatttttccaactccctagatatgtttacctttttgagggaatggtctaacgttcttaataattagatggaaatcagatgttttatatcaatctagtaactcttctagcttagtcttgagagga

SEQ ID NO: 21384 - DNA, 577 bp, Homo sapiens
  misc_feature 1..577: note = ENST00000455989
  source 1..577: mol_type = unassigned DNA
gctgcggcggactgggcggcggaagttcgacggcgccgggcgagtggctgttgagcggcgccgcgggagttccgcaggtttcccgtgttcgcagcggagccggaggccagctgaacccggccgtgggatcccggataggaggaggaggggacccataggacgcgttaacatggacctggaaaacaaagtgaagaagaaaaatatgtcgtaactgcaagtgtggccaagaagagcatgatgtcctcttgagcaatgaagaggatcgaaaagtgggaaaactttttgaagacaccaagtataccactctgattgcaaaactaaagtcagatggaattcccatgtataaacgcaatgttatgatattgacgaatccagttgctgccaagaagaatgtctccatcaatacagttacctatgagtgggctcctcctgtccagaatcaagcattggccaggcagtacatgcagatgctacccaaggaaaagcagccagtagcaggctcagagggggcacagtaccggaagaagcagctggcaaagcagctccctgcacatgaccaggacccttcaaagtgcca

SEQ ID NO: 21385 - DNA, 1022 bp, Homo sapiens
  misc_feature 1..1022: note = ENST00000492891
  source 1..1022: mol_type = unassigned DNA
actgggcggcggaagttcgacggcgccgggcgagtggctgttgagcggcgccgcgggagttccgcaggtttcccgtgttcgcagcggagccggaggccagctgaacccggccgtgggatcccggataggaggaggaggggacccataggacgcgttaacatggacctggaaaacaaagtgaagaagatgggcttaggtcacgagcaaggatttggagccccttgtttaaaatgcaaagaaaaatgtgaaggattcgaactgcacttctggagtcctgctattgctgcaaactgagtatgaaagaaggtgacccagccatctatgccgaaagggctggctatgataaactgtggcacccagcttgttttgtctgcagcacctgccatgaactcctggttgacatgatttatttttggaagaatgagaagctatactgtggcagacattactgtgacagcgagaaaccccgatgtgctggctgtgacgagctgatattcagcaatgagtatacccaggcagaaaaccagaattggcacctgaaacacttctgctgctttgactgtgatagcattctagctggggagatatacgtgatggtcaatgacaagcccgtgtgcaagccctgctatgtgaagaatcacgctgtggtgtgtcaaggatgccacaatgccatcgacccagaagtgcagcgggtgacctataacaatttcagctggcatgcatccacagagtgctttctgtgctcttgctgcagcaaatgcctcattgggcagaagttcatgccagtagaagggatggttttctgttcagtggaatgtaagaagaggatgtcttaggaggagggcacccagaagtatcgagccatagctatccaaagtggtctgcatttctactgtaaaatgcaatttgaaaaaaataaaacgcaaaaaaagaaactgtaaaggaaaccaagagattttgtttaatttttttggccattttttcttcatcaattttttttcggtctcaacttttaaacttgg

SEQ ID NO: 21386 - DNA, 961 bp, Homo sapiens
  misc_feature 1..961: note = ENST00000496871
  source 1..961: mol_type = unassigned DNA
aagttcgacggcgccgggcgagtggctgttgagcggcgccgcgggagttccgcaggtttcccgtgttcgcagcggagccggaggccagctgaacccggccgtgggatcccggataggaggaggaggggacccataggacgcgttaacatggacctggaaaacaaagtgaagaagaaaaatatgtcgtaactgcaagtgtggccaagaagagcatgatgtcctcttgagcaatgaagaggatcgaaaagtgggaaaactttttgaagacaccaagtataccactctgattgcaaaactaaagtcagatggaattcccatgtataaacgcaatgttatgatattgacgaatccagttgctgccaagaagaatgtctccatcaatacagttacctatgagtgggctcctcctgtccagaatcaagcattggtaaatgatatggaacagagagtttctttattgaagttcctggagtatttatttggggcagtttctttgatgacctaatcaacttcacacatcccagatctgttattcttccggggttctcattactttgacttctgattcctgttctagtcttttgaatgtaagactagatacttcataaaatttttccaactccctagatatgtttacctttttgagggaatggtctaacgttcttaataattagatggaaatcagatgttttatatcaatctagtaactcttctagcttagtcttgagaggatttatcttaagatggtaaagaagagaatttttgtcatagtttagaactgaaaaaaatattcaacattatctttgtgtttttttcatttcctttattaatactatataagaccaaaaagatcacagttttatatcaagctccttccactattataacaaccaaatgaaacatttggaagtcttttaaggttagttaaatcattaaagtgaattttgcgatatcatttttt

SEQ ID NO: 21387 - DNA, 2763 bp, Homo sapiens
  misc_feature 1..2763: note = ENST00000393481
  source 1..2763: mol_type = unassigned DNA
aataaataggaggttttgagggctgtttatgagcgcattccattacagtgtctttcagcggagccagagctcagccaatcctaattaagaagcaatttcagctgcagtcattgcttattataataattgtgacatttttatagccctacattgtctttctcaaagtaacggattcaggaggagtccttttctgagtagagtccacagaagaggtattctattgatgggcttaggtcacgagcaaggatttggagccccttgtttaaaatgcaaagaaaaatgtgaaggattcgaactgcacttctggagaaaaatatgtcgtaactgcaagtgtggccaagaagagcatgatgtcctcttgagcaatgaagaggatcgaaaagtgggaaaactttttgaagacaccaagtataccactctgattgcaaaactaaagtcagatggaattcccatgtataaacgcaatgttatgatattgacgaatccagttgctgccaagaagaatgtctccatcaatacagttacctatgagtgggctcctcctgtccagaatcaagcattggccaggcagtacatgcagatgctacccaaggaaaagcagccagtagcaggctcagagggggcacagtaccggaagaagcagctggcaaagcagctccctgcacatgaccaggacccttcaaagtgccatgagttgtctcccagagaggtgaaggagatggagcagtttgtgaagaaatataagagcgaagctctgggagtaggagatgtcaaacttccctgtgagatggatgcccaaggccccaaacaaatgaacattcctggaggggatagaagcaccccagcagcagtgggggccatggaggacaaatctgctgagcacaaaagaactcaatattcctgctattgctgcaaactgagtatgaaagaaggtgacccagccatctatgccgaaagggctggctatgataaactgtggcacccagcttgttttgtctgcagcacctgccatgaactcctggttgacatgatttatttttggaagaatgagaagctatactgtggcagacattactgtgacagcgagaaaccccgatgtgctggctgtgacgagctgatattcagcaatgagtatacccaggcagaaaaccagaattggcacctgaaacacttctgctgctttgactgtgatagcattctagctggggagatatacgtgatggtcaatgacaagcccgtgtgcaagccctgctatgtgaagaatcacgctgtggtgtgtcaaggatgccacaatgccatcgacccagaagtgcagcgggtgacctataacaatttcagctggcatgcatccacagagtgctttctgtgctcttgctgcagcaaatgcctcattgggcagaagttcatgccagtagaagggatggttttctgttcagtggaatgtaagaagaggatgtcttaggaggagggcacccagaagtatcgagccatagctatccaaagtggtctgcatttctactgtaaaatgcaatttgaaaaaaataaaacgcaaaaaaagaaactgtaaaggaaaccaagagattttgtttaatttttttggccattttttcttcatcaattttttttcggtctcaacttttaaacttggtttaagcatttgatttgtaaaacagtaaataattgtatctttccatagcttttcaaatgtgaaatcatttttggaagcttggatctcattaaacttcatgtctctattccatttgtgccacacacttaaaagttagtgtactgaatggaaagatgagcattcctagttctacacttcttttttccccctcatgtgtaaaatgaaaagaaaactaaatttgccctaataccaaggcgctacgtttattgcctcgtcttattcactgacctttgtaatgatacacagtgaattctttttgacaaagagaaatgcagtgtagtatgcagagctgctgttttaatgcctatgcatttactctttcctgatttaggcagaggtggcattttctttattgcatttctctatttttttaatgtaccctaccttcagtattctctttgtaagttggtgacttgcatctgtggccttgaatattttattatcacatgtggcataacagtatccacactttttagttctttatttttttttttttattttgagcaattctcctgcctcagcctcccaaatagctgggattacaggtgcatgccaccacacccagctaatttttgtatttttagtagagacaggttttcaccatgttagccaggctggtctcaaactcctgacctcagatgatccgcctgccttggcctcccaaagtgctgggattacaggtgtgggagccaccatgcctgacccacacactttttacttgtatagatgatttttggcttggacataaaagccaagccacccatttgcttttaatccaaagaacatgtatagtttttgtacccagagactatgatttatattgattgcacttgcctgccatgatttagataagattttttttgcatggtttttattctttcctaatggatcctgttttataatacttccaagcctgtccatggatatatcaaatgtcttcacttgtatattttcatggctaggtatttctaatgtttattcttccctgtgtacttctacacatagctatgcactatgaaaattaaatggaatgaatgatatgtatattactcaaaataaagtttctttcactttaa

SEQ ID NO: 21388 - DNA, 1175 bp, Homo sapiens
  misc_feature 1..1175: note = ENST00000485009
  source 1..1175: mol_type = unassigned DNA
acattgtctttctcaaagtaacggattcaggaggagtccttttctgagtagagtccacagaagaggtattctattgatgggcttaggtcacgagcaaggatttggagccccttgtttaaaatgcaaagaaaaatgtgaaggattcgaactgcacttctggagaaaaatatgtcgtaactgcaagtgtggccaagaagagcatgatgtcctcttgagcaatgaagaggatcgaaaagtgggaaaactttttgaagacaccaagtataccactctgattgcaaaactaaagtcagatggaattcccatgtataaacgcaatgttatgatattgacgaatccagttgctgccaagaagaatgtctccatcaatacagttacctatgagtgggctcctcctgtccagaatcaagcattggtaaatgatatggaacagagagtttctttattgaagttcctggagtatttatttggggcagtttctttgatgacctaatcaacttcacacatcccagatctgttattcttccggggttctcattactttgacttctgattcctgttctagtcttttgaatgtaagactagatacttcataaaatttttccaactccctagatatgtttacctttttgagggaatggtctaacgttcttaataattagatggaaatcagatgttttatatcaatctagtaactcttctagcttagtcttgagaggatttatcttaagatggtaaagaagagaatttttgtcatagtttagaactgaaaaaaatattcaacattatctttgtgtttttttcatttcctttattaatactatataagaccaaaaagatcacagttttatatcaagctccttccactattataacaaccaaatgaaacatttggaagtcttttaaggttagttaaatcattaaagtgaattttgcgatatcattttttatgtaataaaaatgttcctggtcctacagaccattccaaacatgtctgcctaaaagtttatgttttctttcaattgtacatttgtttatttagcttaagtaaacagtagtaactcagatcttacaaactgaaaaaatatataatttcatggagagaaagtgttactttttacccaactaaatctatttagtgtaccgtttttgagttttaacttcttaatatactg

SEQ ID NO: 21389 - DNA, 699 bp, Homo sapiens
  misc_feature 1..699: note = ENST00000393484
  source 1..699: mol_type = unassigned DNA
gcaccccagcagcagtgggggccatggaggacaaatctgctgagcacaaaagaactcaatattcctgctattgctgcaaactgagtatgaaagaaggtgacccagccatctatgccgaaagggctggctatgataaactgtggcacccagcttgttttgtctgcagcacctgccatgaactcctggttgacatgatttatttttggaagaatgagaagctatactgtggcagacattactgtgacagcgagaaaccccgatgtgctggctgtgacgagctgatattcagcaatgagtatacccaggcagaaaaccagaattggcacctgaaacacttctgctgctttgactgtgatagcattctagctggggagatatacgtgatggtcaatgacaagcccgtgtgcaagccctgctatgtgaagaatcacgctgtggtgagaagtgttctaaggatatggttgcctcagcctgctttaggacttgagtttatgcttttcttaaagcctcttacaaatgggaaacagaaagcagtcctcctaagtagaaagcaaattattcctaccacagggtgttaaaatcaaggcaattcaaaaacaatacatgcattgactatgagccacctcaagatttctacttgtgaaatttacaatatcaattataggtactgcttaataataaaatcctcacttaaaaaaa

SEQ ID NO: 21390 - DNA, 331 bp, Homo sapiens
  misc_feature 1..331: note = ENST00000494384
  source 1..331: mol_type = unassigned DNA
gtgggggccatggaggacaaatctgctgagcacaaaagaactcaatatctgatattcagcaatgagtatacccaggcagaaaaccagaattggcacctgaaacacttctgctgctttgactgtgatagcattctagctggggagatatacgtgatggtcaatgacaagcccgtgtgcaagccctgctatgtgaagaatcacgctgtggtgagaagtgttctaaggatatggttgcctcagcctgctttaggacttgagtttatgcttttcttaaagcctcttacaaatgggaaacagaaagcagtcctcctaagtagaaagcaaattattc

SEQ ID NO: 21391 - DNA, 911 bp, Homo sapiens
  misc_feature 1..911: note = ENST00000496912
  source 1..911: mol_type = unassigned DNA
cccgtctctactaaaaatacaaaaaaattagccgggcgtggtggcaggcgcctgtagtcccagctactcgggaggctgaggcaggagaacggcgtgaacccaggaggcggagcttgcaatgagccgagatagcaccactggactccagcctgggcgacagagtgagactcagtctcaaaaaaaaaaaaagaaagaaagaaaagaaatggcagtcttctaatgactaggttgttctggatggcttccctttcagtcctgctattgctgcaaactgagtatgaaagaaggtgacccagccatctatgccgaaagggctggctatgataaactgtggcacccagcttgttttgtctgcagcacctgccatgaactcctggttgacatgatttatttttggaagaatgagaagctatactgtggcagacattactgtgacagcgagaaaccccgatgtgctggctgtgacgagctgatattcagcaatgagtatacccaggcagaaaaccagaattggcacctgaaacacttctgctgctttgactgtgatagcattctagctggggagatatacgtgatggtcaatgacaagcccgtgtgcaagccctgctatgtgaagaatcacgctgtggtgtgtcaaggatgccacaatgccatcgacccagaagtgcagcgggtgacctataacaatttcagctggcatgcatccacagagtgctttctgtgctcttgctgcagcaaatgcctcattgggcagaagttcatgccagtagaagggatggttttctgttcagtggaatgtaagaagaggatgtcttaggaggagggcacccagaagtatcgagccatagctatccaaagtggtctgcatttctactgtaaaatgcaatttgaaaaaaataaaacgcaaaaaa

SEQ ID NO: 21392 - DNA, 488 bp, Homo sapiens
  misc_feature 1..488: note = ENST00000463746
  source 1..488: mol_type = unassigned DNA
ccctttcagtcctgctattgctgcaaactgagtatgaaagaaggtgacccagccatctatgccgaaagggctggctatgataaactgtggcacccagcttgttttgtctgcagcacctgccatgaactcctggttgacatgatttatttttggaagaatgagaagctatactgtggcagacattactgtgacagcgagaaaccccgatgtgctggctgtgacgagctgatattcagcaatgagtatacccaggcagaaaaccagaattggcacctgaaacacttctgctgctttgactgtgatagcattctagctggggagatatacgtgatggtcaatgacaagcccgtgtgcaagccctgctatgtgaagaatcacgctgtggtgagaagtgttctaaggatatggttgcctcagcctgctttaggacttgagtttatgcttttcttaaagcctcttacaaatgggaaacagaaagcagtcctcct

SEQ ID NO: 21393 - DNA, 1057 bp, Homo sapiens
  misc_feature 1..1057: note = ENST00000470612
  source 1..1057: mol_type = unassigned DNA
gtgcgctaggaccgcggcgcgccgccctccgccgttatatgaggccccgctccggccccacgcggaacccgcggctccgagccttcgccggcgtcccgacccgaggccggacccgaggccagtcccgccgctgcgcagccgaagccagtgcggggcctgagagggacgcgcgccccggggcccccgccgcgggcaccatgggcgctgcccactccgcgtctgaggaggtgcgggagctcgagggcaagaccggcttctcatcggatcagatcgagcagctccatcggagatttaagcagctgagtggagatcagcctaccattcgcaaggagaacttcaacaatgtcccggacctggagctcaaccccatccgatccaaaattgttcgtgccttcttcgacaacaggaacctgcgcaagggacccagtggcctggctgatgagatcaatttcgaggacttcctgaccatcatgtcctacttccggcccatcgacaccaccatggacgaggaacaggtggagctgtcccggaaggagaagctgagatttctgttccacatgtacgactcggacagcgacggccgcatcactctggaagaatatcgaaatgtaaagtggtcgaggagctgctgtcgggaaaccctcacatcgagaaggagtccgctcgctccatcgccgacggggccatgatggaggcggccagcgtgtgcatggggcagatggagcctgatcaggtgtacgaggggatcaccttcgaggacttcctgaagatctggcaggggatcgacattgagaccaagatgcacgtccgcttccttaacatggaaaccatggccctctgccactgacccaccgccacctccgcggagaaactgcactttgcaatggggccgcctccccgcgtagctggagcagcccaggcccggcggacagcctcttcctgcagcgccggtacatagccaaggctcgtctgcgcaccttgtgtcttgtagggtatggtatgtgggacttcgctgtttttatctccaataaaaaaaaaaaaaaggtttgttaattaa

SEQ ID NO: 21394 - DNA, 1041 bp, Homo sapiens
  misc_feature 1..1041: note = ENST00000335209
  source 1..1041: mol_type = unassigned DNA
accgcggcgcgccgccctccgccgttatatgaggccccgctccggccccacgcggaacccgcggctccgagccttcgccggcgtcccgacccgaggccggacccgaggccagtcccgccgctgcgcagccgaagccagtgcggggcctgagagggacgcgcgccccggggcccccgccgcgggcaccatgggcgctgcccactccgcgtctgaggaggtgcgggagctcgagggcaagaccggcttctcatcggatcagatcgagcagctccatcggagatttaagcagctgagtggagatcagcctaccattcgcaaggagaacttcaacaatgtcccggacctggagctcaaccccatccgatccaaaattgttcgtgccttcttcgacaacaggaacctgcgcaagggacccagtggcctggctgatgagatcaatttcgaggacttcctgaccatcatgtcctacttccggcccatcgacaccaccatggacgaggaacaggtggagctgtcccggaaggagaagctgagatttctgttccacatgtacgactcggacagcgacggccgcatcactctggaagaatatcgaaatgtggtcgaggagctgctgtcgggaaaccctcacatcgagaaggagtccgctcgctccatcgccgacggggccatgatggaggcggccagcgtgtgcatggggcagatggagcctgatcaggtgtacgaggggatcaccttcgaggacttcctgaagatctggcaggggatcgacattgagaccaagatgcacgtccgcttccttaacatggaaaccatggccctctgccactgacccaccgccacctccgcggagaaactgcactttgcaatggggccgcctccccgcgtagctggagcagcccaggcccggcggacagcctcttcctgcagcgccggtacatagccaaggctcgtctgcgcaccttgtgtcttgtagggtatggtatgtgggacttcgctgtttttatctccaataaaaaaaaaaaaaaggtttgttaatta

SEQ ID NO: 21395 - DNA, 422 bp, Homo sapiens
  misc_feature 1..422: note = ENST00000549210
  source 1..422: mol_type = unassigned DNA
ccacatgtacgactcggacagcgacggccgcatcactctggaagaatatcgaaatgtaaagtggtcgaggagctgctgtcgggaaaccctcacatcgagaaggagtccgctcgctccatcgccgacggggccatgatggaggcggccagcgtgtgcatggggcagatgatctggcaggggatcgacattgagaccaagatgcacgtccgcttccttaacatggaaaccatggccctctgccactgacccaccgccacctccgcggagaaactgcactttgcaatggggccgcctccccgcgtagctggagcagcccaggcccggcggacagcctcttcctgcagcgccggtacatagccaaggctcgtctgcgcaccttgtgtcttgtagggtatggtatgtgggacttcgctgtttttatc

SEQ ID NO: 21396 - DNA, 854 bp, Homo sapiens
  misc_feature 1..854: note = ENST00000462502
  source 1..854: mol_type = unassigned DNA
cggctccgagccttcgccggcgtcccgacccgaggccggacccgaggccagtcccgccgctgcgcagccgaagccagtgcggggcctgagagggacgcgcgccccggggcccccgccgcgggcaccatgggcgctgcccactccgcgtctgaggaggtgcgggagctcgagggcaagaccggcttctcatcggatcagatcgagcagctccatcggagatttaagcagctgagtggagatcagcctaccattcgcaaggagaacttcaacaatgtcccggacctggagctcaaccccatccgatccaaaattgttcgtgccttcttcgacaacaggaacctgcgcaagggacccagtggcctggctgatgagatcaatttcgaggacttcctgaccatcatgtcctacttccggcccatcgacaccaccatggacgaggaacaggtggagctgtcccggaaggagaagctgagatcttgtggcttcctgggactagaagggggttgtgcggtggatgtgaaacaaggcccttgatgcaaagacctgggttccagtgtggcccgtctcaccagccatgtgaccttgaaccttgacccagaacgtggttctgttccacatgtacgactcggacagcgacggccgcatcactctggaagaatatcgaaatgtggtcgaggagctgctgtcgggaaaccctcacatcgagaaggagtccgctcgctccatcgccgacggggccatgatggaggcggccagcgtgtgcatggggcagatggtgagcgcccctgcagccctcccgagacgcgcagtgcctttcccgcttatggtctgcgtttctggaaggcctcatgggg

SEQ ID NO: 21397 - DNA, 367 bp, Homo sapiens
  misc_feature 1..367: note = ENST00000535198
  source 1..367: mol_type = unassigned DNA
caaagacagagtggaatccggtgccctcacctccttttaaatcctggttctcagagaaaggactcaggaacctgcgcaagggacccagtggcctggctgatgagatcaatttcgaggacttcctgaccatcatgtcctacttccggcccatcgacaccaccatggacgaggaacaggtggagctgtcccggaaggagaagctgagatttctgttccacatgtacgactcggacagcgacggccgcatcactctggaagaatatcgaaatgtggtcgaggagctgctgtcgggaaaccctcacatcgagaaggagtccgctcgctccatcgccgacggggccatgatggaggcggccagcgtgtgcat

SEQ ID NO: 21398 - DNA, 841 bp, Homo sapiens
  misc_feature 1..841: note = ENST00000482176
  source 1..841: mol_type = unassigned DNA
gctccggccccacgcggaacccgcggctccgagccttcgccggcgtcccgacccgaggccggacccgaggccagtcccgccgctgcgcagccgaagccagtgcggggcctgagagggacgcgcgccccggggcccccgccgcgggcaccatgggcgctgcccactccgcgtctgaggaggtgcgggagctcgagggcaagaccggctatggagtcttgctctgccacccaggctggagttcagtggtgctatctcagctcactgcaacctccgcctcctgggttcaaacgattctcctgcgtcagcctccccagaagctgggactacagtctcatcggatcagatcgagcagctccatcggagatttaagcagctgagtggagatcagcctaccattcgcaaggagaacttcaacaatgtcccggacctggagctcaaccccatccgatccaaaattgttcgtgccttcttcgacaacaggaacctgcgcaagggacccagtggcctggctgatgagatcaatttcgaggacttcctgaccatcatgtcctacttccggcccatcgacaccaccatggacgaggaacaggtggagctgtcccggaaggagaagctgagatgtgcgtgccactgagtccccttgctcacacctggcctggggtgcagcctcccctaagacctcagaacgcaaggcgcctctgcagcaggaggctgggtgtgcattggcttgggggcttggagggcttggggccaccagccctcgtccctgtgaggctggcattgctgtctcccgttcccggcaccttcatcctaaacattcctcagcagcttgtggcttcct

SEQ ID NO: 21399 - DNA, 307 bp, Homo sapiens
  misc_feature 1..307: note = ENST00000552139
  source 1..307: mol_type = unassigned DNA
agagcactttgcccggagcccagcgtcctcccctgagttcgctgagtctcccgggaccagcaaaggctgcgcgccccgcatcggcccggaggcggggagccctgggaggcctggccgagctgcccgcagggaaatggcggagaaagcgcttctctgcccgagttcagccgggctggggacttggccctgggtcctgaactcggcatggccagttctgcctctggctgtggaccagggtgtggactggagaccgcgggggccagtctcatcggatcagatcgagcagctccatcggagatttaagcag

SEQ ID NO: 21400 - DNA, 936 bp, Homo sapiens
  misc_feature 1..936: note = ENST00000541210
  source 1..936: mol_type = unassigned DNA
gttatatgaggccccgctccggccccacgcggaacccgcggctccgagccttcgccggcgtcccgacccgaggccggacccgaggccagtcccgccgctgcgcagccgaagccagtgcggggcctgagagggacgcgcgccccggggcccccgccgcgggcaccatgggcgctgcccactccgcgtctgaggaggtgcgggagctcgagggcaagaccggcttctcatcggatcagatcgagcagctccatcggagatttaagcagctgagtggagatcagcctaccattcggaacctgcgcaagggacccagtggcctggctgatgagatcaatttcgaggacttcctgaccatcatgtcctacttccggcccatcgacaccaccatggacgaggaacaggtggagctgtcccggaaggagaagctgagatttctgttccacatgtacgactcggacagcgacggccgcatcactctggaagaatatcgaaatgtggtcgaggagctgctgtcgggaaaccctcacatcgagaaggagtccgctcgctccatcgccgacggggccatgatggaggcggccagcgtgtgcatggggcagatggagcctgatcaggtgtacgaggggatcaccttcgaggacttcctgaagatctggcaggggatcgacattgagaccaagatgcacgtccgcttccttaacatggaaaccatggccctctgccactgacccaccgccacctccgcggagaaactgcactttgcaatggggccgcctccccgcgtagctggagcagcccaggcccggcggacagcctcttcctgcagcgccggtacatagccaaggctcgtctgcgcaccttgtgtcttgtagggtatggtatgtgggacttcgctgtttttatctccaataaaaaaaaaaaaaaggtttgttaatt

SEQ ID NO: 21401 - DNA, 4927 bp, Homo sapiens
  misc_feature 1..4927: note = ENST00000389934
  source 1..4927: mol_type = unassigned DNA
atcagtccgcattccccgcacccacccacgtcttcccgggagtcgtatcccgagcatggaggttactgagaccgttatttcttcatggcctgcctagcttaagcagtagctggaaaagatgtctcgggctgttcgtcttccagtcccctgtcctgttcaacttggtaccttaagaaatgactccctggaagctcagcttcatgagtatgtcaaacaagggaactatgtgaaagtgaagaaaattcttaagaaaggaatttatgttgatgcagttaactccttgggccaaacagcactttttgttgcggcgttattgggccttaggaaattcgttgatgttctggtggattatggatcagatccaaatcaccgctgctttgatgggagcacccctgtccatgcagcagcattttcgggcaatcagtggatccttagcaaactgctggatgcaggaggtgacctgcgactccacgatgagaggggtcaaaacccgaagacttgggctttgacagcaggaaaggagcgtagcacccagatagtggagttcatgcagcgctgtgcctcacacatgcaggccatcatccagggcttctcttacgacctcctgaagaagatagactccccgcagcggcttgtctacagcccgtcctggtgtgggggcctcgtgcagggaaaccctaatggctctcctaaccgactgcttaaagctggagtcatttctgctcaaaatatctacagctttggttttgggaagttttatcttactggggcgacacagatggcctatctaggatctcttccggtcattggagaaaaggaagtgattcaagctgatgatgagcccaccttctctttcttcagcggcccctacatggtcatgaccaacctagtgtggaatgggagcagggtcacagtgaaagagctgaatctccccacccacccacactgcagcaggctgcggctggccgacttgttaattgccgagcaggaacacagcagcaagctgcggcacccctacttgctacagttgatggctgtgtgtctctcccaggacctagagaaaacccgccttgtgtacgagcgcatcactatcggcacattgttcagtgtccttcatgaacgacggtcccagttcccagtgctgcacatggaggtgattgtgcacctgctgctccagatatctgatgccctgagatacctgcatttccaggggtttatccaccgctccctcagctcctatgctgtccatatcatctccccaggtgaagcgaggctgaccaacctggagtacatgttggaaagcgaggacagaggtgtacagagggacctgactcgagtgccccttcctacgcagctatacaactgggccgcaccagaagtgatcttacagaaggcagccacagtgaaatcagacatctacagcttttctatgatcatgcaggagattttaacagatgacataccctggaagggcttagatggctcagttgttaaaaaagccgtagtctcggggaattatttagaagctgatgtcaggcttccgaaaccttactatgatattgttaagtcaggcatccacgtcaagcagaaagaccgaactatgaaccttcaagatatccggtatattctgaagaatgacttaaaggattttactggagcccagagaactcaaccaaccgagagccccagagtgcagagatacggactccatcccgatgtcaatgtctatctaggactgacttcagaacaccccagagagacacctgacatggaaatcatagaactaaaggaaatgggcagtcaacctcattcaccaagggttcactctttattcactgaggggacactagatcctcaggccccagatccatgtctgatggccagggagactcagaatcaagatgctccttgccctgctccatttatggcagaagaggccagcagccccagcacaggtcagccaagcctctgcagtttcgaaatcaacgagatctactcaggctgcttgattttggaagatgacatagaagagcctccaggagctgcttcatctttggaggcagacggacctaaccaggtagatgaactgaaatccatggaagaagagctggataagatggagagagaggcgtgttgttttggcagtgaggatgagagctcttcaaaagctgagacagagtactcttttgatgactgggactggcaaaacggttcactcagttcactcagccttcctgagtcaaccagagaagccaagagcaatttgaacaacatgtccacgactgaggagtatctcatcagtaagtgtgtgctggatctaaagattatgcagacaataatgcacgagaatgatgataggctgaggaatatcgagcagatattagatgaagtcgagatgaaacagaaggaacaggaagagcgcatgtctttatgggccacttcaagagagtttacaaatgcctacaagttacctctggccgtgggccctccatctttaaactatattcctcctgtcctacagctttcagggggtcagaagccagacaccagtggcaactacccaaccctaccaagatttccaagaatgctgccgactctttgtgaccctggaaaacagaacacagatgaacaatttcagtgcactcaaggagccaaggacagtttggaaacaagcaggatccaaaataccagtagccagggaagacctagagagtccactgcccaagccaaagccacacagtttaatagtgcactcttcactctgtcaagccaccggcagggaccttctgcatcacccagctgtcactgggactctaccaggatgagtgtggaacctgtttcttctgaaatctataatgcagagtccagaaataaagatgatggaaaggtacacttaaaatggaaaatggaggtgaaagaaatggcaaagaaagcagctactggacagctcacagtacctccttggcatcctcagagtagtctgactttagagagcgaggctgaaaatgagcccgacgccctgctgcagccccccattaggagcccagaaaacacggattggcagcgagttattgagtatcatagggaaaatgatgagcccagaggaaatggcaagtttgacaagacgggcaacaatgactgtgacagtgaccagcatggcagacagcccaggcttggaagcttcaccagtatcaggcacccatctcccagacaaaaggagcaaccagagcatagtgaagccttccaagcaagttctgacacattggtggctgtagagaaatcttacagtcatcagtccatgcaatcaacttgttcaccagagtcttctgaggatataacagatgaatttttaactccagacggtgaatatttttactcctcgactgctcaagaaaacttagctctagagacctcgagtcccatagaagaggactttgaaggaatacaaggtgcatttgcccaacctcaagtctctggtgaggaaaagttccaaatgagaaaaattcttggaaagaatgctgagattttgcccaggtctcaatttcaacctgtacgaagtactgaagatgaacaagaagagacatcaaaggagtcaccaaaggaactgaaagagaaagacatatcattgacggatattcaagacctgtctagtatctcctatgaaccagacagctcttttaaggaagcttcatgcaaaacacccaaaataaaccatgcacctaccagtgtcagcactccactcagcccagggtccgtttcttcagctgccagtcagtataaagactgccttgaaagtatcacatttcaggttaagacagagtttgcctcttgctggaacagtcaagaatttattcaaactttgtctgatgactttataagtgtccgagagagagcaaagaaactggattctctccttacttcctctgaaactcccccttcaagactgactggtcttaaaagattgtcttcatttattggggctggatcccccagccttgttaaggcatgtgactcatcaccaccccatgccacccagagaaggagcctgcctaaagtagaagccttctcacagcatcacattgatgagctgccaccaccatctcaggagctacttgatgacattgagctcttgaaacagcagcagggctcatccacggtgttgcatgagaacacagcaagtgatggaggaggcactgcaaatgatcaaaggcacttagaagaacaagaaactgacagtaaaaaagaagatagtagtatgcttttgtccaaagaaactgaagatcttggagaggacacagagagagctcactctactctggatgaggacctggaaagatggctgcagccacctgaggagagcgtggagctacaagaccttcccaagggctctgaaagggagacaaatatcaaagatcaaaaagttggtgaagagaaaagaaaaagggaagatagcattacaccagaaagaaggaaatcagagggtgttctagggacttctgaagaagatgaactaaaatcctgtttttggaagcgactaggttggtccgaatcatccaggataatcgtgctggatcagagtgacttgtcagactgattggaattggatcatagacggactcctggcctgagtttgagtgtcctggttgtaagctcctttcttctctttctgcttcagttgctgtcagggcagcagttccagttctgtaagtctcactttgttcagctgccacaatagacatcatcgtttggccctctctgttagcagcacattcaaccatttgttttcagtcagatttctgaaaagtgagaggtagttttgatagtaaaaatttttggttgtgcctagaatggctttggttttgttgatgttaattttcaaaaactttaactcttgttatataataaaatgtttaattttaataacaga

SEQ ID NO: 21402 - DNA, 673 bp, Homo sapiens
  misc_feature 1..673: note = ENST00000584699
  source 1..673: mol_type = unassigned DNA
tgaagaattctgctgtgaacatgagtgtacggatatctctttgagatcctgctttcaattcttttggatatatacccagaaatggtattactggatcatatgagctcactctactctggatgaggacctggaaagatggctgcagccacctgaggagagcgtggagctacaagaccttcccaagggctctgaaagggagacaaatatcaaagatcaaaaagttggtgaagagaaaagaaaaagggaagatagcattacaccagaaagaaggaaatcagagggtgttctagggacttctgaagaaggataatcgtgctggatcagagtgacttgtcagactgattggaattggatcatagacggactcctggcctgagtttgagtgtcctggttgtaagctcctttcttctctttctgcttcagttgctgtcagggcagcagttccagttctgtaagtctcactttgttcagctgccacaatagacatcatcgtttggccctctctgttagcagcacattcaaccatttgttttcagtcagatttctgaaaagtgagaggtagttttgatagtaaaaatttttggttgtgcctagaatggctttggttttgttgatgttaattttcaaaaactttaactcttgttatataataaaatgtttaattttaataaca

SEQ ID NO: 21403 - DNA, 4911 bp, Homo sapiens
  misc_feature 1..4911: note = ENST00000240361
  source 1..4911: mol_type = unassigned DNA
ttcccgggagtcgtatcccgagcatggaggttactgagaccgttatttcttcatggcctgcctagcttaagcagtagctggaaaagatgtctcgggctgttcgtcttccagtcccctgtcctgttcaacttggtaccttaagaaatgactccctggaagctcagcttcatgagtatgtcaaacaagggaactatgtgaaagtgaagaaaattcttaagaaaggaatttatgttgatgcagttaactccttgggccaaacagcactttttgttgcggcgttattgggccttaggaaattcgttgatgttctggtggattatggatcagatccaaatcaccgctgctttgatgggagcacccctgtccatgcagcagcattttcgggcaatcagtggatccttagcaaactgctggatgcaggaggtgacctgcgactccacgatgagaggggtcaaaacccgaagacttgggctttgacagcaggaaaggagcgtagcacccagatagtggagttcatgcagcgctgtgcctcacacatgcaggccatcatccagggcttctcttacgacctcctgaagaagatagactccccgcagcggcttgtctacagcccgtcctggtgtgggggcctcgtgcagggaaaccctaatggctctcctaaccgactgcttaaagctggagtcatttctgctcaaaatatctacagctttggttttgggaaggctatgccttggtttcagttttatcttactggggcgacacagatggcctatctaggatctcttccggtcattggagaaaaggaagtgattcaagctgatgatgagcccaccttctctttcttcagcggcccctacatggtcatgaccaacctagtgtggaatgggagcagggtcacagtgaaagagctgaatctccccacccacccacactgcagcaggctgcggctggccgacttgttaattgccgagcaggaacacagcagcaagctgcggcacccctacttgctacagttgatggctgtgtgtctctcccaggacctagagaaaacccgccttgtgtacgagcgcatcactatcggcacattgttcagtgtccttcatgaacgacggtcccagttcccagtgctgcacatggaggtgattgtgcacctgctgctccagatatctgatgccctgagatacctgcatttccaggggtttatccaccgctccctcagctcctatgctgtccatatcatctccccaggtgaagcgaggctgaccaacctggagtacatgttggaaagcgaggacagaggtgtacagagggacctgactcgagtgccccttcctacgcagctatacaactgggccgcaccagaagtgatcttacagaaggcagccacagtgaaatcagacatctacagcttttctatgatcatgcaggagattttaacagatgacataccctggaagggcttagatggctcagttgttaaaaaagccgtagtctcggggaattatttagaagctgatgtcaggcttccgaaaccttactatgatattgttaagtcaggcatccacgtcaagcagaaagaccgaactatgaaccttcaagatatccggtatattctgaagaatgacttaaaggattttactggagcccagagaactcaaccaaccgagagccccagagtgcagagatacggactccatcccgatgtcaatgtctatctaggactgacttcagaacaccccagagagacacctgacatggaaatcatagaactaaaggaaatgggcagtcaacctcattcaccaagggttcactctttattcactgaggggacactagatcctcaggccccagatccatgtctgatggccagggagactcagaatcaagatgctccttgccctgctccatttatggcagaagaggccagcagccccagcacaggtcagccaagcctctgcagtttcgaaatcaacgagatctactcaggctgcttgattttggaagatgacatagaagagcctccaggagctgcttcatctttggaggcagacggacctaaccaggtagatgaactgaaatccatggaagaagagctggataagatggagagagaggcgtgttgttttggcagtgaggatgagagctcttcaaaagctgagacagagtactcttttgatgactgggactggcaaaacggttcactcagttcactcagccttcctgagtcaaccagagaagccaagagcaatttgaacaacatgtccacgactgaggagtatctcatcagtaagtgtgtgctggatctaaagattatgcagacaataatgcacgagaatgatgataggctgaggaatatcgagcagatattagatgaagtcgagatgaaacagaaggaacaggaagagcgcatgtctttatgggccacttcaagagagtttacaaatgcctacaagttacctctggccgtgggccctccatctttaaactatattcctcctgtcctacagctttcagggggtcagaagccagacaccagtggcaactacccaaccctaccaagatttccaagaatgctgccgactctttgtgaccctggaaaacagaacacagatgaacaatttcagtgcactcaaggagccaaggacagtttggaaacaagcaggatccaaaataccagtagccagggaagacctagagagtccactgcccaagccaaagccacacagtttaatagtgcactcttcactctgtcaagccaccggcagggaccttctgcatcacccagctgtcactgggactctaccaggatgagtgtggaacctgtttcttctgaaatctataatgcagagtccagaaataaagatgatggaaaggtacacttaaaatggaaaatggaggtgaaagaaatggcaaagaaagcagctactggacagctcacagtacctccttggcatcctcagagtagtctgactttagagagcgaggctgaaaatgagcccgacgccctgctgcagccccccattaggagcccagaaaacacggattggcagcgagttattgagtatcatagggaaaatgatgagcccagaggaaatggcaagtttgacaagacgggcaacaatgactgtgacagtgaccagcatggcagacagcccaggcttggaagcttcaccagtatcaggcacccatctcccagacaaaaggagcaaccagagcatagtgaagccttccaagcaagttctgacacattggtggctgtagagaaatcttacagtcatcagtccatgcaatcaacttgttcaccagagtcttctgaggatataacagatgaatttttaactccagacggtgaatatttttactcctcgactgctcaagaaaacttagctctagagacctcgagtcccatagaagaggactttgaaggaatacaaggtgcatttgcccaacctcaagtctctggtgaggaaaagttccaaatgagaaaaattcttggaaagaatgctgagattttgcccaggtctcaatttcaacctgtacgaagtactgaagatgaacaagaagagacatcaaaggagtcaccaaaggaactgaaagagaaagacatatcattgacggatattcaagacctgtctagtatctcctatgaaccagacagctcttttaaggaagcttcatgcaaaacacccaaaataaaccatgcacctaccagtgtcagcactccactcagcccagggtccgtttcttcagctgccagtcagtataaagactgccttgaaagtatcacatttcaggttaagacagagtttgcctcttgctggaacagtcaagaatttattcaaactttgtctgatgactttataagtgtccgagagagagcaaagaaactggattctctccttacttcctctgaaactcccccttcaagactgactggtcttaaaagattgtcttcatttattggggctggatcccccagccttgttaaggcatgtgactcatcaccaccccatgccacccagagaaggagcctgcctaaagtagaagccttctcacagcatcacattgatgagctgccaccaccatctcaggagctacttgatgacattgagctcttgaaacagcagcagggctcatccacggtgttgcatgagaacacagcaagtgatggaggaggcactgcaaatgatcaaaggcacttagaagaacaagaaactgacagtaaaaaagaagatagtagtatgcttttgtccaaagaaactgaagatcttggagaggacacagagagagctcactctactctggatgaggacctggaaagatggctgcagccacctgaggagagcgtggagctacaagaccttcccaagggctctgaaagggagacaaatatcaaagatcaaaaagttggtgaagagaaaagaaaaagggaagatagcattacaccagaaagaaggaaatcagagggtgttctagggacttctgaagaagatgaactaaaatcctgtttttggaagcgactaggttggtccgaatcatccaggataatcgtgctggatcagagtgacttgtcagactgattggaattggatcatagacggactcctggcctgagtttgagtgtcctggttgtaagctcctttcttctctttctgcttcagttgctgtcagggcagcagttccagttctgtaagtctcactttgttcagctgccacaatagacatcatcgtttggccctctctgttagcagcacattcaaccatttgttttcagtcagatttctgaaaagtgagaggtagttttgatagtaaaaatttttggttgtgcctagaatggctttggttttgttgatgttaattttcaaaaactttaactcttgttatataataaaatgtttaattttaataaca

SEQ ID NO: 21404 - DNA, 4773 bp, Homo sapiens
  misc_feature 1..4773: note = ENST00000349033
  source 1..4773: mol_type = unassigned DNA
ttcccgggagtcgtatcccgagcatggaggttactgagaccgttatttcttcatggcctgcctagcttaagcagtagctggaaaagatgtctcgggctgttcgtcttccagtcccctgtcctgttcaacttggtaccttaagaaatgactccctggaagctcagcttcatgagtatgtcaaacaagggaactatgtgaaagtgaagaaaattcttaagaaaggaatttatgttgatgcagttaactccttgggccaaacagcactttttgttgcggcgttattgggccttaggaaattcgttgatgttctggtggattatggatcagatccaaatcaccgctgctttgatgggagcacccctgtccatgcagcagcattttcgggcaatcagtggatccttagcaaactgctggatgcaggaggtgacctgcgactccacgatgagaggggtcaaaacccgaagacttgggctttgacagcaggaaaggagcgtagcacccagatagtggagttcatgcagcgctgtgcctcacacatgcaggccatcatccagggcttctcttacgacctcctgaagaagatagactccccgcagcggcttgtctacagcccgtcctggtgtgggggcctcgtgcagggaaaccctaatggctctcctaaccgactgcttaaagctggagtcatttctgctcaaaatatctacagctttggttttgggaagttttatcttactggggcgacacagatggcctatctaggatctcttccggtcattggagaaaaggaagtgattcaagctgatgatgagcccaccttctctttcttcagcggcccctacatggtcatgaccaacctagtgtggaatgggagcagggtcacagtgaaagagctgaatctccccacccacccacactgcagcaggctgcggctggccgacttgttaattgccgagcaggaacacagcagcaagctgcggcacccctacttgctacagttgatggctgtgtgtctctcccaggacctagagaaaacccgccttgtgtacgagcgcatcactatcggcacattgttcagtgtccttcatgaacgacggtcccagttcccagtgctgcacatggaggtgattgtgcacctgctgctccagatatctgatgccctgagatacctgcatttccaggggtttatccaccgctccctcagctcctatgctgtccatatcatctccccaggtgaagcgaggctgaccaacctggagtacatgttggaaagcgaggacagaggtgtacagagggacctgactcgagtgccccttcctacgcagctatacaactgggccgcaccagaagtgatcttacagaaggcagccacagtgaaatcagacatctacagcttttctatgatcatgcaggagattttaacagatgacataccctggaagggcttagatggctcagttgttaaaaaagccgtagtctcggggaattatttagaagctgatgtcaggcttccgaaaccttactatgatattgttaagtcaggcatccacgtcaagcagaaagaccgaactatgaaccttcaagatatccggtatattctgaagaatgacttaaaggattttactggagcccagagaactcaaccaaccgagagccccagagtgcagagatacggactccatcccgatgtcaatgtctatctaggactgacttcagaacaccccagagagacacctgacatggaaatcatagaactaaaggaaatgggcagtcaacctcattcaccaagggttcactctttattcactgaggggacactagatcctcaggccccagatccatgtctgatggccagggagactcagaatcaagatgctccttgccctgctccatttatggcagaagaggccagcagccccagcacaggtcagccaagcctctgcagtttcgaaatcaacgagatctactcaggctgcttgattttggaagatgacatagaagagcctccaggagctgcttcatctttggaggcagacggacctaaccaggtagatgaactgaaatccatggaagaagagctggataagatggagagagaggcgtgttgttttggcagtgaggatgagagctcttcaaaagctgagacagagtactcttttgatgactgggactggcaaaacggttcactcagttcactcagccttcctgagtcaaccagagaagccaagagcaatttgaacaacatgtccacgactgaggagtatctcatcagtaagtgtgtgctggatctaaagattatgcagacaataatgcacgagaatgatgataggctgaggaatatcgagcagatattagatgaagtcgagatgaaacagaaggaacaggaagagcgcatgtctttatgggccacttcaagagagtttacaaatgcctacaagttacctctggccgtgggccctccatctttaaactatattcctcctgtcctacagctttcagggggtcagaagccagacaccagtggcaactacccaaccctaccaagatttccaagaatgctgccgactctttgtgaccctggaaaacagaacacagatgaacaatttcagtgcactcaaggagccaaggacagtttggaaacaagcaggatccaaaataccagtagccagggaagacctagagagtccactgcccaagccaaagccacacagtttaatagtgcactcttcactctgtcaagccaccggcagggaccttctgcatcacccagctgtcactgggactctaccaggatgagtgtggaacctgtttcttctgaaatctataatgcagagtccagaaataaagatgatggaaaggtacacttaaaatggaaaatggaggtgaaagaaatggcaaagaaagcagctactggacagctcacagtacctccttggcatcctcagagtagtctgactttagagagcgaggctgaaaatgagcccgacgccctgctgcagccccccattaggagcccagaaaacacggattggcagcgagttattgagtatcatagggaaaatgatgagcccagaggaaatggcaagtttgacaagacgggcaacaatgactgtgacagtgaccagcatggcagacagcccaggcttggaagcttcaccagtatcaggcacccatctcccagacaaaaggagcaaccagagcatagtgaagccttccaagcaagttctgacacattggtggctgtagagaaatcttacagtacctcgagtcccatagaagaggactttgaaggaatacaaggtgcatttgcccaacctcaagtctctggtgaggaaaagttccaaatgagaaaaattcttggaaagaatgctgagattttgcccaggtctcaatttcaacctgtacgaagtactgaagatgaacaagaagagacatcaaaggagtcaccaaaggaactgaaagagaaagacatatcattgacggatattcaagacctgtctagtatctcctatgaaccagacagctcttttaaggaagcttcatgcaaaacacccaaaataaaccatgcacctaccagtgtcagcactccactcagcccagggtccgtttcttcagctgccagtcagtataaagactgccttgaaagtatcacatttcaggttaagacagagtttgcctcttgctggaacagtcaagaatttattcaaactttgtctgatgactttataagtgtccgagagagagcaaagaaactggattctctccttacttcctctgaaactcccccttcaagactgactggtcttaaaagattgtcttcatttattggggctggatcccccagccttgttaaggcatgtgactcatcaccaccccatgccacccagagaaggagcctgcctaaagtagaagccttctcacagcatcacattgatgagctgccaccaccatctcaggagctacttgatgacattgagctcttgaaacagcagcagggctcatccacggtgttgcatgagaacacagcaagtgatggaggaggcactgcaaatgatcaaaggcacttagaagaacaagaaactgacagtaaaaaagaagatagtagtatgcttttgtccaaagaaactgaagatcttggagaggacacagagagagctcactctactctggatgaggacctggaaagatggctgcagccacctgaggagagcgtggagctacaagaccttcccaagggctctgaaagggagacaaatatcaaagatcaaaaagttggtgaagagaaaagaaaaagggaagatagcattacaccagaaagaaggaaatcagagggtgttctagggacttctgaagaagatgaactaaaatcctgtttttggaagcgactaggttggtccgaatcatccaggataatcgtgctggatcagagtgacttgtcagactgattggaattggatcatagacggactcctggcctgagtttgagtgtcctggttgtaagctcctttcttctctttctgcttcagttgctgtcagggcagcagttccagttctgtaagtctcactttgttcagctgccacaatagacatcatcgtttggccctctctgttagcagcacattcaaccatttgttttcagtcagatttctgaaaagtgagaggtagttttgatagtaaaaatttttggttgtgcctagaatggctttggttttgttgatgttaattttcaaaaactttaactcttgttatataataaaatgtttaattttaataaca

SEQ ID NO: 21405 - DNA, 4834 bp, Homo sapiens
  misc_feature 1..4834: note = ENST00000582740
  source 1..4834: mol_type = unassigned DNA
attccccgcacccacccacgtcttcccgggagtcgtatcccgagcatggaggttactgagaccgttatttcttcatggcctgcctagcttaagcagtagctggaaaagatgtctcgggctgttcgtcttccagtcccctgtcctgttcaacttggtaccttaagaaatgactccctggaagctcagcttcatgagtatgtcaaacaagggaactatgtgaaagtgaagaaaattcttaagaaagctctggagttgccacaaacagcgttgagatcagaggaagagtggagaagcaaggaggagaattaacagagcattgctgcatcctgcagtgcggaggagggaagaaattggaatcggcctgggaatttatgttgatgcagttaactccttgggccaaacagcactttttgttgcggcgttattgggccttaggaaattcgttgatgttctggtggattatggatcagatccaaatcaccgctgctttgatgggagcacccctgtccatgcagcagcattttcgggcaatcagtggatccttagcaaactgctggatgcaggaggtgacctgcgactccacgatgagaggggtcaaaacccgaagacttgggctttgacagcaggaaaggagcgtagcacccagatagtggagttcatgcagcgctgtgcctcacacatgcaggccatcatccagggcttctcttacgacctcctgaagaagatagactccccgcagcggcttgtctacagcccgtcctggtgtgggggcctcgtgcagggttttatcttactggggcgacacagatggcctatctaggatctcttccggtcattggagaaaaggaagtgattcaagctgatgatgagcccaccttctctttcttcagcggcccctacatggtcatgaccaacctagtgtggaatgggagcagggtcacagtgaaagagctgaatctccccacccacccacactgcagcaggctgcggctggccgacttgttaattgccgagcaggaacacagcagcaagctgcggcacccctacttgctacagttgatggctgtgtgtctctcccaggacctagagaaaacccgccttgtgtacgagcgcatcactatcggcacattgttcagtgtccttcatgaacgacggtcccagttcccagtgctgcacatggaggtgattgtgcacctgctgctccagatatctgatgccctgagatacctgcatttccaggggtttatccaccgctccctcagctcctatgctgtccatatcatctccccaggtgaagcgaggctgaccaacctggagtacatgttggaaagcgaggacagaggtgtacagagggacctgactcgagtgccccttcctacgcagctatacaactgggccgcaccagaagtgatcttacagaaggcagccacagtgaaatcagacatctacagcttttctatgatcatgcaggagattttaacagatgacataccctggaagggcttagatggctcagttgttaaaaaagccgtagtctcggggaattatttagaagctgatgtcaggcttccgaaaccttactatgatattgttaagtcaggcatccacgtcaagcagaaagaccgaactatgaaccttcaagatatccggtatattctgaagaatgacttaaaggattttactggagcccagagaactcaaccaaccgagagccccagagtgcagagatacggactccatcccgatgtcaatgtctatctaggactgacttcagaacaccccagagagacacctgacatggaaatcatagaactaaaggaaatgggcagtcaacctcattcaccaagggttcactctttattcactgaggggacactagatcctcaggccccagatccatgtctgatggccagggagactcagaatcaagatgctccttgccctgctccatttatggcagaagaggccagcagccccagcacaggtcagccaagcctctgcagtttcgaaatcaacgagatctactcaggctgcttgattttggaagatgacatagaagagcctccaggagctgcttcatctttggaggcagacggacctaaccaggtagatgaactgaaatccatggaagaagagctggataagatggagagagaggcgtgttgttttggcagtgaggatgagagctcttcaaaagctgagacagagtactcttttgatgactgggactggcaaaacggttcactcagttcactcagccttcctgagtcaaccagagaagccaagagcaatttgaacaacatgtccacgactgaggagtatctcatcagtaagtgtgtgctggatctaaagattatgcagacaataatgcacgagaatgatgataggctgaggaatatcgagcagatattagatgaagtcgagatgaaacagaaggaacaggaagagcgcatgtctttatgggccacttcaagagagtttacaaatgcctacaagttacctctggccgtgggccctccatctttaaactatattcctcctgtcctacagctttcagggggtcagaagccagacaccagtggcaactacccaaccctaccaagatttccaagaatgctgccgactctttgtgaccctggaaaacagaacacagatgaacaatttcagtgcactcaaggagccaaggacagtttggaaacaagcaggatccaaaataccagtagccagggaagacctagagagtccactgcccaagccaaagccacacagtttaatagtgcactcttcactctgtcaagccaccggcagggaccttctgcatcacccagctgtcactgggactctaccaggatgagtgtggaacctgtttcttctgaaatctataatgcagagtccagaaataaagatgatggaaaggtacacttaaaatggaaaatggaggtgaaagaaatggcaaagaaagcagctactggacagctcacagtacctccttggcatcctcagagtagtctgactttagagagcgaggctgaaaatgagcccgacgccctgctgcagccccccattaggagcccagaaaacacggattggcagcgagttattgagtatcatagggaaaatgatgagcccagaggaaatggcaagtttgacaagacgggcaacaatgactgtgacagtgaccagcatggcagacagcccaggcttggaagcttcaccagtatcaggcacccatctcccagacaaaaggagcaaccagagcatagtgaagccttccaagcaagttctgacacattggtggctgtagagaaatcttacagtacctcgagtcccatagaagaggactttgaaggaatacaaggtgcatttgcccaacctcaagtctctggtgaggaaaagttccaaatgagaaaaattcttggaaagaatgctgagattttgcccaggtctcaatttcaacctgtacgaagtactgaagatgaacaagaagagacatcaaaggagtcaccaaaggaactgaaagagaaagacatatcattgacggatattcaagacctgtctagtatctcctatgaaccagacagctcttttaaggaagcttcatgcaaaacacccaaaataaaccatgcacctaccagtgtcagcactccactcagcccagggtccgtttcttcagctgccagtcagtataaagactgccttgaaagtatcacatttcaggttaagacagagtttgcctcttgctggaacagtcaagaatttattcaaactttgtctgatgactttataagtgtccgagagagagcaaagaaactggattctctccttacttcctctgaaactcccccttcaagactgactggtcttaaaagattgtcttcatttattggggctggatcccccagccttgttaaggcatgtgactcatcaccaccccatgccacccagagaaggagcctgcctaaagtagaagccttctcacagcatcacattgatgagctgccaccaccatctcaggagctacttgatgacattgagctcttgaaacagcagcagggctcatccacggtgttgcatgagaacacagcaagtgatggaggaggcactgcaaatgatcaaaggcacttagaagaacaagaaactgacagtaaaaaagaagatagtagtatgcttttgtccaaagaaactgaagatcttggagaggacacagagagagctcactctactctggatgaggacctggaaagatggctgcagccacctgaggagagcgtggagctacaagaccttcccaagggctctgaaagggagacaaatatcaaagatcaaaaagttggtgaagagaaaagaaaaagggaagatagcattacaccagaaagaaggaaatcagagggtgttctagggacttctgaagaagatgaactaaaatcctgtttttggaagcgactaggttggtccgaatcatccaggataatcgtgctggatcagagtgacttgtcagactgattggaattggatcatagacggactcctggcctgagtttgagtgtcctggttgtaagctcctttcttctctttctgcttcagttgctgtcagggcagcagttccagttctgtaagtctcactttgttcagctgccacaatagacatcatcgtttggccctctctgttagcagcacattcaaccatttgttttcagtcagatttctgaaaagtgagaggtagttttgatagtaaaaatttttggttgtgcctagaatggctttggttttgttgatgttaattttcaaaaactttaactcttgttatataataaaatgtttaattttaataaca

SEQ ID NO: 21406 - DNA, 676 bp, Homo sapiens
  misc_feature 1..676: note = ENST00000581147
  source 1..676: mol_type = unassigned DNA
taaggaagcttcatgcaaaacacccaaaataaaccatgcacctaccagtgtcagcactccactcagcccagggtccgtttcttcagctgccagtcagtataaagactgccttgaaagtatcacatttcaggttaagacagagtttgcctcttgctggaacagtcaagaatttattcaaactttgtctgatgactttataagtgtccgagagagagcaaagaaactggattctctccttacttcctctgaaactcccccttcaagactgactggtcttaaaagattgtcttcatttattggggctggatcccccagccttgttaaggcatgtgactcatcaccaccccatgccacccagagaaggagcctgcctaaagtagaagccttctcacagcatcacattgatgagctgccaccaccatctcaggagctacttgatgacattgttgctgtgtaaaccttccattcacctcctccatttcagcagctgtgttaccagactttgtcctgggctctggccttatggtgctgctgcaccccagcacagtctgcagaagccttccctcatttcacttatgggaattatctggaccaggtttctagagctcttgaaacagcagcagggctcatccacggtgttgcatgagaacacagcaagtgatggaggaggcactgc

SEQ ID NO: 21407 - DNA, 5232 bp, Homo sapiens
  misc_feature 1..5232: note = ENST00000258991
  source 1..5232: mol_type = unassigned DNA
gtcgcgcggccgggagcacgggcgccggcatagtacaatgaggcagccagcggatcttggagcctgagcccttgtgaagccggcaatgacaagtctgtatggtcgccatgccgagaaaaccactgacatgccaaaaccatcagcccctaaagtgcacgtgcagaggtccgtgtcccgagataccatcgccattcacttctcggcatccggcgaggaggaggaggaagaggaggaggagttcagggagtactttgaggaggggctggatgaccaaagcattgtaacagggctggaagccaaggaagacctctatcttgaaccccaagttggccatgaccccgccggccctgctgcctcgcctgtcctggcagatggactgtccgtgtcccaggcccctgccattttgcccgtctccaagaacactgtaaagctgttggagtcccctgttccagcagcacaagtattaagtacagtgccattggctgtgtccccagggtcgtcttcgtcggggcccttagctagctctcccagtgtgtcatccctttctgagcagaaaaccagttcttcctccccattgtcctctccttctaagtctcccatcctctcatccagtgcctcaacctccaccctttccagtgcaaaacccttcatgagccttgtgaagtccctgtcgaccgaggtggagccaaaagaatccccacaccccgcaaggcacaggcacttgatgaagacattagtcaagtctctgtccacggacacttcccggcaggagtcggatacagtgtcctataagccacctgattccaaactgaacttacacctgttcaagcagttcacacagccccgaaacacaggtggagattccaaaactgcaccttcttccccactgacttctccctctgatactcgttccttttttaaagtgcccgaaatggaggctaaaattgaagatactaaacgacgcctttcagaagtcatctatgagccttttcagctccttagtaaaattataggggaagaaagtggcagccataggcccaaagccttatcttcaagtgcttcagaactctccaatctgtccagcttgaatgggcacttggaaagcaataacaactacagcatcaaggaggaggagtgtgattctgagggggatggctacggaagtgattccaacatccccagaagtgaccacccaaagtccactggtgagcccacaagagagatagaactgaaaagttcccaggggagcagtctgaaggatttaggcctgaagacaagttctctagttctggagaaatgttctttgtctgccttagtgagcaaagaagatgaagagttttgtgaactgtacactgaggacttcgatttggaaacggagggggagagtaaagttgataagctctcagatattcctctcaagccagaggtgctcgcggaagatggtgtggtccttgacagtgaggacgaggtggactcggccgtgcagcacccggaattgccagtgaagacgttgggcttctttataatgtgtgtctatgtgtacctcatcctccccctcccccactatgtgagtggactctttctgggaattggccttggattcatgactgcagtttgcgtgatttggttttttacaccaccaagtgctcataaatatcacaagttacacaaaaatctgcgacactggaacacaagatctctggatatcaaagaacctgaaatactgaagggatggatgaatgagatttacaactatgatccagaaacctaccatgcgactttgacacattcagtctttgttcgacttgagggtggaaccttaagactttcaaagcccaataaaaatatatccaggagggccagctacaatgaacccaagccagaggtcacctacatcagccagaaaatctatgacctctcagacagcaagatttatcttgtacctaaaactttggctcgaaagcgaatctggaataaaaagtaccccatttgtatcgagcttggtcagcaagatgactttatgtctaaagctcagactgataaggagacttcagaagagaagccgccagctgagggaagtgaggaccctaagaagccaccccgccctcaggagggaacaagatctagccagcgagatcagatactctatctctttgggagaactggccgagaaaaagaggaatggtttaggagatttattctggcatctaagctaaagtcggaaatcaagaagtcatcgggtgtctctggaggtaaaccagcccccgtcttcttggctccagggcttttgcctgcacacagcagacacaacagtccgtccgggcacctgacccacagccgcagcagcagcaaaggcagtgtggaggagatcatgtcacagccaaagcagaaggagctggcaggcagcgtgcggcagaagatgcttctcgactacagcgtgtacatgggcaggtgtgtcccccaggaaagccgaagcccccagaggagccccctgcagagtgcggagagcagccccacagctgggaagaagttgccagaggttccaccctctgaggaggaagaacaggaagcctgggtgaatgccttgcttggaagaatattttgggacttcttaggagagaaatactggtctgatctggtgtctaagaagatccaaatgaaactcagcaaaataaagctcccctactttatgaatgagctcactctgacggaacttgacatgggcgtggctgtgccaaaaatcctccaggccttcaagccttacgttgatcaccaaggactctggattgatttggaaatgtcctacaatgggtcctttctgatgactctcgagaccaaaatgaatttgaccaaactaggtaaagagcctcttgttgaagccctgaaggttggagaaattggcaaagaaggttgcaggccccgggcattctgtctggcggacagcgatgaggaatcctccagcgctggctcctccgaggaagacgatgccccagagcccagcgggggagacaaacagctcctcccaggggctgaagggtacgttggaggtcatcgaacaagtaagattatgaggtttgttgataaaattaccaagtcaaaatatttccaaaaagcaacagagacagagtttattaaaaagaagatcgaagaagtctccaacacacccctgctgctcactgttgaagtacaagaatgtagaggaaccttggcggtcaacattccaccacccccgactgaccgagtatggtatggtttccgaaagccaccacatgtggagctgaaagctcggccaaaacttggagagagagaagtgactttagttcatgtgacagactggatagagaagaaactggagcaagagtttcagaaagtttttgtcatgccaaacatggatgatgtttatatcactataatgcactcagccatggaccctcgctctacttcctgcctcctgaaagacccacctgtggaggctgctgatcagccatgatgggtgatgtcagatgttccccatattgtgacatcgagctggatgtgtggggttcttggccgccatctgtactgtagcactggcctctgtgccacagctactgtttcttaaaggactgcttctgccctctgcctgccagtgcccattccactgtgaggtgtcattccctgcatctagtgacaactgtctggattgcctgctgcaaagctttgatttggcaaaggagaccatggaagaatcatggtggatccagaagttatacgtgacccacaccatggcttttaaaagtctacccatgtttgtggcagcaaatgagcacagtaagagcaaagctgaacaacttgcctcctctactcctccaaagcttttcttcaggcagccggtgcacagtggactttttcacttctatactttgtatgcggccttccacacttccagagaatgtcagtgtgcaatgtgtctggagggtggggagaggaattctgtgagccttttcatttcggtgacagaagagatgggcagagcaacttattttccacattaaattgtgcatttgggaagcaagtagccatagtacacacacaacacgctatcagcttgggtaaggacagtgggatttatgtgaacatcaggcaaagccatgagatcaaaccatcccaagcctttcaccaatgaggtacaaccacctgggggctagctaatcttgaatgttttcctgagacaggagcgtatgtgaaaacatcaaacactgcacatgacaggatgggtcctctcatacagatgggatggggttagaaagccagagccagtttttccatctggcgtttcctgtgtcctccaggtttatatgggaatcgaaacagtttgttaatctgattgggagagttccatgggcagatttcccttcctgaaggccaaaacggagaactgctctctttaattatttcaagagtcaagaccaaaagtttgctcagcatcacactacatctcaaaattaatgttgccaacttaattttgtgcatttgtgtcagaatgtttagtttacaaggttgggggctctctttgcttcgagaagtaaacctaataccatttttttattgtttaaagctgcattcaacgtcaaaattaccttgggtaacttttgataacttacatgtgtggacaaagctaatagtggttttttaaacagcaccttgcctgaacatgactttaaagaaattaatatattgaaaacatgtttgaacccttattttaattgcaccattaaaacatttgacttaaattgtttgaccattccagttggtgtactgttctgatttttcgttgtgtaggccgatctgcctgtcagagtccacgtgtcctggtcactggtctttataattgttgtgcaataactaaaggctaaggactagatgcactatcgtgtaaagagattacacatgactgtaccatgttgcacttaatcaaatagtatgtggggatttaaaatcgcttgcattgtttcacaaaataaatatctcaatgtcaaatactagataagcatctaagtcatttctacggaatcctgttcagataggggcacaataaaatgagtacagagcaccggggccctcacctggcaatcgcagctttcatttactgcgttgatcactgcccagtcctaaggctacaaagccatcctcactacatccttcaaactatgtgccattatcttcagcccacatttaaagaatccagtgaaa

SEQ ID NO: 21408 - DNA, 5124 bp, Homo sapiens
  misc_feature 1..5124: note = ENST00000584498
  source 1..5124: mol_type = unassigned DNA
ctcccagtgcacagggctggggccactgccgggccttcagttccacactggcatgtgtgctgtgcccttgggtgcctttggctcctgttggtcaggcgataactgtccccgtgggcctctggtggcccaaggacagcatcaggaaaaccaaaggactgcagctgcagggagataggccctgagccccactgccttcccttgtccatgtaactgtgtccttgtcaaaaatacaatgaccagcctctgcttggtgaccatttggttgtgtaatagtgttcagagactactctgtcccttgttcattttgtcccatttaagtctctgggctcagacacagccctgccagtactttctgaagcaaagccacggtccagggaggaagctgctttctataggcccgaggctcagcccagaagcccccaggtcccctccgacgggaactggacccctcacctctgcgggtaatccagcaaccccacacctctggaactgagtatctgccctggagagctgagtgagggacactgctgtcccatgaggctttcccttacttcagtcaaaggaatggtctttagacatgtatttttccggaaaatttcctgggttctcatgtcagttgcttcctagagtctcctgagactttttgtgtgtgtgtgtgtatgtggttgttggctttttctgtgaccctcaggagatagggcaggtgtggagtgaaatacgtaatttcactggaaaggagtcatgagtcaaaactcacttggagggttactaagccagaaagcatcagagttgctgaattaagccagagccaagggacttgcctcaacatcccatcatcagtgagaagtggccatgtcaccagtataagctgtcacctcactcttgcaaccatccgctctttctgttcatcctcccgtgtggctccgctgcactgctggttgaaatcactgcattttatgtgcgcatcacactcccacctcctgtccttctgacgcatgctcaaaagcaacctcttctgggtccaaggcctctgtggtcctgtcagaggccttggtgctgaagagtgtcctgagcatctgcgctgatccaaggattcttggattgggcctcttctggtttgggtgggttggagagaatgacgagatgtagttaacagttacatcccgaccctgttgtggttgagtgtgtgtgcatgggtgtgtgtgttctctttctaagcagagcttgggtgagggcaggcagtggtggtgactctctctctgtccagttgcaggccccgggcattctgtctggcggacagcgatgaggaatcctccagcgctggctcctccgaggaagacgatgccccagagcccagcgggggagacaaacagctcctcccaggggctgaagggtacgttggaggtcatcgaacaagtaagattatgaggtttgttgataaaattaccaagtcaaaatatttccaaaaagcaacagagacagagtttattaaaaagaagatcgaagaagtctccaacacacccctgctgctcactgttgaagtacaagaatgtagaggaaccttggcggtcaacattccaccacccccgactgaccgagtatggtatggtttccgaaagccaccacatgtggagctgaaagctcggccaaaacttggagagagagaagtgactttagttcatgtgacagactggatagagaagaaactggagcaagagtttcaggtaaacctctagtgttatctagtatttcacaccaagtatagaagctctgggtttagccgaggttctgaacttcagctgggtcaggatcctcttttgaaaatctgatggtgaccttcatcccggaagagtattacatttgatcaaatatgggaataaaacttcaggtacagtatcaaagccctgaaacttatccacagaacattactaagtcatcttcagaggaaacccaaaagatttgggtcagagcaaaatgatgatgtcttttcccagcaagcctgccaggactgtcaggctttgttttctcttatgcaaggcctggccttgcccaactcttagcacccggcctgtgggcagggaggctgccccctgttcttgtgtgctgttcaccttgctcagtttgttcagttcaacaaacattcctggaaacccttctgtgtgccaggtaccacctgccctgggagtccaaagatgaatctggcctctccctcccctgggtagcttctagtgtagtctgggagttcattaagccagagcttactctctcagcttttctttctgcatttggccaccaaaggtaatagcagtatagctgaggccctaggatgagctatttccatcaaacttttatcagatatttgaagcacagttgtctgtcggggttttatggattagcaaactatttacttttaatgaaattcaccttttgaagaagacctacattctttttgcagtggtatattttgagttactgccttaaaaaaatcctcttatttaaaaactagagattaaacataactgataaccaatttctgaaaaagcttaatgtcatcaccaaatagaaaagtactttgaacctactgaggggaaagaacatcatgccttttatttttccctttttctttcttttttttttttttttttttaagacagagtcttgctgtgtcgcccaggctggagtgcaatggcgccatctcggctcactgcaaactccgtcccccaggttcacaccattctcatgcctcagcctcccgagtagctgggactacaggcacccgccaccacacccagctaattttttgtatttttagtagagatgggggtttcactgtattagccaggatggtctcgatctcctaacctcgtgatctgcccacctcggcctcccaaagtgctgggattacaggtgtgagctaccatgcctggcctaattttttggtatttttagttgagacagggtttcaccatgttggccaggctggtcttgaactctggacctcagatgatctgcctgccttggcctcccaaagtactgggattacaggcgtgaaccatcgcacctggccattagcttacattttatcgctaggatttattaataaaaggataattcacatggaatatgtgttctagacatagtaactgggaactactgtgaacagcttaagccaattctcttaaattgttggatatatatcagtgcatatgggcaaccttattatatgtatacaaaatcaaaggccacttctgcctccgagctgatatattagaggattctcgtatccatgcgctggtatgattcctcaactctttctaaagtatgtatggtgggagaattagtttggaatgcatagcaagtttttatatgtacttttaaaaatcagtctaagccctaaaattatcagaacaaaggagggtgacagcctggcaaggcattcttccacatagctgttctttaatatcttcctacagaaagtttttgtcatgccaaacatggatgatgtttatatcactataatgcactcagccatggaccctcgctctacttcctgcctcctgaaagacccacctgtggaggctgctgatcagccatgatgggtgatgtcagatgttccccatattgtgacatcgagctggatgtgtggggttcttggccgccatctgtactgtagcactggcctctgtgccacagctactgtttcttaaaggactgcttctgccctctgcctgccagtgcccattccactgtgaggtgtcattccctgcatctagtgacaactgtctggattgcctgctgcaaagctttgatttggcaaaggagaccatggaagaatcatggtggatccagaagttatacgtgacccacaccatggcttttaaaagtctacccatgtttgtggcagcaaatgagcacagtaagagcaaagctgaacaacttgcctcctctactcctccaaagcttttcttcaggcagccggtgcacagtggactttttcacttctatactttgtatgcggccttccacacttccagagaatgtcagtgtgcaatgtgtctggagggtggggagaggaattctgtgagccttttcatttcggtgacagaagagatgggcagagcaacttattttccacattaaattgtgcatttgggaagcaagtagccatagtacacacacaacacgctatcagcttgggtaaggacagtgggatttatgtgaacatcaggcaaagccatgagatcaaaccatcccaagcctttcaccaatgaggtacaaccacctgggggctagctaatcttgaatgttttcctgagacaggagcgtatgtgaaaacatcaaacactgcacatgacaggatgggtcctctcatacagatgggatggggttagaaagccagagccagtttttccatctggcgtttcctgtgtcctccaggtttatatgggaatcgaaacagtttgttaatctgattgggagagttccatgggcagatttcccttcctgaaggccaaaacggagaactgctctctttaattatttcaagagtcaagaccaaaagtttgctcagcatcacactacatctcaaaattaatgttgccaacttaattttgtgcatttgtgtcagaatgtttagtttacaaggttgggggctctctttgcttcgagaagtaaacctaataccatttttttattgtttaaagctgcattcaacgtcaaaattaccttgggtaacttttgataacttacatgtgtggacaaagctaatagtggttttttaaacagcaccttgcctgaacatgactttaaagaaattaatatattgaaaacatgtttgaacccttattttaattgcaccattaaaacatttgacttaaattgtttgaccattccagttggtgtactgttctgatttttcgttgtgtaggccgatctgcctgtcagagtccacgtgtcctggtcactggtctttataattgttgtgcaataactaaaggctaaggactagatgcactatcgtgtaaagagattacacatgactgtaccatgttgcacttaatcaaatagtatgtggggatttaaaatcgcttgcattgtttcacaaaataaatatctcaatgtcaa

SEQ ID NO: 21409 - DNA, 4852 bp, Homo sapiens
  misc_feature 1..4852: note = ENST00000583097
  source 1..4852: mol_type = unassigned DNA
gacaatggaggaagcttccctcagtttacagcagaaccccaggctcagggaggtgaagtggggagctccgtcactgtcatttgagggccatttgagggctgtggtcctccgtggagctcctccctctgctgcctcatggcctcactcgagcctgagcccttgtgaagccggcaatgacaagtctgtatggtcgccatgccgagaaaaccactgacatgccaaaaccatcagcccctaaagtgcacgtgcagaggtccgtgtcccgagataccatcgccattcacttctcggcatccggcgaggaggaggaggaagaggaggaggagttcagggagtactttgaggaggggctggatgaccaaagcattgtaacagggctggaagccaaggaagacctctatcttgaaccccaagttggccatgaccccgccggccctgctgcctcgcctgtcctggcagatggactgtccgtgtcccaggcccctgccattttgcccgtctccaagaacactgtaaagctgttggagtcccctgttccagcagcacaagtattaagtacagtgccattggctgtgtccccagggtcgtcttcgtcggggcccttagctagctctcccagtgtgtcatccctttctgagcagaaaaccagttcttcctccccattgtcctctccttctaagtctcccatcctctcatccagtgcctcaacctccaccctttccagtgcaaaacccttcatgagccttgtgaagtccctgtcgaccgaggtggagccaaaagaatccccacaccccgcaaggcacaggcacttgatgaagacattagtcaagtctctgtccacggacacttcccggcaggagtcggatacagtgtcctataagccacctgattccaaactgaacttacacctgttcaagcagttcacacagccccgaaacacaggtggagattccaaaactgcaccttcttccccactgacttctccctctgatactcgttccttttttaaagtgcccgaaatggaggctaaaattgaagatactaaacgacgcctttcagaagtcatctatgagccttttcagctccttagtaaaattataggggaagaaagtggcagccataggcccaaagccttatcttcaagtgcttcagaactctccaatctgtccagcttgaatgggcacttggaaagcaataacaactacagcatcaaggaggaggagtgtgattctgagggggatggctacggaagtgattccaacatccccagaagtgaccacccaaagtccactggtgagcccacaagagagatagaactgaaaagttcccaggggagcagtctgaaggatttaggcctgaagacaagttctctagttctggagaaatgttctttgtctgccttagtgagcaaagaagatgaagagttttgtgaactgtacactgaggacttcgatttggaaacggagggggagagtaaagttgataagctctcagatattcctctcaagccagaggtgctcgcggaagatggtgtggtccttgacagtgaggacgaggtggactcggccgtgcagcacccggaattgccagtgaagacgttgggcttctttataatgtgtgtctatgtgtacctcatcctccccctcccccactatgtgagtggactctttctgggaattggccttggattcatgactgcagtttgcgtgatttggttttttacaccaccaagtgctcataaatatcacaagttacacaaaaatctgcgacactggaacacaagatctctggatatcaaagaacctgaaatactgaagggatggatgaatgagatttacaactatgatccagaaacctaccatgcgactttgacacattcagtctttgttcgacttgagggtggaaccttaagactttcaaagcccaataaaaatatatccaggagggccagctacaatgaacccaagccagaggtcacctacatcagccagaaaatctatgacctctcagacagcaagatttatcttgtacctaaaactttggctcgaaagcgaatctggaataaaaagtaccccatttgtatcgagcttggtcagcaagatgactttatgtctaaagctcagactgataaggagacttcagaagagaagccgccagctgagggaagtgaggaccctaagaagccaccccgccctcaggagggaacaagatctagccagcgagatcagatactctatctctttgggagaactggccgagaaaaagaggaatggtttaggagatttattctggcatctaagctaaagtcggaaatcaagaagtcatcgggtgtctctggaggtaaaccagggcttttgcctgcacacagcagacacaacagtccgtccgggcacctgacccacagccgcagcagcagcaaaggcagtgtggaggagatcatgtcacagccaaagcagaaggagctggcaggcagcgtgcggcagaagatgcttctcgactacagcgtgtacatgggcaggtgtgtcccccaggaaagccgaagcccccagaggagccccctgcagagtgcggagagcagccccacagctgggaagaagttgccagaggttccaccctctgaggaggaagaacaggaagcctgggtgaatgccttgcttggaagaatattttgggacttcttaggagagaaatactggtctgatctggtgtctaagaagatccaaatgaaactcagcaaaataaagctcccctactttatgaatgagctcactctgacggaacttgacatgggcgtggctgtgccaaaaatcctccaggccttcaagccttacgttgatcaccaaggactctggattgatttggaaatgtcctacaatgggtcctttctgatgactctcgagaccaaaatgaatttgaccaaactaggtaaagagcctcttgttgaagccctgaaggttggagaaattggcaaagaaggttgcaggccccgggcattctgtctggcggacagcgatgaggaatcctccagcgctggctcctccgaggaagacgatgccccagagcccagcgggggagacaaacagctcctcccaggggctgaagggtacgttggaggtcatcgaacaagtaagattatgaggtttgttgataaaattaccaagtcaaaatatttccaaaaagcaacagagacagagtttattaaaaagaagatcgaagaagtctccaacacacccctgctgctcactgttgaagtacaagaatgtagaggaaccttggcggtcaacattccaccacccccgactgaccgagtatggtatggtttccgaaagccaccacatgtggagctgaaagctcggccaaaacttggagagagagaagtgactttagttcatgtgacagactggatagagaagaaactggagcaagagtttcagaaagtttttgtcatgccaaacatggatgatgtttatatcactataatgcactcagccatggaccctcgctctacttcctgcctcctgaaagacccacctgtggaggctgctgatcagccatgatgggtgatgtcagatgttccccatattgtgacatcgagctggatgtgtggggttcttggccgccatctgtactgtagcactggcctctgtgccacagctactgtttcttaaaggactgcttctgccctctgcctgccagtgcccattccactgtgaggtgtcattccctgcatctagtgacaactgtctggattgcctgctgcaaagctttgatttggcaaaggagaccatggaagaatcatggtggatccagaagttatacgtgacccacaccatggcttttaaaagtctacccatgtttgtggcagcaaatgagcacagtaagagcaaagctgaacaacttgcctcctctactcctccaaagcttttcttcaggcagccggtgcacagtggactttttcacttctatactttgtatgcggccttccacacttccagagaatgtcagtgtgcaatgtgtctggagggtggggagaggaattctgtgagccttttcatttcggtgacagaagagatgggcagagcaacttattttccacattaaattgtgcatttgggaagcaagtagccatagtacacacacaacacgctatcagcttgggtaaggacagtgggatttatgtgaacatcaggcaaagccatgagatcaaaccatcccaagcctttcaccaatgaggtacaaccacctgggggctagctaatcttgaatgttttcctgagacaggagcgtatgtgaaaacatcaaacactgcacatgacaggatgggtcctctcatacagatgggatggggttagaaagccagagccagtttttccatctggcgtttcctgtgtcctccaggtttatatgggaatcgaaacagtttgttaatctgattgggagagttccatgggcagatttcccttcctgaaggccaaaacggagaactgctctctttaattatttcaagagtcaagaccaaaagtttgctcagcatcacactacatctcaaaattaatgttgccaacttaattttgtgcatttgtgtcagaatgtttagtttacaaggttgggggctctctttgcttcgagaagtaaacctaataccatttttttattgtttaaagctgcattcaacgtcaaaattaccttgggtaacttttgataacttacatgtgtggacaaagctaatagtggttttttaaacagcaccttgcctgaacatgactttaaagaaattaatatattgaaaacatgtttgaacccttattttaattgcaccattaaaacatttgacttaaattgtttgaccatt

SEQ ID NO: 21410 - DNA, 4825 bp, Homo sapiens
  misc_feature 1..4825: note = ENST00000584379
  source 1..4825: mol_type = unassigned DNA
ggggcggcgtgtgcccgggggcgggcgggcggcagggcagcaggaccgcggccggtgccccagccgaagccggagtcgcgcggccgggagcacgggcgccggcatagtacaatgaggcagccagcggatcttggagcctgagcccttgtgaagccggcaatgacaagtctgtatggtcgccatgccgagaaaaccactgacatgccaaaaccatcagcccctaaagtgcacgtgcagaggtccgtgtcccgagataccatcgccattcacttctcggcatccggcgaggaggaggaggaagaggaggaggagttcagggagtactttgaggaggggctggatgaccaaagcattgtaacagggctggaagccaaggaagacctctatcttgaaccccaagttggccatgaccccgccggccctgctgcctcgcctgtcctggcagatggactgtccgtgtcccaggcccctgccattttgcccgtctccaagaacactgtaaagctgttggagtcccctgttccagcagcacaagtattaagtacagtgccattggctgtgtccccagggtcgtcttcgtcggggcccttagctagctctcccagtgtgtcatccctttctgagcagaaaaccagttcttcctccccattgtcctctccttctaagtctcccatcctctcatccagtgcctcaacctccaccctttccagtgcaaaacccttcatgagccttgtgaagtccctgtcgaccgaggtggagccaaaagaatccccacaccccgcaaggcacaggcacttgatgaagacattagtcaagtctctgtccacggacacttcccggcaggagtcggatacagtgtcctataagccacctgattccaaactgaacttacacctgttcaagcagttcacacagccccgaaacacaggtggagattccaaaactgcaccttcttccccactgacttctccctctgatactcgttccttttttaaagtgcccgaaatggaggctaaaattgaagatactaaacgacgcctttcagaagtcatctatgagccttttcagctccttagtaaaattataggggaagaaagtggcagccataggcccaaagccttatcttcaagtgcttcagaactctccaatctgtccagcttgaatgggcacttggaaagcaataacaactacagcatcaaggaggaggagtgtgattctgagggggatggctacggaagtgattccaacatccccagaagtgaccacccaaagtccactggtgagcccacaagagagatagaactgaaaagttcccaggggagcagtctgaaggatttaggcctgaagacaagttctctagttctggagaaatgttctttgtctgccttagtgagcaaagaagatgaagagttttgtgaactgtacactgaggacttcgatttggaaacggagggggagagtaaagttgataagctctcagatattcctctcaagccagaggtgctcgcggaagatggtgtggtccttgacagtgaggacgaggtggactcggccgtgcagcacccggaattgccagtgaagacgttgggcttctttataatgtgtgtctatgtgtacctcatcctccccctcccccactatgtgagtggactctttctgggaattggccttggattcatgactgcagtttgcgtgatttggttttttacaccaccaagtgctcataaatatcacaagttacacaaaaatctgcgacactggaacacaagatctctggatatcaaagaacctgaaatactgaagggatggatgaatgagatttacaactatgatccagaaacctaccatgcgactttgacacattcagtctttgttcgacttgagggtggaaccttaagactttcaaagcccaataaaaatatatccaggagggccagctacaatgaacccaagccagaggtcacctacatcagccagaaaatctatgacctctcagacagcaagatttatcttgtacctaaaactttggctcgaaagcgaatctggaataaaaagtaccccatttgtatcgagcttggtcagcaagatgactttatgtctaaagctcagactgataaggagacttcagaagagaagccgccagctgagggaagtgaggaccctaagaagccaccccgccctcaggagggaacaagatctagccagcgagatcagatactctatctctttgggagaactggccgagaaaaagaggaatggtttaggagatttattctggcatctaagctaaagtcggaaatcaagaagtcatcgggtgtctctggaggtaaaccagggcttttgcctgcacacagcagacacaacagtccgtccgggcacctgacccacagccgcagcagcagcaaaggcagtgtggaggagatcatgtcacagccaaagcagaaggagctggcaggcagcgtgcggcagaagatgcttctcgactacagcgtgtacatgggcaggtgtgtcccccaggaaagccgaagcccccagaggagccccctgcagagtgcggagagcagccccacagctgggaagaagttgccagaggttccaccctctgaggaggaagaacaggaagcctgggtgaatgccttgcttggaagaatattttgggacttcttaggagagaaatactggtctgatctggtgtctaagaagatccaaatgaaactcagcaaaataaagctcccctactttatgaatgagctcactctgacggaacttgacatgggcgtggctgtgccaaaaatcctccaggccttcaagccttacgttgatcaccaaggactctggattgatttggaaatgtcctacaatgggtcctttctgatgactctcgagaccaaaatgaatttgaccaaactaggtaaagagcctcttgttgaagccctgaaggttggagaaattggcaaagaaggttgcaggccccgggcattctgtctggcggacagcgatgaggaatcctccagcgctggctcctccgaggaagacgatgccccagagcccagcgggggagacaaacagctcctcccaggggctgaagggtacgttggaggtcatcgaacaagtaagattatgaggtttgttgataaaattaccaagtcaaaatatttccaaaaagcaacagagacagagtttattaaaaagaagatcgaagaagtctccaacacacccctgctgctcactgttgaagtacaagaatgtagaggaaccttggcggtcaacattccaccacccccgactgaccgagtatggtatggtttccgaaagccaccacatgtggagctgaaagctcggccaaaacttggagagagagaagtgactttagttcatgtgacagactggatagagaagaaactggagcaagagtttcagaaagtttttgtcatgccaaacatggatgatgtttatatcactataatgcactcagccatggaccctcgctctacttcctgcctcctgaaagacccacctgtggaggctgctgatcagccatgatgggtgatgtcagatgttccccatattgtgacatcgagctggatgtgtggggttcttggccgccatctgtactgtagcactggcctctgtgccacagctactgtttcttaaaggactgcttctgccctctgcctgccagtgcccattccactgtgaggtgtcattccctgcatctagtgacaactgtctggattgcctgctgcaaagctttgatttggcaaaggagaccatggaagaatcatggtggatccagaagttatacgtgacccacaccatggcttttaaaagtctacccatgtttgtggcagcaaatgagcacagtaagagcaaagctgaacaacttgcctcctctactcctccaaagcttttcttcaggcagccggtgcacagtggactttttcacttctatactttgtatgcggccttccacacttccagagaatgtcagtgtgcaatgtgtctggagggtggggagaggaattctgtgagccttttcatttcggtgacagaagagatgggcagagcaacttattttccacattaaattgtgcatttgggaagcaagtagccatagtacacacacaacacgctatcagcttgggtaaggacagtgggatttatgtgaacatcaggcaaagccatgagatcaaaccatcccaagcctttcaccaatgaggtacaaccacctgggggctagctaatcttgaatgttttcctgagacaggagcgtatgtgaaaacatcaaacactgcacatgacaggatgggtcctctcatacagatgggatggggttagaaagccagagccagtttttccatctggcgtttcctgtgtcctccaggtttatatgggaatcgaaacagtttgttaatctgattgggagagttccatgggcagatttcccttcctgaaggccaaaacggagaactgctctctttaattatttcaagagtcaagaccaaaagtttgctcagcatcacactacatctcaaaattaatgttgccaacttaattttgtgcatttgtgtcagaatgtttagtttacaaggttgggggctctctttgcttcgagaagtaaacctaataccatttttttattgtttaaagctgcattcaacgtcaaaattaccttgggtaacttttgataacttacatgtgtggacaaagctaatagtggttttttaaacagcaccttgcctgaacatgactttaaagaaattaatatattgaaaacatgtttgaacccttattttaattgcaccattaaaacatttgacttaaa

SEQ ID NO: 21411 - DNA, 1966 bp, Homo sapiens
  misc_feature 1..1966: note = ENST00000583501
  source 1..1966: mol_type = unassigned DNA
tgggaattggccttggattcatgactgcagtttgcgtgatttggttttttacaccaccaagtgctcataaatatcacaagttacacaaaaatctgcgacactggaacacaagatctctggatatcaaagaacctgaaatactgaagggatggatgaatgagatttacaactatgatccagaaacctaccatgcgactttgacacattcagtctttgttcgacttgagggtggaaccttaagactttcaaagcccaataaaaatatatccaggagggccagctacaatgaacccaagccagaggtcacctacatcagccagaaaatctatgacctctcagacagcaagatttatcttgtacctaaaactttggctcgaaagcgaatctggaataaaaagtaccccatttgtatcgagcttggtcagcaagatgactttatgtctaaagctcagactgataaggagacttcagaagagaagccgccagctgagggaagtgaggaccctaagaagccaccccgccctcaggagggaacaagatctagccagcgagatcagatactctatctctttgggagaactggccgagaaaaagaggaatggtttaggagatttattctggcatctaagctaaagtcggaaatcaagaagtcatcgggtgtctctggaggtaaaccagggcttttgcctgcacacagcagacacaacagtccgtccgggcacctgacccacagccgcagcagcagcaaaggcagtgtggaggagatcatgtcacagccaaagcagaaggagctggcaggcagcgtgcggcagaagatgcttctcgactacagcgtgtacatgggcaggtgtgtcccccaggaaagccgaagcccccagaggagccccctgcagagtgcggagagcagccccacagctgggaagaagttgccagaggttccaccctctgaggaggaagaacaggaagcctgggtgaatgccttgcttggaagaatattttgggacttcttaggagagaaatactggtctgatctggtgtctaagaagatccaaatgaaactcagcaaaataaagctcccctactttatgaatgagctcactctgacggaacttgacatgggcgtggctgtgccaaaaatcctccaggccttcaagccttacgttgatcaccaaggactctggattgatttggaaatgtcctacaatgggtcctttctgatgactctcgagaccaaaatgaatttgaccaaactaggtaaagagcctcttgttgaagccctgaaggttggagaaattggcaaagaagggccccgggcattctgtctggcggacagcgatgaggaatcctccagcgctggctcctccgaggaagacgatgccccagagcccagcgggggagacaaacagctcctcccaggggctgaagggtacgttggaggtcatcgaacaagtaagattatgaggtttgttgataaaattaccaagtcaaaatatttccaaaaagcaacagagacagagtttattaaaaagaagatcgaagaagtctccaacacacccctgctgctcactgttgaagtacaagaatgtagaggaaccttggcggtcaacattccaccacccccgactgaccgagtatggtatggtttccgaaagccaccacatgtggagctgaaagctcggccaaaacttggagagagagaagtgactttagttcatgtgacagactggatagagaagaaactggagcaagagtttcagaaagtttttgtcatgccaaacatggatgatgtttatatcactataatgcactcagccatggaccctcgctctacttcctgcctcctgaaagacccacctgtggaggctgctgatcagccatgatgggtgatgtcagatgttccccatattgtgacatcgagctggatgtgtggggttcttggccgccatctgtactgtagcactggcct

SEQ ID NO: 21412 - DNA, 561 bp, Homo sapiens
  misc_feature 1..561: note = ENST00000581812
  source 1..561: mol_type = unassigned DNA
tctgggtccaaggcctctgtggtcctgtcagaggccttggtgctgaagagtgtcctgagcatctgcgctgatccaaggattcttggattgggcctcttctggtttggttgcaggccccgggcattctgtctggcggacagcgatgaggaatcctccagcgctggctcctccgaggaagacgatgccccagagcccagcgggggagacaaacagctcctcccaggggctgaagggtacgttggaggtcatcgaacaagtaagattatgaggtttgttgataaaattaccaagtcaaaatatttccaaaaagcaacagagacagagtttattaaaaagaagatcgaagaagtctccaacacacccctgctgctcactgttgaagtacaagaatgtagaggaaccttggcggtcaacattccaccacccccgactgaccgagtatggtatggtttccgaaagccaccacatgtggagctgaaagctcggccaaaacttggagagagagaagtgactttagttcatgtgacagactggatagagaagaaactggagcaagagttt

SEQ ID NO: 21413 - DNA, 555 bp, Homo sapiens
  misc_feature 1..555: note = ENST00000577489
  source 1..555: mol_type = unassigned DNA
tcttcattgtgtgaatagcccccgtcttcttggctccagggcttttgcctgcacacagcagacacaacagtccgtccgggcacctgacccacagccgcagcagcagcaaaggcagtgtggaggagatcatgtcacagccaaagcagaaggagctggcaggcagcgtgcggcagaagatgcttctcgactacagcgtgtacatgggcaggtgtgtcccccaggaaagccgaagcccccagaggagccccctgcagagtgcggagagcagccccacagctgggaagaagttgccagaggttccaccctctgaggaggaagaacaggaagcctgggtgaatgccttgcttggaagaatattttgggacttcttaggagagaaatactggtctgatctggtgtctaagaagatccaaatgaaactcagcaaaataaagctcccctactttatgaatgagctcactctgacggaacttgacatgggcgtggctgtgccaaaaatcctccaggccttcaagccttacgttgatcaccaagttgcaggccccgggcattctg

SEQ ID NO: 21414 - DNA, 563 bp, Homo sapiens
  misc_feature 1..563: note = ENST00000583922
  source 1..563: mol_type = unassigned DNA
aaggtagattatgttggactttctgtggtgtgctaagcattcagcacccgtacctgggagacttggccctacctgtaggcatctctgcagtgggtgcagtcctgagtgtggagcaaggtggaccggaagcagctgttcctctgctcttgcctgcagttgtttgctttagtgtttggatgcgggcagatctttcaccttttttcctgataagaggagacagagactactggccttacagccaggtggtcaaacatgacaactcggagttgctgtgtgcaaaacctgcctgaaccccatctccagcgagatttgatgatgtttccccattcaaaggaacaaccacgcctcaggaccatacaaggagaggacttcatgaaacagagcctgagcccttgtgaagccggcaatgacaagtctgtatggtcgccatgccgagaaaaccactgacatgccaaaaccatcagcccctaaagtgcacgtgcagaggtccgtgtcccgagataccatcgccattcacttctcggcatccggcgaggaggaggaggaagaggaggaggagttca

SEQ ID NO: 21415 - DNA, 458 bp, Homo sapiens
  misc_feature 1..458: note = ENST00000583738
  source 1..458: mol_type = unassigned DNA
gtgccccagccgaagccggagtcgcgcggccgggagcacgggcgccggcatagtacaatgaggcagccagcggatcttggcagaaacaaccttatacaaagtggttccgtggaggagagaattaccatgttatagtcctcaggaaggcttttgttcctggaaaggataccattgaatagtgacatctgagttttaaggtaataacagaaaaaacttggaaataaacatcccattatttgacctccaaggcagaagactggcaccaaggaaatggcagcttcgtccctttcctgtcttgggcattgagcctgagcccttgtgaagccggcaatgacaagtctgtatggtcgccatgccgagaaaaccactgacatgccaaaaccatcagcccctaaagtgcacgtgcagaggtccgtgtcccgagataccatcgccattcacttctcggcatccggcga

SEQ ID NO: 21416 - DNA, 4852 bp, Homo sapiens
  misc_feature 1..4852: note = ENST00000615733
  source 1..4852: mol_type = unassigned DNA
gacaatggaggaagcttccctcagtttacagcagaaccccaggctcagggaggtgaagtggggagctccgtcactgtcatttgagggccatttgagggctgtggtcctccgtggagctcctccctctgctgcctcatggcctcactcgagcctgagcccttgtgaagccggcaatgacaagtctgtatggtcgccatgccgagaaaaccactgacatgccaaaaccatcagcccctaaagtgcacgtgcagaggtccgtgtcccgagataccatcgccattcacttctcggcatccggcgaggaggaggaggaagaggaggaggagttcagggagtactttgaggaggggctggatgaccaaagcattgtaacagggctggaagccaaggaagacctctatcttgaaccccaagttggccatgaccccgccggccctgctgcctcgcctgtcctggcagatggactgtccgtgtcccaggcccctgccattttgcccgtctccaagaacactgtaaagctgttggagtcccctgttccagcagcacaagtattaagtacagtgccattggctgtgtccccagggtcgtcttcgtcggggcccttagctagctctcccagtgtgtcatccctttctgagcagaaaaccagttcttcctccccattgtcctctccttctaagtctcccatcctctcatccagtgcctcaacctccaccctttccagtgcaaaacccttcatgagccttgtgaagtccctgtcgaccgaggtggagccaaaagaatccccacaccccgcaaggcacaggcacttgatgaagacattagtcaagtctctgtccacggacacttcccggcaggagtcggatacagtgtcctataagccacctgattccaaactgaacttacacctgttcaagcagttcacacagccccgaaacacaggtggagattccaaaactgcaccttcttccccactgacttctccctctgatactcgttccttttttaaagtgcccgaaatggaggctaaaattgaagatactaaacgacgcctttcagaagtcatctatgagccttttcagctccttagtaaaattataggggaagaaagtggcagccataggcccaaagccttatcttcaagtgcttcagaactctccaatctgtccagcttgaatgggcacttggaaagcaataacaactacagcatcaaggaggaggagtgtgattctgagggggatggctacggaagtgattccaacatccccagaagtgaccacccaaagtccactggtgagcccacaagagagatagaactgaaaagttcccaggggagcagtctgaaggatttaggcctgaagacaagttctctagttctggagaaatgttctttgtctgccttagtgagcaaagaagatgaagagttttgtgaactgtacactgaggacttcgatttggaaacggagggggagagtaaagttgataagctctcagatattcctctcaagccagaggtgctcgcggaagatggtgtggtccttgacagtgaggacgaggtggactcggccgtgcagcacccggaattgccagtgaagacgttgggcttctttataatgtgtgtctatgtgtacctcatcctccccctcccccactatgtgagtggactctttctgggaattggccttggattcatgactgcagtttgcgtgatttggttttttacaccaccaagtgctcataaatatcacaagttacacaaaaatctgcgacactggaacacaagatctctggatatcaaagaacctgaaatactgaagggatggatgaatgagatttacaactatgatccagaaacctaccatgcgactttgacacattcagtctttgttcgacttgagggtggaaccttaagactttcaaagcccaataaaaatatatccaggagggccagctacaatgaacccaagccagaggtcacctacatcagccagaaaatctatgacctctcagacagcaagatttatcttgtacctaaaactttggctcgaaagcgaatctggaataaaaagtaccccatttgtatcgagcttggtcagcaagatgactttatgtctaaagctcagactgataaggagacttcagaagagaagccgccagctgagggaagtgaggaccctaagaagccaccccgccctcaggagggaacaagatctagccagcgagatcagatactctatctctttgggagaactggccgagaaaaagaggaatggtttaggagatttattctggcatctaagctaaagtcggaaatcaagaagtcatcgggtgtctctggaggtaaactcagggcttttgccgcacacagcagacacaacagtccgtccgggcacctgacccacagccgcagcagcagcaaaggcagtgtggaggagatcatgtcacagccaaagcagaaggagctggcaggcagcgtgcggcagaagatgcttctcgactacagcgtgtacatgggcaggtgtgtcccccaggaaagccgaagcccccagaggagccccctgcagagtgcggagagcagccccacagctgggaagaagttgccagaggttccaccctctgaggaggaagaacaggaagcctgggtgaatgccttgcttggaagaatattttgggacttcttaggagagaaatactggtctgatctggtgtctaagaagatccaaatgaaactcagcaaaataaagctcccctactttatgaatgagctcactctgacggaacttgacatgggcgtggctgtgccaaaaatcctccaggccttcaagccttacgttgatcaccaaggactctggattgatttggaaatgtcctacaatgggtcctttctgatgactctcgagaccaaaatgaatttgaccaaactaggtaaagagcctcttgttgaagccctgaaggttggagaaattggcaaagaaggttgcaggccccgggcattctgtctggcggacagcgatgaggaatcctccagcgctggctcctccgaggaagacgatgccccagagcccagcgggggagacaaacagctcctcccaggggctgaagggtacgttggaggtcatcgaacaagtaagattatgaggtttgttgataaaattaccaagtcaaaatatttccaaaaagcaacagagacagagtttattaaaaagaagatcgaagaagtctccaacacacccctgctgctcactgttgaagtacaagaatgtagaggaaccttggcggtcaacattccaccacccccgactgaccgagtatggtatggtttccgaaagccaccacatgtggagctgaaagctcggccaaaacttggagagagagaagtgactttagttcatgtgacagactggatagagaagaaactggagcaagagtttcagaaagtttttgtcatgccaaacatggatgatgtttatatcactataatgcactcagccatggaccctcgctctacttcctgcctcctgaaagacccacctgtggaggctgctgatcagccatgatgggtgatgtcagatgttccccatattgtgacatcgagctggatgtgtggggttcttggccgccatctgtactgtagcactggcctctgtgccacagctactgtttcttaaaggactgcttctgccctctgcctgccagtgcccattccactgtgaggtgtcattccctgcatctagtgacaactgtctggattgcctgctgcaaagctttgatttggcaaaggagaccatggaagaatcatggtggatccagaagttatacgtgacccacaccatggcttttaaaagtctacccatgtttgtggcagcaaatgagcacagtaagagcaaagctgaacaacttgcctcctctactcctccaaagcttttcttcaggcagccggtgcacagtggactttttcacttctatactttgtatgcggccttccacacttccagagaatgtcagtgtgcaatgtgtctggagggtggggagaggaattctgtgagccttttcatttcggtgacagaagagatgggcagagcaacttattttccacattaaattgtgcatttgggaagcaagtagccatagtacacacacaacacgctatcagcttgggtaaggacagtgggatttatgtgaacatcaggcaaagccatgagatcaaaccatcccaagcctttcaccaatgaggtacaaccacctgggggctagctaatcttgaatgttttcctgagacaggagcgtatgtgaaaacatcaaacactgcacatgacaggatgggtcctctcatacagatgggatggggttagaaagccagagccagtttttccatctggcgtttcctgtgtcctccaggtttatatgggaatcgaaacagtttgttaatctgattgggagagttccatgggcagatttcccttcctgaaggccaaaacggagaactgctctctttaattatttcaagagtcaagaccaaaagtttgctcagcatcacactacatctcaaaattaatgttgccaacttaattttgtgcatttgtgtcagaatgtttagtttacaaggttgggggctctctttgcttcgagaagtaaacctaataccatttttttattgtttaaagctgcattcaacgtcaaaattaccttgggtaacttttgataacttacatgtgtggacaaagctaatagtggttttttaaacagcaccttgcctgaacatgactttaaagaaattaatatattgaaaacatgtttgaacccttattttaattgcaccattaaaacatttgacttaaattgtttgaccatt

SEQ ID NO: 21417 - DNA, 734 bp, Homo sapiens
  misc_feature 1..734: note = ENST00000532135
  source 1..734: mol_type = unassigned DNA
ggaggagcttcccagacgtgtagagcttatgaagtttaggaagcagcttcccagacatgtagagcttatggagaggtgagggagccaatctcagccacattcagcttcctggagagaatgaccaaagggcgacgcttcaacccaccttcagacaaggatgggagatggttccctcacatcgggctaacgcaaaagacaccagaatccatcaccagtgctacgtcaaaagagccccagagtccacacttgcctcggcaagcggaggggaagctgccgcccatatacaaagtccgggagaagcaagcagtgaataaccagttccccttctccgtgcatgacaatcggcacagcttggagaactctggatgctaccttgactccgaaagaatgacagcaacggacccacagggagaaccagacaagagacaagagttctatgagccggtgaggacccagtccattcctcatccaggcctgagaactaatgcacccctccttgcagtgtgagctctttgggagcaagtttctgtcacccattccccagagtcctgactaatagaatgtgtattagttgggaagaaaaggaccttttgtcttagcctagctagttagtaaccaccaggatttattcagcattcttggaaaaataaatttccagctatggagaaatcctcttattctgcttgcctgtgtgggcgcaggtattaatagggctatctccctggcaggaagaa

SEQ ID NO: 21418 - DNA, 438 bp, Homo sapiens
  misc_feature 1..438: note = ENST00000526819
  source 1..438: mol_type = unassigned DNA
agtaaagatcaggaacaaggaggaggaggagcttcccagacgtgtagagcttatgaagtttaggaagcagcttcccagacatgtagagcttatggagaggtgagggagccaatctcagccacattcagcttcctggagagaatgaccaaagggcgacgcttcaacccaccttcagacaaggatgggagatggttccctcacatcgggctaacgcaaaagacaccagaatccatcaccagtgctacgtcaaaagagccccagagtccacacttgcctcggcaagcggaggggaagctgccgcccatatacaaagtccgggagaagcaagcagtgaataaccagttccccttctccgtgcatgacaatcggcacagcttggagaactctggatgctaccttgactcctttgcagatggcctatcgtgggacttctctttg

SEQ ID NO: 21419 - DNA, 922 bp, Homo sapiens
  misc_feature 1..922: note = ENST00000368821
  source 1..922: mol_type = unassigned DNA
ggaagaggctgagaagtaaagatcaggaacaaggaggaggaggagcttcccagacgtgtagagcttatgaagtttaggaagcagcttcccagacatgtagagcttatggagaggtgagggagccaatctcagccacattcagcttcctggagagaatgaccaaagggcgacgcttcaacccaccttcagacaaggatgggagatggttccctcacatcgggctaacgcaaaagacaccagaatccatcaccagtgctacgtcaaaagagccccagagtccacacttgcctcggcaagcggaggggaagctgccgcccatatacaaagtccgggagaagcaagcagtgaataaccagttccccttctccgtgcatgacaatcggcacagcttggagaactctggatgctaccttgactccggcctgggacgtaagaagatctctccagataagaggcaacatgtttcaagaaattttaatctctgggcatgtgactatgttccatcttgtcttgatggcttttcaaataaccaaatatcatacgtatataaagaagccatggtggtctcaagcttcagacgctttccacgatgctataaagagatatggaacgcttttacatttcttcctgagagaagctatacagaggttttgaaaaagaagcccaaagtaaggttcactgttgacaaaaaggttgtttcttcactggagtcctaatcctcccagaagatttttgatgaattttgtaatactggtatttcatcagacatcctaaaagtatatgttttctgatccagcaccactatttaatttttaaagtacttttatgatttttataaggtcaaaaaacattcaaatccttgtgaaatgaatttgtgatgacatacgcatgtgtaaataaacttttcagatggccacattta

SEQ ID NO: 21420 - DNA, 689 bp, Homo sapiens
  misc_feature 1..689: note = ENST00000560827
  source 1..689: mol_type = unassigned DNA
ggccagggaagcgcgccgctgggggccgggaggagtccggcccggctggtggagagcaggaaaacgtgggggaggtgctggcgagagaaagagaacttgcgtgaggaggaggaggagaaaccaaatttaataatatttggcgtggaaatgggatttgggcgggggaggcatcttcaaagcaagtaaagagaaatcaacattatcccccttcccctgcacatgcatgtgaggattacttcctccctgagtaaatgaagagaactgaagcaggcgtttaaatgcagaattgcaggcaaaaacagctgacgtggttcaacaagctaaggaaataataagagatcggcaagaagtacgatctaggcctgtttcaacacaaatgaaatcatgtgatgacgaagatgattacagtttaagaggtctgttaccatctgaagggatagttcatcttcattcagaaactaagccaaagaccaaaaacattgatcctgtaaacaaggttcaaaacaaattacactctgcaaataaaggaaggaaaacaaattcaagtgttaaattgaaatactctgatgtccaaactgccgacgatgttgccattccagaggatttctcagacttttcccttgcaaaaacaattagcaaaattgaagggcaactggaggaagaaggcttacctgaatatatagatgata

SEQ ID NO: 21421 - DNA, 1433 bp, Homo sapiens
  misc_feature 1..1433: note = ENST00000352903
  source 1..1433: mol_type = unassigned DNA
gtaaccgcgtcgcagtcgccgaagatggcggggcgaagtctgtgtctcacgagaagcagcgttccagggactccgttcccgccacccgttcagcaaccctctacacctggacccgacctcctcgccttggaggaagaatataagcgtttaaatgcagaattgcaggcaaaaacagctgacgtggttcaacaagctaaggaaataataagagatcggcaagaagtacgatctaggcctgtttcaacacaaatgaaatcatgtgatgacgaagatgattacagtttaagaggtctgttaccatctgaagggatagttcatcttcattcagaaactaagccaaagaccaaaaacattgatcctgtaaacaaggttcaaaacaaattacactctgcaaataaaggaaggaaaacaaattcaagtgttaaattgaaatactctgatgtccaaactgccgacgatgttgccattccagaggatttctcagacttttcccttgcaaaaacaattagcaaaattgaagggcaactggaggaagaaggcttacctgaatatatagatgatattttttctggtgttagtaatgacattggaacagaagcacagatcagatttctaaaggccaaactccatgttatgcaggaggaattggataatgttgtatgtgaatgcaataaaaaggaggatgaaattcagaatttaaagtctcaagtaaaaaattttgaagaagattttatgagacagcagcgaacaattaatatgcaacagtctcaagtagaaaaatacaaaactcttttcgaagaagcaaacaaaaagtatgatggattacagcaacagttgtcttcagtagaaagggaattagaaaataaaagaagactgcaaaaacaggctgcaagtagtcaaagtgccacagaggttcgcttgaatagagctctagaagaagcagaaaagtataaactggagttaagtaaattaaggcaaaataacaaggacatagcaaatgaagaacacaaaaaaattgaagtgttaaaatcagaaaacaagaagctagaaaaacaaaaaggagaattaatgatagggttcaagaaacagttaaaattaattgatgttttaaaaaggcaaaagatgcatattgaagctgccaagatgctatctttcactgaggaggaatttatgaaagcacttgaatggggaaattcataagtgatctacttcagttagtctctatgacaataagaaaactaaggctcagagaaaaagccaaaactagtacttgcatgacacctagtcaagtcctagtagtattcgactttcattttgtggatcaatttttatttggaaaatagcagcaattctcgtaggagtcagattaaaacgtctacaactaccttgaataacttcaactatcaggataattaaaactgcaaaccactgga

SEQ ID NO: 21422 - DNA, 1768 bp, Homo sapiens
  misc_feature 1..1768: note = ENST00000537232
  source 1..1768: mol_type = unassigned DNA
gcagtcgccgaagatggcggggcgaagtctgtgtctcacgagaagcagcgttccagggactccgttcccgccacccgttcagcaaccctctacacctggacccgacctcctcgccttggaggaagaatataagtaagaaattcggcggttgaacttttccttctttctttcatctgaatgaggctgcttacaagtacttttttctggagactggctggatcttcgggaccactcactctgcagcattcccttctcgtcatctcgttcacctgccgtttatcctttctttgtctttgatctgagtagttcgcctgcgtattagaagatatttgaagtgggcgaaaatttagcccaagcgtttaaatgcagaattgcaggcaaaaacagctgacgtggttcaacaagctaaggaaataataagagatcggcaagaagtacgatctaggcctgtttcaacacaaatgaaatcatgtgatgacgaagatgattacagtttaagaggtctgttaccatctgaagggatagttcatcttcattcagaaactaagccaaagaccaaaaacattgatcctgtaaacaaggttcaaaacaaattacactctgcaaataaaggaaggaaaacaaattcaagtgttaaattgaaatactctgatgtccaaactgccgacgatgttgccattccagaggatttctcagacttttcccttgcaaaaacaattagcaaaattgaagggcaactggaggaagaaggcttacctgaatatatagatgatattttttctggtgttagtaatgacattggaacagaagcacagatcagatttctaaaggccaaactccatgttatgcaggaggaattggataatgttgtatgtgaatgcaataaaaaggaggatgaaattcagaatttaaagtctcaagtaaaaaattttgaagaagattttatgagacagcagcgaacaattaatatgcaacagtctcaagtagaaaaatacaaaactcttttcgaagaagcaaacaaaaagtatgatggattacagcaacagttgtcttcagtagaaagggaattagaaaataaaagaagactgcaaaaacaggctgcaagtagtcaaagtgccacagaggttcgcttgaatagagctctagaagaagcagaaaagtataaactggagttaagtaaattaaggcaaaataacaaggacatagcaaatgaagaacacaaaaaaattgaagtgttaaaatcagaaaacaagaagctagaaaaacaaaaaggagaattaatgatagggttcaagaaacagttaaaattaattgatgttttaaaaaggcaaaagatgcatattgaagctgccaagatgctatctttcactgaggaggaatttatgaaagcacttgaatggggaaattcataagtgatctacttcagttagtctctatgacaataagaaaactaaggctcagagaaaaagccaaaactagtacttgcatgacacctagtcaagtcctagtagtattcgactttcattttgtggatcaatttttatttggaaaatagcagcaattctcgtaggagtcagattaaaacgtctacaactaccttgaataacttcaactatcaggataattaaaactgcaaaccactggacaaacaggacattgtttgtgctactttctttttcaaaggacagcgctatatggcttagcaaatgaagtctctccaccttttcttatcacctgccacacctaaaggtattcctgttaacagcat

SEQ ID NO: 21423 - DNA, 2297 bp, Homo sapiens
  misc_feature 1..2297: note = ENST00000561221
  source 1..2297: mol_type = unassigned DNA
cgaagatggcggggcgaagtctgtgtctcacgagaagcagcgttccagggactccgttcccgccacccgttcagcaaccctctacacctggacccgacctcctcgccttggaggaagaatataagcgtttaaatgcagaattgcaggcaaaaacagctgacgtggttcaacaagctaaggaaataataagagatcggcaagaagtacgatctaggcctgtttcaacacaaatgaaatcatgtgatgacgaagatgattacagtttaagaggtctgttaccatctgaagggatagttcatcttcattcagaaactaagccaaagaccaaaaacattgatcctgtaaacaaggttcaaaacaaattacactctgcaaataaaggaaggaaaacaaattcaagtgttaaattgaaatactctgatgtccaaactgccgacgatgttgccattccagaggatttctcagacttttcccttgcaaaaacaattagcaaaattgaagggcaactggaggaagaaggcttacctgaatatatagatgatattttttctggtgttagtaatgacattggaacagaagcacagatcagatttctaaaggccaaactccatgttatgcaggaggaattggataatgttgtatgtgaatgcaataaaaaggaggatgaaattcagaatttaaagtctcaagtaaaaaattttgaagaagattttatgagacagcagcgaacaattaatatgcaacagtctcaagtagaaaaatacaaaactcttttcgaagaagcaaacaaaaagtatgatggattacagcaacagttgtcttcagtagaaagggtaattatttggtatttttcctaacttaatgccacagatacaagaaaattattaaggttacacatttgtatagatgccattttgacagttcagttattttattagtatttactgaaaactctttccccttacatagaatatttttaacaactttattgagatgtaattcacccttttaaagtatgcaattcaatggcttttggtgtattcatagaattgtgcaactatcaccacaaccattttcataatccctaaaagatacttcataccctttagccaccacaccctgaccctgctcccctcaatcccttacagccctaggcaaccactattctattttatgtctcaataaatttgtctattctggaaatcacatatacgtggaatcatataatatgtggtcttttgtgactgacttttacttaagatattttcaaggttcattcatgttgcagcccctatcagtattttatttctttttattggcaagtaacattctgttatatggatataacacatttaatttatctgtttatcagttcgtagctttaggttatttgggttgtttctactgtctgacaattttaaatactttgaatattcatgtacaagtttttgtgtgcacgtatgtttctatttctcttggttatatagccaggaatggaattgctgggtcatatggaaatcctatgttgaccttttgaggaattgctgactgttttccaacctgcctgtaccattttacattcctaccagtagtgcatgaagctcctaatttctacacatcctcaccaacatctgctagattatctttttgattatagccatactgcaagtgtaaaagggttacctcattgtggttttgatttgcatttccctaataactaatgatgttgaacatcttttcatgtgcttattggcatttgtatattttctttggagaaatgtctgttaaggtctttgcccattttttaaattggatttgaaaaaattactgaataataagaacttttaagttctttatgtgtttagatacaagtcccttatcaggtatattttgcaaatagttttcccctacagtgggttgtctttcactttctttatggtactctaaaggcacaaaagttttaaattttgatgaagtccagtttatctaatatttatttggtttcctgtgcttttggtgtcatatttaaggggagaatgtattttaaataaactatcctagcttatattagtgtgccattgtgaaaataaaaatatactgtttgagattgctttgtaaaatgtagtgacgataagaattatgtaatatagcatatcccgagatttagtaagaaaatgtgccccctttattagtacccttacatttctcgtttgtatggtcatatttaaaaaccctgctttttaaacattttggtcttgtataattagctttatcttgtaataaattttaatatcaaa

SEQ ID NO: 21424 - DNA, 687 bp, Homo sapiens
  misc_feature 1..687: note = ENST00000558127
  source 1..687: mol_type = unassigned DNA
gaagatggcggggcgaagtctgtgtctcacggtcagttcaactccaggctcctggggagcgtctgggttccggcgactaggacgcctaacttcctttaacttcgggtctgaaagtctgtggctcttttacagagaagcagcgttccagggactccgttcccgccacccgttcagcaaccctctacacctggacccgacctcctcgccttggaggaagaatataagtaagaaattcggcggttgaacttttccttctttctttcatctgaatgaggctgcttacaagtacttttttctggagactggctggatcttcgggaccactcactctgcagcattcccttctcgtcatctcgttcacctgccgtttatcctttctttgtctttgatctgagtagttcgcctgcgtattagaagatatttgaagtgggcgaaaatttagcccaagcgtttaaatgcagaattgcaggcaaaaacagctgacgtggttcaacaagctaaggaaataatatgttaaattgaaatactctgatgtccaaactgccgacgatgttgccattccagaggatttctcagacttttcccttgcaaaaacaattagcaaaattgaagggcaactggaggaagaaggcttacctgaatatatagatgatattttttctggtgttagtaatgacattggaacag

SEQ ID NO: 21425 - DNA, 4440 bp, Homo sapiens
  misc_feature 1..4440: note = ENST00000558083
  source 1..4440: mol_type = unassigned DNA
gaagatggcggggcgaagtctgtgtctcacggtcagttcaactccaggctcctggggagcgtctgggttccggcgactaggacgcctaacttcctttaacttcgggtctgaaagtctgtggctcttttacagagaagcagcgttccagggactccgttcccgccacccgttcagcaaccctctacacctggacccgacctcctcgccttggaggaagaatataagcgtttaaatgcagaattgcaggcaaaaacagctgacgtggttcaacaagctaaggaaataataagagatcggcaagaagtacgatctaggcctgtttcaacacaaatgaaatcatgtgatgacgaagatgattacagtttaagaggtctgttaccatctgaagggatagttcatcttcattcagaaactaagccaaagaccaaaaacattgatcctgtaaacaaggttcaaaacaaattacactctgcaaataaaggaaggaaaacaaattcaagtgttaaattgaaatactctgatgtccaaactgccgacgatgttgccattccagaggatttctcagacttttcccttgcaaaaacaattagcaaaattgaagggcaactggaggaagaaggcttacctgaatatatagatgatattttttctggtgttagtaatgacattggaacagaagcacagatcagatttctaaaggccaaactccatgttatgcaggaggaattggataatgttgtatgtgaatgcaataaaaaggaggatgaaattcagaatttaaagtctcaagtaaaaaattttgaagaagattttatgagacagcagcgaacaattaatatgcaacagtctcaagtagaaaaatacaaaactcttttcgaagaagcaaacaaaaagtatgatggattacagcaacagttgtcttcagtagaaagggtaattatttggtatttttcctaacttaatgccacagatacaagaaaattattaaggttacacatttgtatagatgccattttgacagttcagttattttattagtatttactgaaaactctttccccttacatagaatatttttaacaactttattgagatgtaattcacccttttaaagtatgcaattcaatggcttttggtgtattcatagaattgtgcaactatcaccacaaccattttcataatccctaaaagatacttcataccctttagccaccacaccctgaccctgctcccctcaatcccttacagccctaggcaaccactattctattttatgtctcaataaatttgtctattctggaaatcacatatacgtggaatcatataatatgtggtcttttgtgactgacttttacttaagatattttcaaggttcattcatgttgcagcccctatcagtattttatttctttttattggcaagtaacattctgttatatggatataacacatttaatttatctgtttatcagttcgtagctttaggttatttgggttgtttctactgtctgacaattttaaatactttgaatattcatgtacaagtttttgtgtgcacgtatgtttctatttctcttggttatatagccaggaatggaattgctgggtcatatggaaatcctatgttgaccttttgaggaattgctgactgttttccaacctgcctgtaccattttacattcctaccagtagtgcatgaagctcctaatttctacacatcctcaccaacatctgctagattatctttttgattatagccatactgcaagtgtaaaagggttacctcattgtggttttgatttgcatttccctaataactaatgatgttgaacatcttttcatgtgcttattggcatttgtatattttctttggagaaatgtctgttaaggtctttgcccattttttaaattggatttgaaaaaattactgaataataagaacttttaagttctttatgtgtttagatacaagtcccttatcaggtatattttgcaaatagttttcccctacagtgggttgtctttcactttctttatggtactctaaaggcacaaaagttttaaattttgatgaagtccagtttatctaatatttatttggtttcctgtgcttttggtgtcatatttaaggggagaatgtattttaaataaactatcctagcttatattagtgtgccattgtgaaaataaaaatatactgtttgagattgctttgtaaaatgtagtgacgataagaattatgtaatatagcatatcccgagatttagtaagaaaatgtgccccctttattagtacccttacatttctcgtttgtatggtcatatttaaaaaccctgctttttaaacattttggtcttgtataattagctttatcttgtaataaattttaatatcaaaatcacttagacaaaatttatatgcagtaaattcacactttttagtgtacaattctatgagttttgacaaatgtatgcagtaatataactatcactataattgagacatagaacagttccatcagccccccaaaattccctgtgaatttagtgaaggccttccctaattccaccaccaggcaaccactgatctgtgtttggttcttaaattttggacttttcccaaatgtcacataaatagaatcgcattggatatagacttttgaatctgttttttttttttttttttcagttagcataaaacatttgatatggtttggctgtgtccccacccaaatttcatcttgaattcccacttgttgcgggagggagccggtgggaggtaattgaatcatgggggcaagtctttcctgtgctgttcttgtgatggcgaaaaagtctcaggagatctgatggttttaaaagggagagtttcccagtgcaaactttcttgtctgctgctatgtgagacatgccttttactttccaacatgattgtgaggcctccccagccatgtggaactgtgagtccaataaacctctctcttttgtaaattgcccagtcttgggtgtgtcttaccagcagcatgacgatgaactaatccagtaaattggtactagtagagtcaggcgctactgaaaagataccaaaaagtgttgaagtgaccttggaactgggtaagaggcagaggttggaaaagtttggagggctcagaaaaatacaggaaaatatgggaaagtttggaactccctagagacttgttgaatggctttgaccaatatactgataatgatatggacaatgaaatccaggctgaggtgatctcagatggagatgaggaacttgttaggaactagagcaaatgtgactcttgttatgttttagcaaagagactggtggcattttgtccctcccctagagatctgtggaactttgaacttgagagagatgatttagggtatctggtggaacaaatttctaagcagcaaagcactcaagaggtgacttggtgctgttaaaggcatccagttttgaaagggaaacagagcacaaaaggttggaaaatttgcagcctgagaatgcagtggaaaagaaaatcccattttctgaggagaaattcaagccggctgcagaaatttgcataagtcttgaggagctgaatgttaatccccaggacaatggggaaaatgtctcccaaggtatgcagaggtcttcacggcagcgcctcccatcacaggcccagagacctaggaggcatgattggttttgaaatgtgaggacatgagatttgggagggtcttggggtagaatatggtttggctgtgtccccacccaaatttcatcttgaattcccatgtgttgtgggagggacccagtgggaggtcattgaatcacaggggcaggtctttcctgtgctgttctcatgagagtgaataagtctcaggagatttgatggttttaaaaatgggaatttccctgcacaagctctcgtctgccaccatgtgagatgtgcctttaccttccagcatgattgtgaggcctccccagccatgtgaaactgtgagtgcagtaaatctctttcttttgtaaattgcccagtcttgggtatgtctttatcagcagcatgaaaacggactaatacaacattcaatatttatccctattatagtccattcctttttattgctgagtagtgtaaactatgaatgaatgtacttcagtttgtttccccactcatctagtaataaaagttaattatagtatttaatagtctgaacttgtgtttccagtatggtagccacttaccatatgtggctaaattgcgatgtgctataactataaagtaaaaatcagattttgaagaattcatgtaaaacagaatgaagaatgtaaaatatctcaaaatctctttaatattttttgtattggttatatgttgaaataatatttgaatatattaggttaagtgaaatatgttattaaaattaattttacctgtttgtt

SEQ ID NO: 21426 - DNA, 537 bp, Homo sapiens
  misc_feature 1..537: note = ENST00000559142
  source 1..537: mol_type = unassigned DNA
taggcgtttaaatgcagaattgcaggcaaaaacagctgacgtggttcaacaagctaaggaaataatatttttgccagtgtctgaaaagcaggaaaatacttgtacaaaaggaccccacgttatagtagaatgacagattcattacgttttctactcagagagccctgtaaaaagaatctccccctgcaaataaaaaacagaatagaaaactgggataagctaggaaaggggttggggaatggattcctacccctgcagaagcaaacaatataaggtttctcatatttaatttttatttactcactttctctttttaaaatttttaatgtttgtggttacatagtaagtgtttatggggtaaatgagatattttgatacaggcatgcattgtgtaataatcacatcatggaaaatggggtatccatcccctcaagtatttatcctttgtgttacaaaaaatccaattatactattttagttaatttaaaatgtacaattaaatgattttgactataataaacatgttgtgctgtcaaa

SEQ ID NO: 21427 - DNA, 632 bp, Homo sapiens
  misc_feature 1..632: note = ENST00000559546
  source 1..632: mol_type = unassigned DNA
accaaagatagatcctgaaggtttgtgggagaaagcttagacagtaaggtattagtgtatttctttgcttcaaagacacatatactacattttaactgctcagaaattgggatctgtgttacagtcagtggcattttgtaatcacagtggctgcactgaagctgagttttgctagagaagatttatgtttgtttctgccaaactctcagggacattactgacctgagaacactttaaataatctgatgtagtttggaccaccctggtgcgtgtgaatttagtctgcaaacttatgtgaatactacctgtgatttctttctgttgagtggatttattcgtcattgaccttttcattaggactgttgagtacctatagtgccccctaacagatatctcctatttgactccccatcttgagtattttcttctttataaagtaatggtctgtcttacaattgatgtcatcttagattcagcaaaagacagtaaatataattatttaaattcacagaagcacagatcagatttctaaaggccaaactccatgttatgcaggaggaattggataatgttgtatgtgaatgcaataaaaaggaggatgaaattcagaatttaaagtctcaagtaaaaaa

SEQ ID NO: 21428 - DNA, 2005 bp, Homo sapiens
  misc_feature 1..2005: note = ENST00000560582
  source 1..2005: mol_type = unassigned DNA
cagcagcgaacaattaatatgcaacagtctcaagtagaaaaatacaaaactcttttcgaagaagcaaacaaaaagtatgatggattacagcaacagttgtcttcagtagaaagggaattagaaaataaaagaagactgcaaaaacaggctgcaagtagtcaaagtgccacagaggttcgcttgaatagagctctagaagaagcagaaaagtataaactggagttaagtaaattaaggcaaaataacaagatgcatattgaagctgccaagatgctatctttcactgaggaggaatttatgaaagcacttgaatggggaaattcataagtgatctacttcagttagtctctatgacagtatgtgatggatacccattttacttattgtagtggtttgaattatttttattcttcataagtaatatatttgattatgaaagcaaaataatttcaaagaattccctttttagatttaggagattagctattagctctttttgagttgttttttaagttcttagcgtgacaattaagcacatcagataataaaattcttgactcttttcatttataattctcctcccttacagtagaccaaaaaagatgctttaaaagaaaattccaaatatttatttccctggctaaatcaagtaagtaaagttcgtaaacacagacagaaggcagttcactttggggtagagttctgtattagtcaaggtaaatatactgtcttgaggatggggatgcaaacagtgctctgtagtgttgtagaaatcggattttgaaattatcagtacaaaaataacagcttgattaaaattaatttgtatctgataattgtttacaagttatgaaattcagtgatgatttacaaaatccaaacagacaatggatacctaatgccactgaactgtaaaacaaaagttatgctgacatctagtggtaacatgcaaaaaatctatgctttacccaattttgatgatatcatttctcttcacaaatttcactcctttgttgatatactttcctgaactcttcaccaagcagatcaatatcatcctcttttttaaatactccctacgagaaaaatactttgtgggttacttttgaataccagaatatttcactaaatgcttttaagactgacagacataagattagtaaagttatctccaaggtaatgaaatctattcaacagattaatgaaactttaaaaaaatcaatacttttcaaaaaataagactttacatatatattgaatattcctagactgacccaattttctgatttatcagctctagtgtaggagcttttcataggaatctgagctcttctacaagttctactgcttggattacctagataggaaggcacttcatctatactgtaccctacccttttctttaaatagctctataatatgatataatggtgagcttcagtagattcatgcatgggattagttcttcatgcctcagttctatggctaatcagcaaacagtcaatcttgcagaaaagaatccaggtttggagttaagccatttaagcaaaccctttggaattcttcactgttctatttttcttttcccctacagtatactgcaaaaggctctttaaaacaaaattaaatatttacttaaattgcaatctaaagaataaagaattttagggataactgaagtcatttggcaccattaggacctaaaggataaaggtcatttttggatatcaagtttattaatccctcctgctgcctccacaattatttcctctacaaaaatatcaaatcccaaagaaagacattcctacaatttataatttagtttatgaaatgtattaattacatatggattttatcattaatacatcattttgtattccttaatcctttctaaccaattagactatcaagtcctgtggccaggcagtaattacctatatatctttttccttccttagcaccagagtgaatataataaaataaatatgcacttgattctactgaa

SEQ ID NO: 21429 - DNA, 582 bp, Homo sapiens
  misc_feature 1..582: note = ENST00000461628
  source 1..582: mol_type = unassigned DNA
gtacaaggtcacggtggcggaagtgcagcggcggctctcaccacccgagtgtctcaacgcgtcgctgctgggcggagtgctccggagggcgaagtctaaaaatggaggaagatctttaagagaaaaactggacaaaataggattaaatctgcctgcagggagacgtaaagctgccaacgttaccctgctcacatcactagtagagggtgcagagatggcagcggttctgaggcaagagtactgaaatttgctttataatttacttgattatccaagttgtgcatttgaagaaacacatccatgtttccgtagtgcttagtgctatgggtgaaagaaatcttaaagtcaagcagagaagaaaaaaataaaacccacgcatacctcagaaaagcccaattcaactcctaacatcacccaaccaccccatcccagaagaatgaaaccatggagcacaacaggtaatatcagttttcacacctctgcatccccttttaggatgctccgggatatttttccttgtgaatttcagtgaacgattcttttctatattaaacttggtttactacctgagttgcacaggta

SEQ ID NO: 21430 - DNA, 3317 bp, Homo sapiens
  misc_feature 1..3317: note = ENST00000379613
  source 1..3317: mol_type = unassigned DNA
tccgagcgcacacgggagctctttcccttctctcctcctcctcgcccttctcctcgccctcctcctcctcctcgccctcctcttcctcctcctcctccttgccctcctcctctccctcctccttctcctcctccacctcctctccctcctcctcctcctcctgcgctcaccgccggcagccagcactttgcgctcacccagagagtagctccacttgggtgcgagaccgagaggggcatatccgttcacgccgatccatgaaaatgctttggaaattgacggataatatcaagtacgaggactgcgaggaccgtcacgacggcaccagcaacgggacggcacggttgccccagctgggcactgtaggtcaatctccctacacgagcgccccgccgctgtcccacacccccaatgccgacttccagcccccatacttccccccaccctaccagcctatctacccccagtcgcaagatccttactcccacgtcaacgacccctacagcctgaaccccctgcacgcccagccgcagccgcagcacccaggctggcccggccagaggcagagccaggagtctgggctcctgcacacgcaccgggggctgcctcaccagctgtcgggcctggatcctcgcagggactacaggcggcacgaggacctcctgcacggcccacacgcgctcagctcaggactcggagacctctcgatccactccttacctcacgccatcgaggaggtcccgcatgtagaagacccgggtattaacatcccagatcaaactgtaattaagaaaggccccgtgtccctgtccaagtccaacagcaatgccgtctccgccatccctattaacaaggacaacctcttcggcggcgtggtgaaccccaacgaagtcttctgttcagttccgggtcgcctctcgctcctcagctccacctcgaagtacaaggtcacggtggcggaagtgcagcggcggctctcaccacccgagtgtctcaacgcgtcgctgctgggcggagtgctccggagggcgaagtctaaaaatggaggaagatctttaagagaaaaactggacaaaataggattaaatctgcctgcagggagacgtaaagctgccaacgttaccctgctcacatcactagtagagggagaagctgtccacctagccagggactttgggtacgtgtgcgaaaccgaatttcctgccaaagcagtagctgaatttctcaaccgacaacattccgatcccaatgagcaagtgacaagaaaaaacatgctcctggctacaaaacagatatgcaaagagttcaccgacctgctggctcaggaccgatctcccctggggaactcacggcccaaccccatcctggagcccggcatccagagctgcttgacccacttcaacctcatctcccacggcttcggcagccccgcggtgtgtgccgcggtcacggccctgcagaactatctcaccgaggccctcaaggccatggacaaaatgtacctcagcaacaaccccaacagccacacggacaacaacgccaaaagcagtgacaaagaggagaagcacagaaagtgaggctctcctcccgccccgcccctcccacgcctcaccagccccccgcgcgcccaccctccggcgggtgacagctccgggatcagcaacccttcctgctgctgctactgctgctgctgctgccgccgccgccgccgccgctgcccttgggtccccccgagtctccgggactgccctctcgactgtcagtggggcagcctctccgactctgcacccgcctcgacctccccacccgctcccacacccctgtgccctcatgtggagcctaagagaacagaacaggccgtgaagccagcagagaaaagttctgccaagtttgtgaacccttttttttttaaacaaaacaacaaatcaacaacagcaacaacaacaacaaaaattaaaaacttttttctaaaaaaaaagtgaaaataaaaaaaattatatgcgcttcatgggactgagtcaccaccttcccttacatacttcagttcagattgtagccatacttaaaaaaaaaaaaaaagccaaaagatgatgacaacatttttatcagtattgtgaataaacttgaacacaaatacacgaagttccatgtcatgtcttcagttgtagaagtttttcctctttaaggtaaagcgaccaacttgaactttctctggcaacacgattcgcagttatataagggaatcagtgttcacgtctctgtatatatttatttatgtgtaatttaatgggaattgtaaatatggtgagtctgttttaagcctttttttttttatttatctgatcttgtttacctcttgtttagtgggttttgaatcttccctattagttcttcatgtggttcatggtactgatttagaaatccagtgtttgggggatttttttctctgggattcatgaatttagccctgttgtagcatgttaaaggtgacaaacagctggacaaatttttaaaaagtaaaataaaattttatctataattagtattattacatttagcttttcattgaaccgaaagaaaaaaagtgatattggaccctggaaagattttgaaacttgagtggtttgataacccttctatgtattgtagggagaaaaaaaaaagtttattttattccactgtcctcccttaaaagcatcatttgagcaataaatgaatattgtctttaaaccaagggttagggaattttcctctctctctctctctcctctctctttctgttcaaagaacttcaaacatttgggaccacctggtattctgtattttcactggccatattggaagcagttctagttgcattgtattgagttgtgctggcagtagtttccatgcctgtcaatgtatcatagtcctttgttgcccagataaataaatatttgatacgctttatgtcgatttttttttattcagtggctgtctttacccaggcgtatttttgttcttggcagtattttttattcagtatggttacagtaattgagtttaactctcccttggcaattgctccttgcaataagcagctgaacccattgtttccctcaagtataataaaaacttactttcaacttggagttcagagcagggtatcatttagatattccactgtgtctgtattcagacaaatgacacaataaaacccaatgtattcttttggataaaagattgtttgtactgctaaaggaatgacatactgtcttttccttactagaaacattaattttattattaaaaataaagttttattttatttatgttga

SEQ ID NO: 21431 - DNA, 2739 bp, Homo sapiens
  misc_feature 1..2739: note = ENST00000489805
  source 1..2739: mol_type = unassigned DNA
ccccactccgatttgctacactgagactcccgtcaatggactgcattgagagccggctccggcgcgagttgcctctccgcttcacgctcgatttccaggcattcttcccttattaagtattcgtgtaatattaatagtcatgaatatctgctattaggaggctccaggaacgctgcccagcgcggttattagaagctcaagcgaagccgccgctaagaaaagagggggagacacggattaaggaacacgcacgcacccacacactcacacatactttttcctttttccttttttggggtttttcatttttaaagaactttgaatcataaccagtcgcggcaggatagagaccgtgggttcgaccagctgaaggcgccgcgcgaatcggtggttcaagttcggatggatccgagccgggctcccgcgctccggggagcgtcggcgccgtgactggagtcctgggtggcgcggggctctcggcgccttttgtgtggggcgcgctcgggcggcggggcagccgggcgctccaggcttgcttgtttttttccaccctgactcgttaccccagactcttcgcagatgttagttcacagtttttcagccatggaccgtcacgacggcaccagcaacgggacggcacggttgccccagctgggcactcctgaaccccctgcacgcccagccgcagccgcagcacccaggctggcccggccagaggcagagccaggagtctgggctcctgcacacgcaccgggggctgcctcaccagctgtcgggcctggatcctcgcagggactacaggcggcacgaggacctcctgcacggcccacacgcgctcagctcaggactcggagacctctcgatccactccttacctcacgccatcgaggaggtcccgcatgtagaagacccgggtattaacatcccagatcaaactgtaattaagaaaggccccgtgtccctgtccaagtccaacagcaatgccgtctccgccatccctattaacaaggacaacctcttcggcggcgtggtgaaccccaacgaagtcttctgttcagttccgggtcgcctctcgctcctcagctccacctcgaagtacaaggtcacggtggcggaagtgcagcggcggctctcaccacccgagtgtctcaacgcgtcgctgctgggcggagtgctccggagggcgaagtctaaaaatggaggaagatctttaagagaaaaactggacaaaataggattaaatctgcctgcagggagacgtaaagctgccaacgttaccctgctcacatcactagtagagggagaagctgtccacctagccagggactttgggtacgtgtgcgaaaccgaatttcctgccaaagcagtagctgaatttctcaaccgacaacattccgatcccaatgagcaagtgacaagaaaaaacatgctcctggctacaaaacagatatgcaaagagttcaccgacctgctggctcaggaccgatctcccctggggaactcacggcccaaccccatcctggagcccggcatccagagctgcttgacccacttcaacctcatctcccacggcttcggcagccccgcggtgtgtgccgcggtcacggccctgcagaactatctcaccgaggccctcaaggccatggacaaaatgtacctcagcaacaaccccaacagccacacggacaacaacgccaaaagcagtgacaaagaggagaagcacagaaagtgaggctctcctcccgccccgcccctcccacgcctcaccagccccccgcgcgcccaccctccggcgggtgacagctccgggatcagcaacccttcctgctgctgctactgctgctgctgctgccgccgccgccgccgccgctgcccttgggtccccccgagtctccgggactgccctctcgactgtcagtggggcagcctctccgactctgcacccgcctcgacctccccacccgctcccacacccctgtgccctcatgtggagcctaagagaacagaacaggccgtgaagccagcagagaaaagttctgccaagtttgtgaacccttttttttttaaacaaaacaacaaatcaacaacagcaacaacaacaacaaaaattaaaaacttttttctaaaaaaaaagtgaaaataaaaaaaattatatgcgcttcatgggactgagtcaccaccttcccttacatacttcagttcagattgtagccatacttaaaaaaaaaaaaaaagccaaaagatgatgacaacatttttatcagtattgtgaataaacttgaacacaaatacacgaagttccatgtcatgtcttcagttgtagaagtttttcctctttaaggtaaagcgaccaacttgaactttctctggcaacacgattcgcagttatataagggaatcagtgttcacgtctctgtatatatttatttatgtgtaatttaatgggaattgtaaatatggtgagtctgttttaagcctttttttttttatttatctgatcttgtttacctcttgtttagtgggttttgaatcttccctattagttcttcatgtggttcatggtactgatttagaaatccagtgtttgggggatttttttctctgggattcatgaatttagccctgttgtagcatgttaaaggtgacaaacagctggacaaatttttaaaaagtaaaataaaattttatctataattagtattattacatttagcttttcattgaaccgaaagaaaaaaa

SEQ ID NO: 21432 - DNA, 2035 bp, Homo sapiens
  misc_feature 1..2035: note = ENST00000319516
  source 1..2035: mol_type = unassigned DNA
tggcggagtgaattcctgggccagcgcgcatgcgtcggcaggtagcaacccagctctttatgaccaggtgagatgttggtgagcaggtaaaaaaggaggatttgcctaagcgattccagggagctggcccgaccgagccctccagcccatgcccggcggggaccagtcgccaggagcgcagagccgcgatgtccatacttgccaaaatgggggactggcaggaccgtcacgacggcaccagcaacgggacggcacggttgccccagctgggcactgtaggtcaatctccctacacgagcgccccgccgctgtcccacacccccaatgccgacttccagcccccatacttccccccaccctaccagcctatctacccccagtcgcaagatccttactcccacgtcaacgacccctacagcctgaaccccctgcacgcccagccgcagccgcagcacccaggctggcccggccagaggcagagccaggagtctgggctcctgcacacgcaccgggggctgcctcaccagctgtcgggcctggatcctcgcagggactacaggcggcacgaggacctcctgcacggcccacacgcgctcagctcaggactcggagacctctcgatccactccttacctcacgccatcgaggaggtcccgcatgtagaagacccgggtattaacatcccagatcaaactgtaattaagaaaggccccgtgtccctgtccaagtccaacagcaatgccgtctccgccatccctattaacaaggacaacctcttcggcggcgtggtgaaccccaacgaagtcttctgttcagttccgggtcgcctctcgctcctcagctccacctcgaagtacaaggtcacggtggcggaagtgcagcggcggctctcaccacccgagtgtctcaacgcgtcgctgctgggcggagtgctccggagggcgaagtctaaaaatggaggaagatctttaagagaaaaactggacaaaataggattaaatctgcctgcagggagacgtaaagctgccaacgttaccctgctcacatcactagtagagggagaagctgtccacctagccagggactttgggtacgtgtgcgaaaccgaatttcctgccaaagcagtagctgaatttctcaaccgacaacattccgatcccaatgagcaagtgacaagaaaaaacatgctcctggctacaaaacagatatgcaaagagttcaccgacctgctggctcaggaccgatctcccctggggaactcacggcccaaccccatcctggagcccggcatccagagctgcttgacccacttcaacctcatctcccacggcttcggcagccccgcggtgtgtgccgcggtcacggccctgcagaactatctcaccgaggccctcaaggccatggacaaaatgtacctcagcaacaaccccaacagccacacggacaacaacgccaaaagcagtgacaaagaggagaagcacagaaagtgaggctctcctcccgccccgcccctcccacgcctcaccagccccccgcgcgcccaccctccggcgggtgacagctccgggatcagcaacccttcctgctgctgctactgctgctgctgctgccgccgccgccgccgccgctgcccttgggtccccccgagtctccgggactgccctctcgactgtcagtggggcagcctctccgactctgcacccgcctcgacctccccacccgctcccacacccctgtgccctcatgtggagcctaagagaacagaacaggccgtgaagccagcagagaaaagttctgccaagtttgtgaacccttttttttttaaacaaaacaacaaatcaacaacagcaacaacaacaacaaaaattaaaaacttttttctaaaaaaaaagtgaaaataaaaaaaattatatgcgcttcatgggactgagtcaccaccttcccttacatacttcagttcagattgtagccatacttaaaaaaaaaaaaaaagccaaaagatgatgacaacatttttatcagtattgtgaataaa

SEQ ID NO: 21433 - DNA, 2576 bp, Homo sapiens
  misc_feature 1..2576: note = ENST00000379608
  source 1..2576: mol_type = unassigned DNA
cacgcacgcagacacattctccctctctgcgctctctccttcggtctccctctctgcctctttctctttcacttttgcatgccctgcaaccttttaaaatgttgccccttccctgtgattcgccagacgccgcgccgcggccccccgcgcgctcgcccgctccctctctcgctcgctttttgtctctcgcgctccctctccccactccgatttgctacactgagactcccgtcaatggactgcattgagagccggctccggcgcgagttgcctctccgcttcacgctcgatttccaggcattcttcccttattaagtattcgtgtaatattaatagtcatgaatatctgctattaggaggctccaggaacgctgcccagcgcggttattagaagctcaagcgaagccgccgctaagaaaagagggggagacacggattaaggaacacgcacgcacccacacactcacacatactttttcctttttccttttttggggtttttcatttttaaagaactttgaatcataaccagtcgcggcaggatagagaccgtgggttcgaccagctgaaggcgccgcgcgaatcggtggttcaagttcggatggatccgagccgggctcccgcgctccggggagcgtcggcgccgtgactggagtcctgggtggcgcggggctctcggcgccttttgtgtggggcgcgctcgggcggcggggcagccgggcgctccaggcttgcttgtttttttccaccctgactcgttaccccagactcttcgcagatgttagttcacagtttttcagccatggaccgtcacgacggcaccagcaacgggacggcacggttgccccagctgggcactgtaggtcaatctccctacacgagcgccccgccgctgtcccacacccccaatgccgacttccagcccccatacttccccccaccctaccagcctatctacccccagtcgcaagatccttactcccacgtcaacgacccctacagcctgaaccccctgcacgcccagccgcagccgcagcacccaggctggcccggccagaggcagagccaggagtctgggctcctgcacacgcaccgggggctgcctcaccagctgtcgggcctggatcctcgcagggactacaggcggcacgaggacctcctgcacggcccacacgcgctcagctcaggactcggagacctctcgatccactccttacctcacgccatcgaggaggtcccgcatgtagaagacccgggtattaacatcccagatcaaactgtaattaagaaaggccccgtgtccctgtccaagtccaacagcaatgccgtctccgccatccctattaacaaggacaacctcttcggcggcgtggtgaaccccaacgaagtcttctgttcagttccgggtcgcctctcgctcctcagctccacctcgaagtacaaggtcacggtggcggaagtgcagcggcggctctcaccacccgagtgtctcaacgcgtcgctgctgggcggagtgctccggagggcgaagtctaaaaatggaggaagatctttaagagaaaaactggacaaaataggattaaatctgcctgcagggagacgtaaagctgccaacgttaccctgctcacatcactagtagagggagaagctgtccacctagccagggactttgggtacgtgtgcgaaaccgaatttcctgccaaagcagtagctgaatttctcaaccgacaacattccgatcccaatgagcaagtgacaagaaaaaacatgctcctggctacaaaacagatatgcaaagagttcaccgacctgctggctcaggaccgatctcccctggggaactcacggcccaaccccatcctggagcccggcatccagagctgcttgacccacttcaacctcatctcccacggcttcggcagccccgcggtgtgtgccgcggtcacggccctgcagaactatctcaccgaggccctcaaggccatggacaaaatgtacctcagcaacaaccccaacagccacacggacaacaacgccaaaagcagtgacaaagaggagaagcacagaaagtgaggctctcctcccgccccgcccctcccacgcctcaccagccccccgcgcgcccaccctccggcgggtgacagctccgggatcagcaacccttcctgctgctgctactgctgctgctgctgccgccgccgccgccgccgctgcccttgggtccccccgagtctccgggactgccctctcgactgtcagtggggcagcctctccgactctgcacccgcctcgacctccccacccgctcccacacccctgtgccctcatgtggagcctaagagaacagaacaggccgtgaagccagcagagaaaagttctgccaagtttgtgaacccttttttttttaaacaaaacaacaaatcaacaacagcaacaacaacaacaaaaattaaaaacttttttctaaaaaaaaagtgaaaataaaaaaaattatatgcgcttcatgggactgagtcaccaccttcccttacatacttcagttcagattgtagccatacttaaaaaaaaaaaaaaa

SEQ ID NO: 21434 - DNA, 1894 bp, Homo sapiens
  misc_feature 1..1894: note = ENST00000488193
  source 1..1894: mol_type = unassigned DNA
cgcccttctcctcgccctcctcctcctcctcgccctcctcttcctcctcctcctccttgccctcctcctctccctcctccttctcctcctccacctcctctccctcctcctcctcctcctgcgctcaccgccggcagccagcactttgcgctcacccagagagtagctccacttgggtgcgagaccgagaggggcatatccgttcacgccgatccatgaaaatgctttggaaattgacggataatatcaagtacgaggactgcgaggaccgtcacgacggcaccagcaacgggacggcacggttgccccagctgggcactcctgaaccccctgcacgcccagccgcagccgcagcacccaggctggcccggccagaggcagagccaggagtctgggctcctgcacacgcaccgggggctgcctcaccagctgtcgggcctggatcctcgcagggactacaggcggcacgaggacctcctgcacggcccacacgcgctcagctcaggactcggagacctctcgatccactccttacctcacgccatcgaggaggtcccgcatgtagaagacccgggtattaacatcccagatcaaactgtaattaagaaaggccccgtgtccctgtccaagtccaacagcaatgccgtctccgccatccctattaacaaggacaacctcttcggcggcgtggtgaaccccaacgaagtcttctgttcagttccgggtcgcctctcgctcctcagctccacctcgaagtacaaggtcacggtggcggaagtgcagcggcggctctcaccacccgagtgtctcaacgcgtcgctgctgggcggagtgctccggagggcgaagtctaaaaatggaggaagatctttaagagaaaaactggacaaaataggattaaatctgcctgcagggagacgtaaagctgccaacgttaccctgctcacatcactagtagagggagaagctgtccacctagccagggactttgggtacgtgtgcgaaaccgaatttcctgccaaagcagtagctgaatttctcaaccgacaacattccgatcccaatgagcaagtgacaagaaaaaacatgctcctggctacaaaacagatatgcaaagagttcaccgacctgctggctcaggaccgatctcccctggggaactcacggcccaaccccatcctggagcccggcatccagagctgcttgacccacttcaacctcatctcccacggcttcggcagccccgcggtgtgtgccgcggtcacggccctgcagaactatctcaccgaggccctcaaggccatggacaaaatgtacctcagcaacaaccccaacagccacacggacaacaacgccaaaagcagtgacaaagaggagaagcacagaaagtgaggctctcctcccgccccgcccctcccacgcctcaccagccccccgcgcgcccaccctccggcgggtgacagctccgggatcagcaacccttcctgctgctgctactgctgctgctgctgccgccgccgccgccgccgctgcccttgggtccccccgagtctccgggactgccctctcgactgtcagtggggcagcctctccgactctgcacccgcctcgacctccccacccgctcccacacccctgtgccctcatgtggagcctaagagaacagaacaggccgtgaagccagcagagaaaagttctgccaagtttgtgaacccttttttttttaaacaaaacaacaaatcaacaacagcaacaacaacaacaaaaattaaaaacttttttctaaaaaaaaagtgaaaataaaaaaaattatatgcgcttcatgggactgagtcaccaccttcccttacatacttcagttcagattgtagccatacttaaaaaaaaaaaaaaa

SEQ ID NO: 21435 - DNA, 2071 bp, Homo sapiens
  misc_feature 1..2071: note = ENST00000482890
  source 1..2071: mol_type = unassigned DNA
gcagattaacacagctaaaagtcggttcccggtgatttattttgatgcacgcacgagacggtatctagacttgcaggcacacacacgtctgtttttaggctcaacttcagaagcgggtgtgcagttccataggagttctgtattcgtgtccacgttgcacccaggaaaccttagcctgaacaccaatttgaactgtcagttggccctagcttcacacaaacaggagaaaaattgtttaacccctggagctgtcaagtaacctcttcaggccagcactttgcgctcacccagagagtagctccacttgggtgcgagaccgagaggggcatatccgttcacgccgatccatgaaaatgctttggaaattgacggataatatcaagtacgaggactgcgaggaccgtcacgacggcaccagcaacgggacggcacggttgccccagctgggcactgtaggtcaatctccctacacgagcgccccgccgctgtcccacacccccaatgccgacttccagcccccatacttccccccaccctaccagcctatctacccccagtcgcaagatccttactcccacgtcaacgacccctacagcctgaaccccctgcacgcccagccgcagccgcagcacccaggctggcccggccagaggcagagccaggagtctgggctcctgcacacgcaccgggggctgcctcaccagctgtcgggcctggatcctcgcagggactacaggcggcacgaggacctcctgcacggcccacacgcgctcagctcaggactcggagacctctcgatccactccttacctcacgccatcgaggaggtcccgcatgtagaagacccgggtattaacatcccagatcaaactgtaattaagaaaggccccgtgtccctgtccaagtccaacagcaatgccgtctccgccatccctattaacaaggacaacctcttcggcggcgtggtgaaccccaacgaagtcttctgttcagttccgggtcgcctctcgctcctcagctccacctcgaagtacaaggtcacggtggcggaagtgcagcggcggctctcaccacccgagtgtctcaacgcgtcgctgctgggcggagtgctccggagggcgaagtctaaaaatggaggaagatctttaagagaaaaactggacaaaataggattaaatctgcctgcagggagacgtaaagctgccaacgttaccctgctcacatcactagtagagggagaagctgtccacctagccagggactttgggtacgtgtgcgaaaccgaatttcctgccaaagcagtagctgaatttctcaaccgacaacattccgatcccaatgagcaagtgacaagaaaaaacatgctcctggctacaaaacagatatgcaaagagttcaccgacctgctggctcaggaccgatctcccctggggaactcacggcccaaccccatcctggagcccggcatccagagctgcttgacccacttcaacctcatctcccacggcttcggcagccccgcggtgtgtgccgcggtcacggccctgcagaactatctcaccgaggccctcaaggccatggacaaaatgtacctcagcaacaaccccaacagccacacggacaacaacgccaaaagcagtgacaaagaggagaagcacagaaagtgaggctctcctcccgccccgcccctcccacgcctcaccagccccccgcgcgcccaccctccggcgggtgacagctccgggatcagcaacccttcctgctgctgctactgctgctgctgctgccgccgccgccgccgccgctgcccttgggtccccccgagtctccgggactgccctctcgactgtcagtggggcagcctctccgactctgcacccgcctcgacctccccacccgctcccacacccctgtgccctcatgtggagcctaagagaacagaacaggccgtgaagccagcagagaaaagttctgccaagtttgtgaacccttttttttttaaacaaaacaacaaatcaacaacagcaacaacaacaacaaaaattaaaaacttttttctaaaaaaaaagtg

SEQ ID NO: 21436 - DNA, 987 bp, Homo sapiens
  misc_feature 1..987: note = ENST00000466073
  source 1..987: mol_type = unassigned DNA
atgctttggaaattgacggataatatcaagtacgaggactgcgaggaccgtcacgacggcaccagcaacgggacggcacggttgccccagctgggcactgtaggtcaatctccctacacgagcgccccgccgctgtcccacacccccaatgccgacttccagcccccatacttccccccaccctaccagcctatctacccccagtcgcaagatccttactcccacgtcaacgacccctacagcctgaaccccctgcacgcccagccgcagccgcagcacccaggctggcccggccagaggcagagccaggagtctgggctcctgcacacgcaccgggggctgcctcaccagctgtcgggcctggatcctcgcagggactacaggcggcacgaggacctcctgcacggcccacacgcgctcagctcaggactcggagacctctcgatccactccttacctcacgccatcgaggaggtcccgcatgtagaagacccgggtattaacatcccagatcaaactgtaattaagaaaggccccgtgtccctgtccaagtccaacagcaatgccgtctccgccatccctattaacaaggacaacctcttcggcggcgtggtgaaccccaacgaagtcttctgttcagttccgggtcgcctctcgctcctcagctccacctcgaagtacaaggtcacggtggcggaagtgcagcggcggctctcaccacccgagtgtctcaacgcgtcgctgctgggcggagtgctccggagggcgaagtctaaaaatggaggaagatctttaagagaaaaactggacaaaataggattaaatctgcctgcagggagacgtaaagctgccaacgttaccctgctcacatcactagtagaggacagatatgcaaagagttcaccgacctgctggctcaggaccgatctcccctggggaactcacggcccaaccccatcctggagcccggcatccagagctgcttga

SEQ ID NO: 21437 - DNA, 1014 bp, Homo sapiens
  misc_feature 1..1014: note = ENST00000497266
  source 1..1014: mol_type = unassigned DNA
ttaaacccaataaggctgaatctttctattttaaaccttgacttgacgtccccctttccctatccaaaccataaatcgactctgtcgagaaaaaggctcctaacagaggaagcgaaaaagacagaccccgatcctgcagttaaaaccttctttaagctggaccgtcacgacggcaccagcaacgggacggcacggttgccccagctgggcactcctgaaccccctgcacgcccagccgcagccgcagcacccaggctggcccggccagaggcagagccaggagtctgggctcctgcacacgcaccgggggctgcctcaccagctgtcgggcctggatcctcgcagggactacaggcggcacgaggacctcctgcacggcccacacgcgctcagctcaggactcggagacctctcgatccactccttacctcacgccatcgaggaggtcccgcatgtagaagacccgggtattaacatcccagatcaaactgtaattaagaaaggccccgtgtccctgtccaagtccaacagcaatgccgtctccgccatccctattaacaaggacaacctcttcggcggcgtggtgaaccccaacgaagtcttctgttcagttccgggtcgcctctcgctcctcagctccacctcgaagtacaaggtcacggtggcggaagtgcagcggcggctctcaccacccgagtgtctcaacgcgtcgctgctgggcggagtgctccggagggcgaagtctaaaaatggaggaagatctttaagagaaaaactggacaaaataggattaaatctgcctgcagggagacgtaaagctgccaacgttaccctgctcacatcactagtagagggagaagctgtccacctagccagggactttgggtacgtgtgcgaaaccgaatttcctgccaaagcagtagctgaatttctcaaccgacaacattccgatcccaatgagcaagtgacaagaaaaaacatgctcctggctacaaaacagatatgcaaagagtt

SEQ ID NO: 21438 - DNA, 675 bp, Homo sapiens
  misc_feature 1..675: note = ENST00000475264
  source 1..675: mol_type = unassigned DNA
ggcccggccagaggcagagccaggagtctgggctcctgcacacgcaccgggggctgcctcaccagctgtcgggcctggatcctcgcagggactacaggcggcacgaggacctcctgcacggcccacacgcgctcagctcaggactcggagacctctcgatccactccttacctcacgccatcgaggaggtcccgcatgtagaagacccgggtattaacatcccagatcaaactgtaattaagaaaggccccgtgtccctgtccaagtccaacagcaatgccgtctccgccatccctattaacaaggacaacctcttcggcggcgtggtgaaccccaacgaagtcttctgttcagttccgggtcgcctctcgctcctcagctccacctcgaagtacaaggtcacggtggcggaagtgcagcggcggctctcaccacccgagtgtctcaacgcgtcgctgctgggcggagtgctccggagggcgaagtctaaaaatggaggaagatctttaagagaaaaactggacaaaataggattaaatctgcctgcagggagacgtaaagctgccaacgttaccctgctcacatcactagtagagggagaagtggtcatttttcctgataaatgcatccaccagatcctacagagaaggaaataaaatgcctgaaatgagaaaa

SEQ ID NO: 21439 - DNA, 1349 bp, Homo sapiens
  misc_feature 1..1349: note = ENST00000478375
  source 1..1349: mol_type = unassigned DNA
atgctttggaaattgacggataatatcaagtacgaggactgcgaggaccgtcacgacggcaccagcaacgggacggcacggttgccccagctgggcactgtaggtcaatctccctacacgagcgccccgccgctgtcccacacccccaatgccgacttccagcccccatacttccccccaccctaccagcctatctacccccagtcgcaagatccttactcccacgtcaacgacccctacagcctgaaccccctgcacgcccagccgcagccgcagcacccaggctggcccggccagaggcagagccaggagtctgggctcctgcacacgcaccgggggctgcctcaccagctgtcgggcctggatcctcgcagggactacaggcggcacgaggacctcctgcacggcccacacgcgctcagctcaggactcggagacctctcgatccactccttacctcacgccatcgaggaggtcccgcatgtagaagacccgggtattaacatcccagatcaaactgtaattaagaaaggccccgtgtccctgtccaagtccaacagcaatgccgtctccgccatccctattaacaaggacaacctcttcggcggcgtggtgaaccccaacgaagtcttctgttcagttccgggtcgcctctcgctcctcagctccacctcgaagtacaaggtcacggtggcggaagtgcagcggcggctctcaccacccgagtgtctcaacgcgtcgctgctgggcggagtgctccggagggcgaagtctaaaaatggaggaagatctttaagagaaaaactggacaaaataggattaaatctgcctgcagggagacgtaaagctgccaacgttaccctgctcacatcactagtagagggtaagcgaatccacttgctaactagaaggaacttccttcttggaaaatggataatatttagtggccagatgtttggtcgtattttatgtcagttgggcagtttcatctttgcagagaatatagccagatgtgaatggaattatttcatggcaaaaagaaacatttgcatgtactcctatacctccatccttcttccttcttttcctctaccataaagttacacctccccagcctaattctgagctaaacaacgcacaagtttaagaactgcacattctccaagtttgtctcctttaaagggctcagcagtaaataacttaagttattctgacatctgcgtttgagaaatgcgtgaccattacttcctgaattaatttgggaatctttgacctgcgtcctgatttaagaccatcctgaaagctcagggttatgtgccctttcaggtctttgttttccaaacatatgc

SEQ ID NO: 21440 - DNA, 417 bp, Homo sapiens
  misc_feature 1..417: note = ENST00000498450
  source 1..417: mol_type = unassigned DNA
cgccgatccatgaaaatgctttggaaattgacggataatatcaagtacgaggactgcgagcatgtagaagacccgggtattaacatcccagatcaaactgtaattaagaaaggccccgtgtccctgtccaagtccaacagcaatgccgtctccgccatccctattaacaaggacaacctcttcggcggcgtggtgaaccccaacgaagtcttctgttcagttccgggtcgcctctcgctcctcagctccacctcgaagtacaaggtcacggtggcggaagtgcagcggcggctctcaccacccgagtgtctcaacgcgtcgctgctgggcggagtgctccggagggcgaagtctaaaaatggaggaagatctttaagagaaaaactggacaaaataggattaaatctgcctgcaggg

SEQ ID NO: 21441 - DNA, 893 bp, Homo sapiens
  misc_feature 1..893: note = ENST00000490875
  source 1..893: mol_type = unassigned DNA
gagggcaagaaagcgaaacttggagttcccttaagcacaccgcggcgacgtctacggagtgtaaaaacccatgctctcaggcctagggtttggcctgctcaggctatggccgctgctgggagggtgtcggtgctcctggcagcccagatcctgacttcaaaccactgcactggcgacaggctgggacagccctgcagggtctagccctggaaagtcgaccattttctggacggagggcggcgccaagcctccagcccggttcagccgaggaattgtgctcagttcaggaccgtcacgacggcaccagcaacgggacggcacggttgccccagctgggcactgtaggtcaatctccctacacgagcgccccgccgctgtcccacacccccaatgccgacttccagcccccatacttccccccaccctaccagcctatctacccccagtcgcaagatccttactcccacgtcaacgacccctacagcctgaaccccctgcacgcccagccgcagccgcagcacccaggctggcccggccagaggcagagccaggagtctgggctcctgcacacgcaccgggggctgcctcaccagctgtcgggcctggatcctcgcagggactacaggcggcacgaggacctcctgcacggcccacacgcgctcagctcaggactcggagacctctcgatccactccttacctcacgccatcgaggaggtcccgcatgtagaagacccgggtattaacatcccagatcaaactgtaattaagaaaggccccgtgtccctgtccaagtccaacagcaatgccgtctccgccatccctattaacaaggacaacctcttcggcggcgtggtgaaccccaacgaagtcttctgttcagttccgggtcgc

SEQ ID NO: 21442 - DNA, 658 bp, Homo sapiens
  misc_feature 1..658: note = ENST00000473652
  source 1..658: mol_type = unassigned DNA
gtgcggcgctgggactgcagctggcggagtgaattcctgggccagcgcgcatgcgtcggcaggtagcaacccagctctttatgaccaggtgagatgttggtgagcaggtaaaaaaggaggatttgcctaagcgattccagggagctggcccgaccgagccctccagcccatgcccggcggggaccagtcgccaggagcgcagagccgcgatgtccatacttgccaaaatgggggactggcaggaccgtcacgacggcaccagcaacgggacggcacggttgccccagctgggcactcctgaaccccctgcacgcccagccgcagccgcagcacccaggctggcccggccagaggcagagccaggagtctgggctcctgcacacgcaccgggggctgcctcaccagctgtcgggcctggatcctcgcagggactacaggcggcacgaggacctcctgcacggcccacacgcgctcagctcaggactcggagacctctcgatccactccttacctcacgccatcgaggaggtcccgcatgtagaagacccgggtattaacatcccagatcaaactgtaattaagaaaggccccgtgtccctgtccaagtccaacagcaatgccgtctccgccatccctattaacaaggacaacctcttcg

SEQ ID NO: 21443 - DNA, 1621 bp, Homo sapiens
  misc_feature 1..1621: note = ENST00000474952
  source 1..1621: mol_type = unassigned DNA
attaatagtcatgaatatctgctattaggaggctccaggaacgctgcccagcgcggttattagaagctcaagcgaagccgccgctaagaaaagagggggagacacggattaaggaacacgcacgcacccacacactcacacatactttttcctttttccttttttggggtttttcatttttaaagaactttgaatcataaccagtcgcggcaggatagagaccgtgggttcgaccagctgaaggcgccgcgcgaatcggtggttcaagttcggatggatccgagccgggctcccgcgctccggggagcgtcggcgccgtgactggagtcctgggtggcgcggggctctcggcgccttttgtgtggggcgcgctcgggcggcggggcagccgggcgctccaggcttgcttgtttttttccaccctgactcgttaccccagactcttcgcagatgttagttcacagtttttcagccatggaccgtcacgacggcaccagcaacgggacggcacggttgccccagctgggcactgtaggtcaatctccctacacgagcgccccgccgctgtcccacacccccaatgccgacttccagcccccatacttccccccaccctaccagcctatctacccccagtcgcaagatccttactcccacgtcaacgacccctacagcctgaaccccctgcacgcccagccgcagccgcagcacccaggctggcccggccagaggcagagccaggagtctgggctcctgcacacgcaccgggggctgcctcaccagctgtcgggcctggatcctcgcagggactacaggcggcacgaggacctcctgcacggcccacacgcgctcagctcaggactcggagacctctcgatccactccttacctcacgccatcgaggaggtcccgcatgtagaagacccgggtattaacatcccagatcaaactgtaattaagaaaggtaagccatttccttctgcattccaagcatgtccttacaggcagagtgctatttaaaagaacttgcagagatgtgtttattttttccaaataggatttcctaaaggctcagaattagcaaatagataggcacagaacagcaatgcttaaataatcagccttcagtatgttggtaatgccaacaggctagctttgttctgactcatgatttgaccatttaatttagtttaatgatatttggacaaacacacaaaatgtacagtagttgaactgatttggaagtggcatttcaattttgaaacagtttgatagtttaatccattgcctggatgaaggttaagaagtgtataatgctaaaatagtacaaataatttaacattaatgtaagaacagatgataagaagcactctttagtagaggaaaaaaacattcatgttcttcaatttagtttcttgttagctgtttaagggtcttagaactttgtgaattaggttaacaaaattttagcttttggttaaaattagtatcttgaagatgggaggaatattagcatacttgttcagaggagaaattgttagaaaagtgtcaagtgatttgcatggatttgtaatctgtattgtgtttagtgagtagaaataaagtttactgaattaaatgc

SEQ ID NO: 21444 - DNA, 569 bp, Homo sapiens
  misc_feature 1..569: note = ENST00000462727
  source 1..569: mol_type = unassigned DNA
cgactctgtcgagaaaaaggctcctaacagaggaagcgaaaaagacagaccccgatcctgcagttaaaaccttctttaagctggaccgtcacgacggcaccagcaacgggacggcacggttgccccagctgggcactgtaggtcaatctccctacacgagcgccccgccgctgtcccacacccccaatgccgacttccagcccccatacttccccccaccctaccagcctatctacccccagtcgcaagatccttactcccacgtcaacgacccctacagcctgaaccccctgcacgcccagccgcagccgcagcacccaggctggcccggccagaggcagagccaggagtctgggctcctgcacacgcaccgggggctgcctcaccagctgtcgggcctggatcctcgcagggactacaggcggcacgaggacctcctgcacggcccacacgcgctcagctcaggactcggagacctctcgatccactccttacctcacgccatcgaggaggtcccgcatgtagaagacccgggtattaacatcccagatcaaactgtaattaagaaa

SEQ ID NO: 21445 - DNA, 1387 bp, Homo sapiens
  misc_feature 1..1387: note = ENST00000464323
  source 1..1387: mol_type = unassigned DNA
aggtaaaaaaggaggatttgcctaagcgattccagggagctggcccgaccgagccctccagcccatgcccggcggggaccagtcgccaggagcgcagagccgcgatgtccatacttgccaaaatgggggactggcaggaccgtcacgacggcaccagcaacgggacggcacggttgccccagctgggcactgtaggtcaatctccctacacgagcgccccgccgctgtcccacacccccaatgccgacttccagcccccatacttccccccaccctaccagcctatctacccccagtcgcaagatccttactcccacgtcaacgacccctacagcctgaaccccctgcacgcccagccgcagccgcagcacccaggctggcccggccagaggcagagccaggagtctgggctcctgcacacgcaccgggggctgcctcaccagctgtcgggcctggatcctcgcagggactacaggcggcacgaggacctcctgcacggcccacacgcgctcagctcaggactcggagacctctcgatccactccttacctcacgccatcgaggaggtcccggtaagaggccgcgcaaccagcgcgggagggaacacagccccctacttacctaccccagaaaggatacctggaacatacagtcggtgggcccgggttctccctagtatttccttataaaaacattttattcggaggcggagagtgagggacgttttgaggaaccacacaaagtagttgcgagttctaccccagaacaatggtttctggagctccctcaaacaatgcctgcattaccatttccaccaacacagataaatcagacgaatgtcaccattaacaatatcttcctctcgacgacagtaaactgtctcaattgctaaaagatctacttccatcgctgagtctggcgtggagatttctccctgtcctgggaatgatgttaaatgcaaccaaaagagctcattaaatgtcctcaaaatgtaaaaggaagtgtaaaagacacactaagatcattttaaccggattttataagcacaagtgaaacctaaaagttatgtgtacaccctatcctgattaaagaaaaactaagtagcaaatccaagcagagggacattaaaatgcagccttcttcttactaggggtgctaagtggtgacctcataaatcattagctaggttcccaacgcctatcagaacctgctacactccatattaaattaaatgtttcgagactattgggtaatacattatttgagttctaatttagttatcaataaatgcagtttaaaatgatttctaaataagcatggcattagcacatttactatttacaatgcaaaccaggctattgataatttgaaaatactttctggaatt

SEQ ID NO: 21446 - DNA, 617 bp, Homo sapiens
  misc_feature 1..617: note = ENST00000465858
  source 1..617: mol_type = unassigned DNA
ggggagcgcacggtgcccctgtccgaggaaagctcaagaggaggccgaggagaggaccagtgcagcgagcgggccggtcccgggcagggcgccgggtcatggaggagccgcgcagcagcgggcagccgagtcccgagtcccagactcggctgcgaagcggcggagcccgcggccagacagggccgggaagcgcctgccgcgccgagagccccacgagcgcccggacgcggtcccaagcagctcctacccgctacgcacgacccccgctgcatcccgaggaccgtcacgacggcaccagcaacgggacggcacggttgccccagctgggcactgtaggtcaatctccctacacgagcgccccgccgctgtcccacacccccaatgccgacttccagcccccatacttccccccaccctaccagcctatctacccccagtcgcaagatccttactcccacgtcaacgacccctacagcctgaaccccctgcacgcccagccgcagccgcagcacccaggctggcccggccagaggcagagccaggagtctgggctcctgcacacgcaccgggggctgcctcaccagctgtcgggcctggatcctcgcagggactacagg

SEQ ID NO: 21447 - DNA, 702 bp, Homo sapiens
  misc_feature 1..702: note = ENST00000486038
  source 1..702: mol_type = unassigned DNA
ctgggccagcgcgcatgcgtcggcaggtagcaacccagctctttatgaccaggtgagatgttggtgagcaggtaaaaaaggaggatttgcctaagcgattccagggagctggcccgaccgagccctccagcccatgcccggcggggaccagtcgccaggagcgcagagccgcgatgtccatacttgccaaaatgggggactggcaggccgcggacaccacaaggcatccaaggcttggctcctgtccttcctgagccccggattccgaccctggccaaggaagcatttgtccagctctctccttccaacttccagacactttcccttcgggaaacagagcggctctggccaggatggtggcggtaaaaggctctgcctgtcgccgatttcatcatcagaaccgcgaggccctgttttcgccccaaccaagaggcctggtgagggtgagattctgtgtgcccaaaagcccaggggacaattcgaatctaatgccctgaacttccccccaaaaatctgaggccttgctactcctggtcgagttctttctcttgtttcagatttaggccattaaaagtaaagttctgagaagtgcagtcttcactaagctacctggagttggagaaagaaaggccttttgcgttctgtacttttttcccttggatttattacttttatcaagagtgagctcttttatattcttct

SEQ ID NO: 21448 - DNA, 797 bp, Homo sapiens
  misc_feature 1..797: note = ENST00000344788
  source 1..797: mol_type = unassigned DNA
tttttctctttgctgaggcttacttgtccagcctattgtttgagacaacagatataagttgcgatgggagaggagcgtcggatttggtgtgtatcccccatttccaattatagatggatcattacagacagcggagtcctgagaagccagacatctgctcctcacatgaatgcactcacctcctagagaccaggctgccatcatgctctggaagcttgtggagaatgtcaagtacgaagatatctatgagatgttagtccacacctattcatccatggaccggcacgatggtgtcccgagccacagctcgcggctctcccagctgggctcggtgtcccaaggaccctactcgagcgccccgccgctgtcccacaccccgtcgtcggacttccagccgccctacttcccacccccctaccagccgctcccctaccaccagagccaggacccctactcccacgtcaacgacccctactccctgaacccactgcaccagccccagcaacatccctgggggcaacggcagcggcaagaagtgggttcggaagccggctctctcctgccccagcctcgggccgccttgccccagctctcgggccttgacccccggagggactaccactcggtccgccggccggacgtgctgctgcattcggcgcaccacggcctggacgcgggcatgggtgacagcctctcgctgcacggcctcggccatcccggaatggaagacgtccagtcagttgaagatgccaataacagcggcatgaatctattggaccagtctgtcattaaaaaag

SEQ ID NO: 21449 - DNA, 5773 bp, Homo sapiens
  misc_feature 1..5773: note = ENST00000393655
  source 1..5773: mol_type = unassigned DNA
tttttctctttgctgaggcttacttgtccagcctattgtttgagacaacagatataagttgcgatgggagaggagcgtcggatttggtgtgtatcccccatttccaattatagatggatcattacagacagcggagtcctgagaagccagacatctgctcctcacatgaatgcactcacctcctagagaccaggctgccatcatgctctggaagcttgtggagaatgtcaagtacgaagatatctatgaggaccggcacgatggtgtcccgagccacagctcgcggctctcccagctgggctcggtgtcccaaggaccctactcgagcgccccgccgctgtcccacaccccgtcgtcggacttccagccgccctacttcccacccccctaccagccgctcccctaccaccagagccaggacccctactcccacgtcaacgacccctactccctgaacccactgcaccagccccagcaacatccctgggggcaacggcagcggcaagaagtgggttcggaagccggctctctcctgccccagcctcgggccgccttgccccagctctcgggccttgacccccggagggactaccactcggtccgccggccggacgtgctgctgcattcggcgcaccacggcctggacgcgggcatgggtgacagcctctcgctgcacggcctcggccatcccggaatggaagacgtccagtcagttgaagatgccaataacagcggcatgaatctattggaccagtctgtcattaaaaaagttccagttcctcccaaatcggtgacttctctaatgatgaataaagacggcttcctgggaggcatgtctgtcaacaccggcgaggtgttttgctccgtcccaggccgtttgtctctgctcagttcaacttcgaagtacaaagtaactgtgggagaagttcagagacggctgtcgccccctgaatgcctcaatgcatctctcctcggcggagtcctcagaagagccaaatcgaaaaatggggggagatctttgcgagaaaggctagaaaaaatcggtttgaatttacccgcgggcaggcgcaaagcagcaaatgtcacgttactcacctccctggtggaaggagaagctgttcacttagctagggattttgggtacatttgcgaaacggagtttcccgccaaagccgtctctgagtatttgaaccggcagcacacagacccgagtgacctgcactcccgaaagaatatgctgttggccaccaagcaactttgtaaagaatttacggatctactggcgcaggaccggacaccgatagggaacagccgacccagccccatcctggagccggggatccagagctgcctcacgcacttcagcctcatcacgcacggcttcggcgccccggccatttgcgccgcgctcacggccctgcagaactatctcaccgaggcgctcaaaggcatggacaagatgttcttgaacaacaccaccactaacaggcacacgtctggggaaggcccaggtagtaaaactggcgacaaggaggagaaacacaggaaatgaaaaatttttaaaaaaagaaggaaaaatgttttaaatacaaaaggaaaaacagacaaaaatttaattttagctttaaaatattggattggctttggaagaattatattaggtagaatacacatacaatcaaaattttaaaaaaaaaagctaaataacttaaaaaaaaactgaggcgtacaacggagcaacaatatcggttctcagtgtctatttcaagatacatttggagacaaccgtccggattttccacttcggttctttcgagtttagtaatactgataataaaagaaaaccatgatttccccttccctttggaaaataaacataagactaaacatgagaaaaacgctaacttattggaagaaaatcggagaaacgttggtgtcaatgctttgagagctggttgactgagacgcacgaactttttaattttaaatatatttttaggaaactctcgcagtccccgccctccatctcacctcacccgtctcccaaccacccttttccatgttaccctcccttcctcacattgttacgggaatcttctgggatgaaaatgagtgtggttggcccttttgcgttgtttcagtcctctcggtacctccccgcccagccctgcgatcttaactcaccgggcccggctccccggccgcttgcataattagggagggcgagggcggggcgggaggcctgtggagaccaggcggaggctgcaatttttggtgccggccggcagagcaggttctggcggctgaggaaaatccggaccaataagttgattcaaacatcatcagttcctttcagaaatgttactagctcccagccttgccagcatctgcatagagagaatctcacatttattatatttgtgtcatctactaattttatgaactatagtaaaaaaaaaaaaacacacacacacacaatatgaatacgttgattagtatgtaattccttcggaggggtatgtaccatttcattctcttctgttttccaaagctttgcccgcatggtttatgagcttcttcaaagaggacttgggcttcctacacaatctataaggtacagagaaaaaaaaatccgatccctttttaatcaaagcctgtgtgtcagaattctgcaggtgcacttctttaaagaagctcaaagggaataatttagaaagtggccaatatgatggaagcagctttgaatctacatgctaacattcctcaacactccaattccggtggaggtggcaggggagggggtctgcaaaatgaattttaagggaaaagagtaaggattcttagagccctatattctaatagtattgccctgcatttaaaattgatttgatttccctgggttctttggtgattgctgtttaagcaaggaaagaagcagctttacgagtggacgtggggaggagggcggcacaagcacccacatttctgtaacaattgctttcttacaagatgctttatgaatgaggcatttttccctcccagacgtgcacttgttttggcatataatggcaaaataatgcaaagtgaagggagatgtatttcagctttgatttttaccgtctggatacatcgggactattcccagtggataaagtttcatgcatttaatatttctcacttctggcagcccagctcctttcttgggctccatcttagcattatcatgaaataagatctggaatccattgtctgcacctccgcaaaagcagtgagaaattatcccgggataagggtgaatgagagaggtctctaaatatagtgttgatacactcacctatttaacaaagtagacgagatctttgcaataccccttaaagataacgacatagatgttgttctgcaggatttatagttaggacccactcaattctccaggactcccggttttgcccccctcccgctttgccttggtgggggtggggattgggggagtggggattgcgttggggttttaggaatctgctgagagctttgcccatttttattaaaagaggaaagggaagttaggaagctcgtctcaggtcaccaaaagggcccaagcaactgttagggccacactgcagcccatctccaacccctagcttcgtttagcacttctgatcttcatggcccagccctagaactgttgagaggaatgcaatggccaagagctagacgttacggagagtgtagtcactctcttttcccagctcagaggcctgcgccttcgtccgagagctcggccgatcgcattagatgtgttctgattgcacaaggccaggagagaccacactgaaaacgatcgtctcctttccttgcagggcaacgcgccccacgcgtgtgacgtgcgagagacgcgatggacgcgccttgctcttactgtgcaggtcctgagagcgtgtgggccacaggcgcccagtcgtgttgaggacatagaatcagccgctggaggggctgccgactgcgcgggcccttcccgctctcggtctcaccctaagggctaaggcgaccgagaaagccccattctccagtaggtaatggggcggcgcccggtgggctgcaggtggggagggctcccagcgccgccagcggccacccggggcgccggctcctggagggagagtggcctagaaatatccaaggaatccgaagcttcccctcctccacctctgccagtacggaaacaccccaccgtcacaatcctaaagcggggagatgggatgggaattgtcttacttggcaaggcagggtaccttcattgccagacgccctcatttgtgtgttcctccttgctccagcgagatagaaccttttgcgcccccaaccccgtttcgtggagtgagcccactaccccttctccctccctcacttctcctttcatgtaggacccccgcccccttgctttccttagccaggcccgctacatttatctgataattgagttattaaaagatttggtttccttgggcctataaatcaataaacagtaggattaacgcaatagtttgccttttaagtcaagggagacgtttaaggcaagcccctttgagctttgttttcaaaccaaacaggtgagttgcagctctccccccggcccctgcactcttcagacatttggtccctgcccactcctaaacgctcagtcccaaaacaaaatagcgaaagacaggaggagtcaggatgtggcagtgctgccttcacactttccacttcgcaagttcttttaaaggttccaaagatctccagaccattctctgccaaaccctgccgcctcctgcacgtattgcaggtctctggggagcaagaaatgtcctgtttgggtgaggattccgtcacctaaaaagatctttaacttctcccccaaagtgggaaggtaactttctcccccttttccccaccaccttcactcctacacccccaattaccttgcattttctttccttccttctggcctccacacccatagctttcctccatccccacttaaagaaccgaagaggcttttaaagacctggctgctttgttttccttggccaaggaagccactttctctcaagcaattatttcatatcctacgaaaactttggtcgaatggaaaactcgaaacctcgagcttatctacacactgttcctctgctacaatgctttcctagttaagagtgtttatagagaatttgtcatcacatctgatatcctgtacttgtaatacattatgtggaaaggaaataaccttaaaccgtctgatgttgcctcaagagcccaaacggcgtttccccacctttgacgatgtatgtgaaattactggcttaaaaaaaaaagtatcaatttttttttaacggaatgaacactatccttctttaaatgccaaaatcgactccacctttgagttggtctctaattctctaacattgtttttgccacacaatcaagaaatatcaatctattgactcttcacgagaagagctctggagggtattcatgttaagtttgtatatatttatttatgcttaatttaatgggaatgtgtaaatatggcgagcaagtagtttgggattatttatctgtgaatctatacctctgtgaatgggtggttaaaaaacctcttgaccctagatagaatcctatctgaatttttctgttctttataaacaagctgttatggtaatgggtagaaattggtttattgtccagtgttaatctgatttacataaataaaaagattgttgtgttttca

SEQ ID NO: 21450 - DNA, 835 bp, Homo sapiens
  misc_feature 1..835: note = ENST00000489228
  source 1..835: mol_type = unassigned DNA
aattattatgaggcggtgtaggcaagcggagggaggaaggggcggccgagcagtctgagcccagcttcgggtgaaagaggactgcatctggagccccgaagaacggcagaagaaaagaggccaaaaagacagcaaagagacagatgaatagttctgtctgtgtgtgacaggcatcgccaatcttgttggggtggggggcgggtgtaattttttttttttttttttgatggcttgtcctggaaacacatcaagctcagctcctgtgtccagctcgcttctctgctggactccttgattttttttttaatcattgtttgattttgagcagtaaccaggcttttttttccagatgttagtccacacctattcatccatggaccggcacgatggtgtcccgagccacagctcgcggctctcccagctgggctcggtgtcccaaggaccctactcgagcgccccgccgctgtcccacaccccgtcgtcggacttccagccgccctacttcccacccccctaccagccgctcccctaccaccagagccaggacccctactcccacgtcaacgacccctactccctgaacccactgcaccagccccagcaacatccctgggggcaacggcagcggcaagaagtgggttcggaagccggctctctcctgccccagcctcgggccgccttgccccagctctcgggccttgacccccggagggactaccactcggtccgccggccggacgtgctgctgcattcggcgcaccacggcctggacgcgggcatgggtgacagcctctcgctgcacggcctcggccatcccggaatggaagacgtccag

SEQ ID NO: 21451 - DNA, 354 bp, Homo sapiens
  misc_feature 1..354: note = ENST00000426789
  source 1..354: mol_type = unassigned DNA
gcagctgcagaggtcgctggtcagttcgtgattaaactaacccatgatgttgaattgaacctggactatgagaggtacaacagccaactgctttcatttgtgagggatctgaaccaatacagagcagacataaaggaaatgggcctgagtttacagtggctgtattctgctcgtggagacttcttccgtgctacttccagactaacaacagatttcgggaatgctgagaaaacagacagatttgtcatgaagaaactcaatgatcgtgtcatgagagaaggtccacagatgatgctccttctcacggatgcgaggccatcaaatcactttttgtctccgctgctctctctccat

SEQ ID NO: 21452 - DNA, 4814 bp, Homo sapiens
  misc_feature 1..4814: note = ENST00000420415
  source 1..4814: mol_type = unassigned DNA
cctcagagcgtcgggatatcgggtggcggctcgggacggaggacgcgctagtgttcttctgtgtggcagttcagaatgatggatcaagctagatcagcattctctaacttggatttatgattggctacttgggctattgtaaaggggtagaaccaaaaactgagtgtgagagactggcaggaaccgagtctccagtgagggaggagccaggagaggacttccctgcagcacgtcgcttatattgggatgacctgaagagaaagttgtcggagaaactggacagcacagacttcaccggcaccatcaagctgctgaatgaaaattcatatgtccctcgtgaggctggatctcaaaaagatgaaaatcttgcgttgtatgttgaaaatcaatttcgtgaatttaaactcagcaaagtctggcgtgatcaacattttgttaagattcaggtcaaagacagcgctcaaaactcggtgatcatagttgataagaacggtagacttgtttacctggtggagaatcctgggggttatgtggcgtatagtaaggctgcaacagttactggtaaactggtccatgctaattttggtactaaaaaagattttgaggatttatacactcctgtgaatggatctatagtgattgtcagagcagggaaaatcacctttgcagaaaaggttgcaaatgctgaaagcttaaatgcaattggtgtgttgatatacatggaccagactaaatttcccattgttaacgcagaactttcattctttggacatgctcatctggggacaggtgacccttacacacctggattcccttccttcaatcacactcagtttccaccatctcggtcatcaggattgcctaatatacctgtccagacaatctccagagctgctgcagaaaagctgtttgggaatatggaaggagactgtccctctgactggaaaacagactctacatgtaggatggtaacctcagaaagcaagaatgtgaagctcactgtgagcaatgtgctgaaagagataaaaattcttaacatctttggagttattaaaggctttgtagaaccagatcactatgttgtagttggggcccagagagatgcatggggccctggagctgcaaaatccggtgtaggcacagctctcctattgaaacttgcccagatgttctcagatatggtcttaaaagatgggtttcagcccagcagaagcattatctttgccagttggagtgctggagactttggatcggttggtgccactgaatggctagagggatacctttcgtccctgcatttaaaggctttcacttatattaatctggataaagcggttcttggtaccagcaacttcaaggtttctgccagcccactgttgtatacgcttattgagaaaacaatgcaaaatgtgaagcatccggttactgggcaatttctatatcaggacagcaactgggccagcaaagttgagaaactcactttagacaatgctgctttccctttccttgcatattctggaatcccagcagtttctttctgtttttgcgaggacacagattatccttatttgggtaccaccatggacacctataaggaactgattgagaggattcctgagttgaacaaagtggcacgagcagctgcagaggtcgctggtcagttcgtgattaaactaacccatgatgttgaattgaacctggactatgagaggtacaacagccaactgctttcatttgtgagggatctgaaccaatacagagcagacataaaggaaatgggcctgagtttacagtggctgtattctgctcgtggagacttcttccgtgctacttccagactaacaacagatttcgggaatgctgagaaaacagacagatttgtcatgaagaaactcaatgatcgtgtcatgagagtggagtatcacttcctctctccctacgtatctccaaaagagtctcctttccgacatgtcttctggggctccggctctcacacgctgccagctttactggagaacttgaaactgcgtaaacaaaataacggtgcttttaatgaaacgctgttcagaaaccagttggctctagctacttggactattcagggagctgcaaatgccctctctggtgacgtttgggacattgacaatgagttttaaatgtgatacccatagcttccatgagaacagcagggtagtctggtttctagacttgtgctgatcgtgctaaattttcagtagggctacaaaacctgatgttaaaattccatcccatcatcttggtactactagatgtctttaggcagcagcttttaatacagggtagataacctgtacttcaagttaaagtgaataaccacttaaaaaatgtccatgatggaatattcccctatctctagaattttaagtgctttgtaatgggaactgcctctttcctgttgttgttaatgaaaatgtcagaaaccagttatgtgaatgatctctctgaatcctaagggctggtctctgctgaaggttgtaagtggtcgcttactttgagtgatcctccaacttcatttgatgctaaataggagataccaggttgaaagaccttctccaaatgagatctaagcctttccataaggaatgtagctggtttcctcattcctgaaagaaacagttaactttcagaagagatgggcttgttttcttgccaatgaggtctgaaatggaggtccttctgctggataaaatgaggttcaactgttgattgcaggaataaggccttaatatgttaacctcagtgtcatttatgaaaagaggggaccagaagccaaagacttagtatattttcttttcctctgtcccttcccccataagcctccatttagttctttgttatttttgtttcttccaaagcacattgaaagagaaccagtttcaggtgtttagttgcagactcagtttgtcagactttaaagaataatatgctgccaaattttggccaaagtgttaatcttaggggagagctttctgtccttttggcactgagatatttattgtttatttatcagtgacagagttcactataaatggtgtttttttaatagaatataattatcggaagcagtgccttccataattatgacagttatactgtcggttttttttaaataaaagcagcatctgctaataaaacccaacagatactggaagttttgcatttatggtcaacacttaagggttttagaaaacagccgtcagccaaatgtaattgaataaagttgaagctaagatttagagatgaattaaatttaattaggggttgctaagaagcgagcactgaccagataagaatgctggttttcctaaatgcagtgaattgtgaccaagttataaatcaatgtcacttaaaggctgtggtagtactcctgcaaaattttatagctcagtttatccaaggtgtaactctaattcccattttgcaaaatttccagtacctttgtcacaatcctaacacattatcgggagcagtgtcttccataatgtataaagaacaaggtagtttttacctaccacagtgtctgtatcggagacagtgatctccatatgttacactaagggtgtaagtaattatcgggaacagtgtttcccataattttcttcatgcaatgacatcttcaaagcttgaagatcgttagtatctaacatgtatcccaactcctataattccctatcttttagttttagttgcagaaacattttgtggtcattaagcattgggtgggtaaattcaaccactgtaaaatgaaattactacaaaatttgaaatttagcttgggtttttgttacctttatggtttctccaggtcctctacttaatgagatagtagcatacatttataatgtttgctattgacaagtcattttaactttatcacattatttgcatgttacctcctataaacttagtgcggacaagttttaatccagaattgaccttttgacttaaagcagagggactttgtatagaaggtttgggggctgtggggaaggagagtcccctgaaggtctgacacgtctgcctacccattcgtggtgatcaattaaatgtaggtatgaataagttcgaagctccgtgagtgaaccatcattataaacgtgatgatcagctgtttgtcatagggcagttggaaacggcctcctagggaaaagttcatagggtctcttcaggttcttagtgtcacttacctagatttacagcctcacttgaatgtgtcactactcacagtctctttaatcttcagttttatctttaatctcctcttttatcttggactgacatttagcgtagctaagtgaaaaggtcatagctgagattcctggttcgggtgttacgcacacgtacttaaatgaaagcatgtggcatgttcatcgtataacacaatatgaatacagggcatgcattttgcagcagtgagtctcttcagaaaacccttttctacagttagggttgagttacttcctatcaagccagtacgtgctaacaggctcaatattcctgaatgaaatatcagactagtgacaagctcctggtcttgagatgtcttctcgttaaggagatgggccttttggaggtaaaggataaaatgaatgagttctgtcatgattcactattctagaacttgcatgacctttactgtgttagctctttgaatgttcttgaaattttagactttctttgtaaacaaatgatatgtccttatcattgtataaaagctgttatgtgcaacagtgtggagattccttgtctgatttaataaaatacttaaacactga

SEQ ID NO: 21453 - DNA, 5111 bp, Homo sapiens
  misc_feature 1..5111: note = ENST00000360110
  source 1..5111: mol_type = unassigned DNA
ctcgcgagcgtacgtgcctcaggaagtgacgcacagcccccctgggggccgggggcggggccaggctataaaccgccggttaggggccgccatcccctcagagcgtcgggatatcgggtggcggctcgggacggaggacgcgctagtgttcttctgtgtggcagttcagaatgatggatcaagctagatcagcattctctaacttgtttggtggagaaccattgtcatatacccggttcagcctggctcggcaagtagatggcgataacagtcatgtggagatgaaacttgctgtagatgaagaagaaaatgctgacaataacacaaaggccaatgtcacaaaaccaaaaaggtgtagtggaagtatctgctatgggactattgctgtgatcgtctttttcttgattggatttatgattggctacttgggctattgtaaaggggtagaaccaaaaactgagtgtgagagactggcaggaaccgagtctccagtgagggaggagccaggagaggacttccctgcagcacgtcgcttatattgggatgacctgaagagaaagttgtcggagaaactggacagcacagacttcaccggcaccatcaagctgctgaatgaaaattcatatgtccctcgtgaggctggatctcaaaaagatgaaaatcttgcgttgtatgttgaaaatcaatttcgtgaatttaaactcagcaaagtctggcgtgatcaacattttgttaagattcaggtcaaagacagcgctcaaaactcggtgatcatagttgataagaacggtagacttgtttacctggtggagaatcctgggggttatgtggcgtatagtaaggctgcaacagttactggtaaactggtccatgctaattttggtactaaaaaagattttgaggatttatacactcctgtgaatggatctatagtgattgtcagagcagggaaaatcacctttgcagaaaaggttgcaaatgctgaaagcttaaatgcaattggtgtgttgatatacatggaccagactaaatttcccattgttaacgcagaactttcattctttggacatgctcatctggggacaggtgacccttacacacctggattcccttccttcaatcacactcagtttccaccatctcggtcatcaggattgcctaatatacctgtccagacaatctccagagctgctgcagaaaagctgtttgggaatatggaaggagactgtccctctgactggaaaacagactctacatgtaggatggtaacctcagaaagcaagaatgtgaagctcactgtgagcaatgtgctgaaagagataaaaattcttaacatctttggagttattaaaggctttgtagaaccagatcactatgttgtagttggggcccagagagatgcatggggccctggagctgcaaaatccggtgtaggcacagctctcctattgaaacttgcccagatgttctcagatatggtcttaaaagatgggtttcagcccagcagaagcattatctttgccagttggagtgctggagactttggatcggttggtgccactgaatggctagagggatacctttcgtccctgcatttaaaggctttcacttatattaatctggataaagcggttcttggtaccagcaacttcaaggtttctgccagcccactgttgtatacgcttattgagaaaacaatgcaaaatgtgaagcatccggttactgggcaatttctatatcaggacagcaactgggccagcaaagttgagaaactcactttagacaatgctgctttccctttccttgcatattctggaatcccagcagtttctttctgtttttgcgaggacacagattatccttatttgggtaccaccatggacacctataaggaactgattgagaggattcctgagttgaacaaagtggcacgagcagctgcagaggtcgctggtcagttcgtgattaaactaacccatgatgttgaattgaacctggactatgagaggtacaacagccaactgctttcatttgtgagggatctgaaccaatacagagcagacataaaggaaatgggcctgagtttacagtggctgtattctgctcgtggagacttcttccgtgctacttccagactaacaacagatttcgggaatgctgagaaaacagacagatttgtcatgaagaaactcaatgatcgtgtcatgagagtggagtatcacttcctctctccctacgtatctccaaaagagtctcctttccgacatgtcttctggggctccggctctcacacgctgccagctttactggagaacttgaaactgcgtaaacaaaataacggtgcttttaatgaaacgctgttcagaaaccagttggctctagctacttggactattcagggagctgcaaatgccctctctggtgacgtttgggacattgacaatgagttttaaatgtgatacccatagcttccatgagaacagcagggtagtctggtttctagacttgtgctgatcgtgctaaattttcagtagggctacaaaacctgatgttaaaattccatcccatcatcttggtactactagatgtctttaggcagcagcttttaatacagggtagataacctgtacttcaagttaaagtgaataaccacttaaaaaatgtccatgatggaatattcccctatctctagaattttaagtgctttgtaatgggaactgcctctttcctgttgttgttaatgaaaatgtcagaaaccagttatgtgaatgatctctctgaatcctaagggctggtctctgctgaaggttgtaagtggtcgcttactttgagtgatcctccaacttcatttgatgctaaataggagataccaggttgaaagaccttctccaaatgagatctaagcctttccataaggaatgtagctggtttcctcattcctgaaagaaacagttaactttcagaagagatgggcttgttttcttgccaatgaggtctgaaatggaggtccttctgctggataaaatgaggttcaactgttgattgcaggaataaggccttaatatgttaacctcagtgtcatttatgaaaagaggggaccagaagccaaagacttagtatattttcttttcctctgtcccttcccccataagcctccatttagttctttgttatttttgtttcttccaaagcacattgaaagagaaccagtttcaggtgtttagttgcagactcagtttgtcagactttaaagaataatatgctgccaaattttggccaaagtgttaatcttaggggagagctttctgtccttttggcactgagatatttattgtttatttatcagtgacagagttcactataaatggtgtttttttaatagaatataattatcggaagcagtgccttccataattatgacagttatactgtcggttttttttaaataaaagcagcatctgctaataaaacccaacagatactggaagttttgcatttatggtcaacacttaagggttttagaaaacagccgtcagccaaatgtaattgaataaagttgaagctaagatttagagatgaattaaatttaattaggggttgctaagaagcgagcactgaccagataagaatgctggttttcctaaatgcagtgaattgtgaccaagttataaatcaatgtcacttaaaggctgtggtagtactcctgcaaaattttatagctcagtttatccaaggtgtaactctaattcccattttgcaaaatttccagtacctttgtcacaatcctaacacattatcgggagcagtgtcttccataatgtataaagaacaaggtagtttttacctaccacagtgtctgtatcggagacagtgatctccatatgttacactaagggtgtaagtaattatcgggaacagtgtttcccataattttcttcatgcaatgacatcttcaaagcttgaagatcgttagtatctaacatgtatcccaactcctataattccctatcttttagttttagttgcagaaacattttgtggtcattaagcattgggtgggtaaattcaaccactgtaaaatgaaattactacaaaatttgaaatttagcttgggtttttgttacctttatggtttctccaggtcctctacttaatgagatagtagcatacatttataatgtttgctattgacaagtcattttaactttatcacattatttgcatgttacctcctataaacttagtgcggacaagttttaatccagaattgaccttttgacttaaagcagagggactttgtatagaaggtttgggggctgtggggaaggagagtcccctgaaggtctgacacgtctgcctacccattcgtggtgatcaattaaatgtaggtatgaataagttcgaagctccgtgagtgaaccatcattataaacgtgatgatcagctgtttgtcatagggcagttggaaacggcctcctagggaaaagttcatagggtctcttcaggttcttagtgtcacttacctagatttacagcctcacttgaatgtgtcactactcacagtctctttaatcttcagttttatctttaatctcctcttttatcttggactgacatttagcgtagctaagtgaaaaggtcatagctgagattcctggttcgggtgttacgcacacgtacttaaatgaaagcatgtggcatgttcatcgtataacacaatatgaatacagggcatgcattttgcagcagtgagtctcttcagaaaacccttttctacagttagggttgagttacttcctatcaagccagtacgtgctaacaggctcaatattcctgaatgaaatatcagactagtgacaagctcctggtcttgagatgtcttctcgttaaggagatgggccttttggaggtaaaggataaaatgaatgagttctgtcatgattcactattctagaacttgcatgacctttactgtgttagctctttgaatgttcttgaaattttagactttctttgtaaacaaatgatatgtccttatcattgtataaaagctgttatgtgcaacagtgtggagattccttgtctgatttaataaaatacttaaacactga

SEQ ID NO: 21454 - DNA, 5032 bp, Homo sapiens
  misc_feature 1..5032: note = ENST00000392396
  source 1..5032: mol_type = unassigned DNA
agagcgtcgggatatcgggtggcggctcgggacggaggacgcgctagtgtgagtgcgggcttctagaactacaccgaccctcgtgtcctcccttcatcctgcggggctggctggagcggccgctccggtgctgtccagcagccatagggagccgcacggggagcgggaaagcggtcgcggccccaggcggggcggccgggatggagcggggccgcgagcctgtggggaaggggctgtggcggcgcctcgagcggctgcaggttcttctgtgtggcagttcagaatgatggatcaagctagatcagcattctctaacttgtttggtggagaaccattgtcatatacccggttcagcctggctcggcaagtagatggcgataacagtcatgtggagatgaaacttgctgtagatgaagaagaaaatgctgacaataacacaaaggccaatgtcacaaaaccaaaaaggtgtagtggaagtatctgctatgggactattgctgtgatcgtctttttcttgattggatttatgattggctacttgggctattgtaaaggggtagaaccaaaaactgagtgtgagagactggcaggaaccgagtctccagtgagggaggagccaggagaggacttccctgcagcacgtcgcttatattgggatgacctgaagagaaagttgtcggagaaactggacagcacagacttcaccggcaccatcaagctgctgaatgaaaattcatatgtccctcgtgaggctggatctcaaaaagatgaaaatcttgcgttgtatgttgaaaatcaatttcgtgaatttaaactcagcaaagtctggcgtgatcaacattttgttaagattcaggtcaaagacagcgctcaaaactcggtgatcatagttgataagaacggtagacttgtttacctggtggagaatcctgggggttatgtggcgtatagtaaggctgcaacagttactggtaaactggtccatgctaattttggtactaaaaaagattttgaggatttatacactcctgtgaatggatctatagtgattgtcagagcagggaaaatcacctttgcagaaaaggttgcaaatgctgaaagcttaaatgcaattggtgtgttgatatacatggaccagactaaatttcccattgttaacgcagaactttcattctttggacatgctcatctggggacaggtgacccttacacacctggattcccttccttcaatcacactcagtttccaccatctcggtcatcaggattgcctaatatacctgtccagacaatctccagagctgctgcagaaaagctgtttgggaatatggaaggagactgtccctctgactggaaaacagactctacatgtaggatggtaacctcagaaagcaagaatgtgaagctcactgtgagcaatgtgctgaaagagataaaaattcttaacatctttggagttattaaaggctttgtagaaccagatcactatgttgtagttggggcccagagagatgcatggggccctggagctgcaaaatccggtgtaggcacagctctcctattgaaacttgcccagatgttctcagatatggtcttaaaagatgggtttcagcccagcagaagcattatctttgccagttggagtgctggagactttggatcggttggtgccactgaatggctagagggatacctttcgtccctgcatttaaaggctttcacttatattaatctggataaagcggttcttggtaccagcaacttcaaggtttctgccagcccactgttgtatacgcttattgagaaaacaatgcaaaatgtgaagcatccggttactgggcaatttctatatcaggacagcaactgggccagcaaagttgagaaactcactttagacaatgctgctttccctttccttgcatattctggaatcccagcagtttctttctgtttttgcgaggacacagattatccttatttgggtaccaccatggacacctataaggaactgattgagaggattcctgagttgaacaaagtggcacgagcagctgcagaggtcgctggtcagttcgtgattaaactaacccatgatgttgaattgaacctggactatgagaggtacaacagccaactgctttcatttgtgagggatctgaaccaatacagagcagacataaaggaaatgggcctgagtttacagtggctgtattctgctcgtggagacttcttccgtgctacttccagactaacaacagatttcgggaatgctgagaaaacagacagatttgtcatgaagaaactcaatgatcgtgtcatgagagtggagtatcacttcctctctccctacgtatctccaaaagagtctcctttccgacatgtcttctggggctccggctctcacacgctgccagctttactggagaacttgaaactgcgtaaacaaaataacggtgcttttaatgaaacgctgttcagaaaccagttggctctagctacttggactattcagggagctgcaaatgccctctctggtgacgtttgggacattgacaatgagttttaaatgtgatacccatagcttccatgagaacagcagggtagtctggtttctagacttgtgctgatcgtgctaaattttcagtagggctacaaaacctgatgttaaaattccatcccatcatcttggtactactagatgtctttaggcagcagcttttaatacagggtagataacctgtacttcaagttaaagtgaataaccacttaaaaaatgtccatgatggaatattcccctatctctagaattttaagtgctttgtaatgggaactgcctctttcctgttgttgttaatgaaaatgtcagaaaccagttatgtgaatgatctctctgaatcctaagggctggtctctgctgaaggttgtaagtggtcgcttactttgagtgatcctccaacttcatttgatgctaaataggagataccaggttgaaagaccttctccaaatgagatctaagcctttccataaggaatgtagctggtttcctcattcctgaaagaaacagttaactttcagaagagatgggcttgttttcttgccaatgaggtctgaaatggaggtccttctgctggataaaatgaggttcaactgttgattgcaggaataaggccttaatatgttaacctcagtgtcatttatgaaaagaggggaccagaagccaaagacttagtatattttcttttcctctgtcccttcccccataagcctccatttagttctttgttatttttgtttcttccaaagcacattgaaagagaaccagtttcaggtgtttagttgcagactcagtttgtcagactttaaagaataatatgctgccaaattttggccaaagtgttaatcttaggggagagctttctgtccttttggcactgagatatttattgtttatttatcagtgacagagttcactataaatggtgtttttttaatagaatataattatcggaagcagtgccttccataattatgacagttatactgtcggttttttttaaataaaagcagcatctgctaataaaacccaacagatactggaagttttgcatttatggtcaacacttaagggttttagaaaacagccgtcagccaaatgtaattgaataaagttgaagctaagatttagagatgaattaaatttaattaggggttgctaagaagcgagcactgaccagataagaatgctggttttcctaaatgcagtgaattgtgaccaagttataaatcaatgtcacttaaaggctgtggtagtactcctgcaaaattttatagctcagtttatccaaggtgtaactctaattcccattttgcaaaatttccagtacctttgtcacaatcctaacacattatcgggagcagtgtcttccataatgtataaagaacaaggtagtttttacctaccacagtgtctgtatcggagacagtgatctccatatgttacactaagggtgtaagtaattatcgggaacagtgtttcccataattttcttcatgcaatgacatcttcaaagcttgaagatcgttagtatctaacatgtatcccaactcctataattccctatcttttagttttagttgcagaaacattttgtggtcattaagcattgggtgggtaaattcaaccactgtaaaatgaaattactacaaaatttgaaatttagcttgggtttttgttacctttatggtttctccaggtcctctacttaatgagatagtagcatacatttataatgtttgctattgacaagtcattttaactttatcacattatttgcatgttacctcctataaacttagtgcggacaagttttaatccagaattgaccttttgacttaaagcagagggactttgtatagaaggtttgggggctgtggggaaggagagtcccctgaaggtctgacacgtctgcctacccattcgtggtgatcaattaaatgtaggtatgaataagttcgaagctccgtgagtgaaccatcattataaacgtgatgatcagctgtttgtcatagggcagttggaaacggcctcctagggaaaagttcatagggtctcttcaggttcttagtgtcacttacctagatttacagcctcacttgaatgtgtcactactcacagtctctttaatcttcagttttatctttaatctcctcttttatcttggactgacatttagcgtagctaagtgaaaaggtcatagctgagattcctggttcgggtgttacgcacacgtacttaaatgaaagcatgtggcatgttcatcgtataacacaatatgaatacagggcatgcattttgcagcagtgagtctcttcagaaaacccttttctacagttagggttgagttacttcctatcaagccagtacgtgctaacaggctcaatattcctgaatgaaatatcagactagtgacaagctcctggtcttgagatgtcttctcgttaaggagatgggccttttggaggtaaaggata

SEQ ID NO: 21455 - DNA, 549 bp, Homo sapiens
  misc_feature 1..549: note = ENST00000463047
  source 1..549: mol_type = unassigned DNA
agggcatatgatacgatagaacagggattctgtagaacctggaagaaagtagtcactctaggagtaggttagcttgagagaagtagcaagaatgtacttaaagcagcagataatgagatagaattggggtaaattgcggtaggaatatgttagaagcaagggtggaactgtcgtcactgttacctcgatggcgaagccagaatgtgaggctcttgctcttagaactcacgtgagtaccatagcctcgcgttgtcttgcaggacacagattatccttatttgggtaccaccatggacacctataaggaactgattgagaggattcctgagttgaacaaagtggcacgagcagctgcagaggtcgctggtcagttcgtgattaaactaacccatgatgttgaattgaacctggactatgagaggtacaacagccaactgctttcatttgtgagggatctgaaccaatacagagcagacataaaggaaatgggcctgagtttacagtggctgtattctgctcgtggagacttcttccgtgctacttccagac

SEQ ID NO: 21456 - DNA, 875 bp, Homo sapiens
  misc_feature 1..875: note = ENST00000475593
  source 1..875: mol_type = unassigned DNA
ctttcctcaggtaaagctaacttttttctctttcagatgggtttcagcccagcagaagcattatctttgccagttggagtgctggagactttggatcggttggtgccactgaatggctagaggtattctttatcatcccttcccatattggacacgagcttgtgggcttaggctgttgtccagaagtgatgtttttataggtttgattttaccacttttgcctttgcgtttagtctcagtagagtccagaattgaaaatgaatccctaatgctactgtatgtgataaataaacagatttatacttattagtgttttcccttctcttctagggatacctttcgtccctgcatttaaaggctttcacttatattaatctggataaagcggttcttggtaccagcaacttcaaggtttctgccagcccactgttgtatacgcttattgagaaaacaatgcaaaatgtgaagcatccggttactgggcaatttctatatcaggacagcaactgggccagcaaagttgagaaactcactttagacaatgctgctttccctttccttgcatattctggaatcccagcagtttctttctgtttttgcgaggacacagattatccttatttgggtaccaccatggacacctataaggaactgattgagaggattcctgagttgaacaaagtggcacgagcagctgcagaggtcgctggtcagttcgtgattaaactaacccatgatgttgaattgaacctggactatgagaggtacaacagccaactgctttcatttgtgagggatctgaaccaatacagagcagacataaaggaaatgggcctgagtttacagtggctgtattctgctcgtggagacttctt

SEQ ID NO: 21457 - DNA, 757 bp, Homo sapiens
  misc_feature 1..757: note = ENST00000483983
  source 1..757: mol_type = unassigned DNA
agatggtctcgatctcctgaccttgtgatccacccgtctgggcctcccaaagtcctgggattacaggcgtgagccaccgtgcccggcctaactgctctgatatttttaaaaaaggtgacttggattaaagtatgcaaactcaaggagtagtacgagcccacttgagtgaagttagcttagttgctaaagagcttgataccaaaattacttttgtttacttgatgaatgggatagttgttgcacagggccactgatctagattactgtcttatttgtcaagtacttatagttgtagaagtagcagtgtgaaaattatcggaatggagaaggggcaatgataaaacaatttattttcaggtaccagcaacttcaaggtttctgccagcccactgttgtatacgcttattgagaaaacaatgcaaaatgtgaagcatccggttactgggcaatttctatatcaggacagcaactgggccagcaaagttgagaaactcactttagacaatgctgctttccctttccttgcatattctggaatcccagcagtttctttctgtttttgcgaggacacagattatccttatttgggtaccaccatggacacctataaggaactgattgagaggattcctgagttgaacaaagtggcacgagcagctgcagaggtcgctggtcagttcgtgattaaactaacccatgatgttgaattgaacctggactatgagaggtacaacagccaactgctttcatttgtgag

SEQ ID NO: 21458 - DNA, 533 bp, Homo sapiens
  misc_feature 1..533: note = ENST00000463356
  source 1..533: mol_type = unassigned DNA
aggtaccagcaacttcaaggtttctgccagcccactgttgtatacgcttattgagaaaacaatgcaaaatgtgaagcatccggttactgggcaatttctatatcaggacagcaactgggccagcaaagttgagaaactcactttagacaatgctgctttccctttccttgcatattctggaatcccagcagtttctttctgtttttgcgaggtaagtctgttcatttaaatgacaaatggagagaggctctctaaaaggaagtgatctgtatttgggaatagggcattgcaatgggaatgcctgtgctatagtcaactatgtacatattcagaggagtaaaggaaaacaagtttttaaggacaaatgacgaggattacaaaattactttgaggtaattattcttggctaccaagatcaataacaaggatgacaccagtccaaggttgacaggcagttgctaggcagattttctcacgagagaagttttttggtgcaaggttgcagtggcctttgtgtaaggttgtagtttttg

SEQ ID NO: 21459 - DNA, 540 bp, Homo sapiens
  misc_feature 1..540: note = ENST00000482479
  source 1..540: mol_type = unassigned DNA
ctgggctcaagtgatcctcccagctcggcctcccaaagtgttgggattgcagttgtgaactaccccacccggcctaggcccacttttaaaatgttaattaagaagaaaacattttttcctcaccataactaaaggaactgacaacatgagcctagttagtaataacttaaagttgagattgttttaactatcataaataatttcttttcaagaagatataatacaagttttttatttaaaaattgttatagagtaacatgttagtgactagcctgaataaataagttccaaaaggttagttttaatgataatttcttatcttacaggtgaagcatccggttactgggcaatttctatatcaggacagcaactgggccagcaaagttgagaaactcactttagacaatgctgctttccctttccttgcatattctggaatcccagcagtttctttctgtttttgcgaggtaagtctgttcatttaaatgacaaatggagagaggctctctaaaaggaagtgatctgtatttgggaataggg

SEQ ID NO: 21460 - DNA, 560 bp, Homo sapiens
  misc_feature 1..560: note = ENST00000465288
  source 1..560: mol_type = unassigned DNA
aaatatagtttctctgcaaactcttcttgtaacttaaatttgtgaatttttattttattttagaattatttttttaaaaatccaatgtttggatttacctctgaagatttttctcaagatgtgcatcatcatgcttacactgttttcaatgatctctgggtccagaagttaaggaactccaagaatgaaattgtgaaaggatgggtttcagcccagcagaagcattatctttgccagttggagtgctggagactttggatcggttggtgccactgaatggctagagggatacctttcgtccctgcatttaaaggctttcacttatattaatctggataaagcggttcttggtaccagcaacttcaaggtttctgccagcccactgttgtatacgcttattgagaaaacaatgcaaaatgtgaagcatccggttactgggcaatttctatatcaggacagcaactgggccagcaaagttgagaaactcactttagacaatgctgctttccctttccttgcatattctggaatcccagcagtttctttctgtttttgcgagg

SEQ ID NO: 21461 - DNA, 570 bp, Homo sapiens
  misc_feature 1..570: note = ENST00000477148
  source 1..570: mol_type = unassigned DNA
cttatttgcagatctcctatcttgctctttgtaggttactttaaaaaaaattattcctattcttttattcttttacctggggtctcaaaaaaagattttgttagttttttttttcttttttggctcagaaaaaaaagattttggaatctgctatcttggaattagaccttctgattcatcttaagtgggataccttccatccttgtctgtgtataacctttcctcaggtaaagctaacttttttctctttcagatgggtttcagcccagcagaagcattatctttgccagttggagtgctggagactttggatcggttggtgccactgaatggctagagggatacctttcgtccctgcatttaaaggctttcacttatattaatctggataaagcggttcttggtaccagcaacttcaaggtttctgccagcccactgttgtatacgcttattgagaaaacaatgcaaaatgtgaagcatccggttactgggcaatttctatatcaggacagcaactgggccagcaaagttgagaaactcactttagacaatgctgctttccctttcctt

SEQ ID NO: 21462 - DNA, 569 bp, Homo sapiens
  misc_feature 1..569: note = ENST00000464368
  source 1..569: mol_type = unassigned DNA
ggatggtaacctcagaaagcaagaatgtgaagctcactgtgagcaatgtgctgaaagagataaaaattcttaacatctttggagttattaaaggctttgtagaaccagatcactatgttgtagttggggcccagagagatgcatggggccctggagctgcaaaatccggtgtaggcacagctctcctattgaaacttgcccagatgttctcagatatggtcttaaaagatgggtttcagcccagcagaagcattatctttgccagttggagtgctggagactttggatcggttggtgccactgaatggctagagggatacctttcgtccctgcatttaaaggctttcacttatattaatctggataaagcggttcttggtaagtatccctttcattagctgtgtatgaattcaggtaaacttttttgagatggagttttgctcttgtcgcccaggctggagtgcaatggcacgatctcggctcactgcaacctctgtctcccagattcaagcgattctcctgccttagcctcctgagtagctgggattacaggtgctcactaccacacc

SEQ ID NO: 21463 - DNA, 396 bp, Homo sapiens
  misc_feature 1..396: note = ENST00000491658
  source 1..396: mol_type = unassigned DNA
taggccttggcctccttttatctcttacttgggttgcctgtcttaggtttgatctataacactcttctgtctcaagattttagagctgttccgataccataatgctcattaaatctaatgtctttgttctagggtaaactggtccatgctaattttggtactaaaaaagattttgaggatttatacactcctgtgaatggatctatagtgattgtcagagcagggaaaatcacctttgcagaaaaggttgcaaatgctgaaagcttaaatgcaattggtgtgttgatatacatggaccagactaaatttcccattgttaacgcagaactttcattctttggacatgctcatctggggacaggtgacccttacacacctggattcccttccttcaat

SEQ ID NO: 21464 - DNA, 524 bp, Homo sapiens
  misc_feature 1..524: note = ENST00000421258
  source 1..524: mol_type = unassigned DNA
cccctcagagcgtcgggatatcgggtggcggctcgggacggaggacgcgctagtgttcttctgtgtggcagttcagaatgatggatcaagctagatcagcattctctaacttgtttggtggagaaccattgtcatatacccggttcagcctggctcggcaagtagatggcgataacagtcatgtggagatgaaacttgctgtagatgaagaagaaaatgctgacaataacacaaaggccaatgtcacaaaaccaaaaaggtgtagtggaagtatctgctatgggactattgctgtgatcgtctttttcttgattggctgctgaatgaaaattcatatgtccctcgtgaggctggatctcaaaaagatgaaaatcttgcgttgtatgttgaaaatcaatttcgtgaatttaaactcagcaaagtctggcgtgatcaacattttgttaagattcaggtcaaagacagcgctcaaaactcggtgatcatagttgataagaacggtagacttgtttacctggtggaga

SEQ ID NO: 21465 - DNA, 546 bp, Homo sapiens
  misc_feature 1..546: note = ENST00000464011
  source 1..546: mol_type = unassigned DNA
agagcgtcgggatatcgggtggcggctcgggacggaggacgcgctagtgttcttctgtgtggcagttcagaatgatggatcaagctagatcagcattctctaacttgtttggtggagaaccattgtcatatacccggttcagcctggctcggcaagtagatggcgataacagtcatgtggagatgaaacttgctgtagatgaagaagaaaatgctgacaataacacaaaggccaatgtcacaaaaccaaaaaggtgtagtggaagtatctgctatgggactattgctgtgatcgtctttttcttgattggaagcaaatgctacgctagaaaatatccgcaggacactggcggtgcagcagctcagtctcatgtttcaagggggtcttttggaaaaaactacctatgttttgaataggtagctatttgaaataaagctagtatataatttattaagtggtttaaagtatacaaaactgagatgcattatatactttaaaactacttagaatttgatgaaaaccagtattttcaaggcttacctgaaa

SEQ ID NO: 21466 - DNA, 745 bp, Homo sapiens
  misc_feature 1..745: note = ENST00000523901
  source 1..745: mol_type = unassigned DNA
aagcagtggtttctcctccttcctcccaggaagggccaggaaaatggccctggtcctggagatcttcaccctgctggcctccatctgctgggtgtcggccaatatcttcgagtaccaggtggatgcccagccccttcgtccctgtgagctgcagagggaaacggcctttctgaagcaagcagactacgtgccccagtgtgcagaggatggcagcttccagtaaggcttatgtcagcagcgaactctcaaggactgtccagtgccagaacgacggccgctcctgctggtgtgtgggtgccaacggcagtgaagtgctgggcagcaggcagccaggacggcctgtggcttgtctgtcattttgtcagctacagaaacagcagatcttactgagtggctacattaacagcacagacacctcctacctccctcagtgtcaggattcaggggactacgcgcctgttcagtgtgatgtgcagcaggtccagtgctggtgtgtggacgcagaggggatggaggtgtatgggacccgccagctggggaggccaaagcgatgtccaaggagctgtgaaataagaaatcgtcgtcttctccacggggtgggagataagtcaccaccccagtgttctgcggagggagagtttatgcctgtccagtgcaaatttgtcaacaccacagacatgatgatttttgatctggtccacagctacaacaggtttccagatgcatttgtgaccttcagttcctt

SEQ ID NO: 21467 - DNA, 8450 bp, Homo sapiens
  misc_feature 1..8450: note = ENST00000220616
  source 1..8450: mol_type = unassigned DNA
cagtggtttctcctccttcctcccaggaagggccaggaaaatggccctggtcctggagatcttcaccctgctggcctccatctgctgggtgtcggccaatatcttcgagtaccaggtggatgcccagccccttcgtccctgtgagctgcagagggaaacggcctttctgaagcaagcagactacgtgccccagtgtgcagaggatggcagcttccagactgtccagtgccagaacgacggccgctcctgctggtgtgtgggtgccaacggcagtgaagtgctgggcagcaggcagccaggacggcctgtggcttgtctgtcattttgtcagctacagaaacagcagatcttactgagtggctacattaacagcacagacacctcctacctccctcagtgtcaggattcaggggactacgcgcctgttcagtgtgatgtgcagcaggtccagtgctggtgtgtggacgcagaggggatggaggtgtatgggacccgccagctggggaggccaaagcgatgtccaaggagctgtgaaataagaaatcgtcgtcttctccacggggtgggagataagtcaccaccccagtgttctgcggagggagagtttatgcctgtccagtgcaaatttgtcaacaccacagacatgatgatttttgatctggtccacagctacaacaggtttccagatgcatttgtgaccttcagttccttccagaggaggttccctgaggtatctgggtattgccactgtgctgacagccaagggcgggaactggctgagacaggtttggagttgttactggatgaaatttatgacaccatttttgctggcctggaccttccttccaccttcactgaaaccaccctgtaccggatactgcagagacggttcctcgcagttcaatcagtcatctctggcagattccgatgccccacaaaatgtgaagtggagcggtttacagcaaccagctttggtcacccctatgttccaagctgccgccgaaatggcgactatcaggcggtgcagtgccagacggaagggccctgctggtgtgtggacgcccaggggaaggaaatgcatggaacccggcagcaaggggagccgccatcttgtgctgaaggccaatcttgtgcctccgaaaggcagcaggccttgtccagactctactttgggacctcaggctacttcagccagcacgacctgttctcttccccagagaaaagatgggcctctccaagagtagccagatttgccacatcctgcccacccacgatcaaggagctctttgtggactctgggcttctccgcccaatggtggagggacagagccaacagttttctgtctcagaaaatcttctcaaagaagccatccgagcaatttttccctcccgagggctggctcgtcttgcccttcagtttaccaccaacccaaagagactccagcaaaacctttttggagggaaatttttggtgaatgttggccagtttaacttgtctggagcccttggcacaagaggcacatttaacttcagtcaatttttccagcaacttggtcttgcaagcttcttgaatggagggagacaagaagatttggccaagccactctctgtgggattagattcaaattcttccacaggaacccctgaagctgctaagaaggatggtactatgaataagccaactgtgggcagctttggctttgaaattaacctacaagagaaccaaaatgccctcaaattccttgcttctctcctggagcttccagaattccttctcttcttgcaacatgctatctctgtgccagaagatgtggcaagagatttaggtgatgtgatggaaacggtactcagctcccagacctgtgagcagacacctgaaaggctatttgtcccatcatgcacgacagaaggaagctatgaggatgtccaatgcttttccggagagtgctggtgtgtgaattcctggggcaaagagcttccaggctcaagagtcagaggtggacagccaaggtgccccacagactgtgaaaagcaaagggctcgcatgcaaagcctcatgggcagccagcctgctggctccaccttgtttgtccctgcttgtactagtgagggacatttcctgcctgtccagtgcttcaactcagagtgctactgtgttgatgctgagggtcaggccattcctggaactcgaagtgcaatagggaagcccaagaaatgccccacgccctgtcaattacagtctgagcaagctttcctcaggacggtgcaggccctgctctctaactccagcatgctacccaccctttccgacacctacatcccacagtgcagcaccgatgggcagtggagacaagtgcaatgcaatgggcctcctgagcaggtcttcgagttgtaccaacgatgggaggctcagaacaagggccaggatctgacgcctgccaagctgctagtgaagatcatgagctacagagaagcagcttccggaaacttcagtctctttattcaaagtctgtatgaggctggccagcaagatgtcttcccggtgctgtcacaatacccttctctgcaagatgtcccactagcagcactggaagggaaacggccccagcccagggagaatatcctcctggagccctacctcttctggcagatcttaaatggccaactcagccaatacccggggtcctactcagacttcagcactcctttggcacattttgatcttcggaactgctggtgtgtggatgaggctggccaagaactggaaggaatgcggtctgagccaagcaagctcccaacatgtcctggctcctgtgaggaagcaaagctccgtgtactgcagttcattagggaaacggaagagattgtttcagcttccaacagttctcggttccctctgggggagagtttcctggtggccaagggaatccggctgaggaatgaggacctcggccttcctccgctcttcccgccccgggaggctttcgcggagcagtttctgcgtgggagtgattacgccattcgcctggcggctcagtctaccttaagcttctatcagagacgccgcttttccccggacgactcggctggagcatccgcccttctgcggtcgggcccctacatgccacagtgtgatgcgtttggaagttgggagcctgtgcagtgccacgctgggactgggcactgctggtgtgtagatgagaaaggagggttcatccctggctcactgactgcccgctctctgcagattccacagtgcccgacaacctgcgagaaatctcgaaccagtgggctgctttccagttggaaacaggctagatcccaagaaaacccatctccaaaagacctgttcgtcccagcctgcctagaaacaggagagtatgccaggctgcaggcatcgggggctggcacctggtgtgtggaccctgcatcaggagaagagttgcggcctggctcgagcagcagtgcccagtgcccaagcctctgcaatgtgctcaagagtggagtcctctccaggagagtcagcccaggctatgtcccagcctgcagggcagaggatgggggcttttccccagtgcaatgtgaccaggcccagggcagctgctggtgtgtcatggacagcggagaagaggtgcctgggacgcgcgtgaccgggggccagcccgcctgtgagagcccgcggtgtccgctgccattcaacgcgtcggaggtggttggtggaacaatcctgtgtgagacaatctcgggccccacaggctctgccatgcagcagtgccaattgctgtgccgccagggctcctggagcgtgtttccaccagggccattgatatgtagcctggagagcggacgctgggagtcacagctgcctcagccccgggcctgccaacggccccagctgtggcagaccatccagacccaagggcactttcagctccagctcccgccgggcaagatgtgcagtgctgactacgcggatttgctgcagactttccaggttttcatattggatgagctgacagcccgcggcttctgccagatccaggtgaagacttttggcaccctggtttccattcctgtctgcaacaactcctctgtgcaggtgggttgtctgaccagggagcgtttaggagtgaatgttacatggaaatcacggcttgaggacatcccagtggcttctcttcctgacttacatgacattgagagagccttggtgggcaaggatctccttgggcgcttcacagatctgatccagagtggctcattccagcttcatctggactccaagacgttcccagcggaaaccatccgcttcctccaaggggaccactttggcacctctcccaggacatggtttgggtgctcggaaggattctaccaagtcttgacaagtgaggccagtcaggacggactgggatgcgttaagtgtcctgaaggaagctattcccaagatgaggaatgcattccttgtcctgttggattctaccaagaacaggcagggagcttggcctgtgtcccatgtcctgtgggcagaacgaccatttctgctggagctttcagccagactcactgtgtcactgactgtcagaggaacgaagcaggcctgcaatgtgaccagaatggccagtatcgagccagccagaaggacaggggcagtgggaaggccttctgtgtggacggcgaggggcggaggctgccatggtgggaaacagaggcccctcttgaggactcacagtgtttgatgatgcagaagtttgagaaggttccagaatcaaaggtgatcttcgacgccaatgctcctgtggctgtcagatccaaagttcctgattctgagttccccgtgatgcagtgcttgacagattgcacagaggacgaggcctgcagcttcttcaccgtgtccacgacggagccagagatttcctgtgatttctatgcttggacaagtgacaatgttgcctgcatgacttctgaccagaaacgagatgcactggggaactcaaaggccaccagctttggaagtcttcgctgccaggtgaaagtgaggagccatggtcaagattctccagctgtgtatttgaaaaagggccaaggatccaccacaacacttcagaaacgctttgaacccactggtttccaaaacatgctttctggattgtacaaccccattgtgttctcagcctcaggagccaatctaaccgatgctcacctcttctgtcttcttgcatgcgaccgtgatctgtgttgcgatggcttcgtcctcacacaggttcaaggaggtgccatcatctgtgggttgctgagctcacccagtgtcctgctttgtaatgtcaaagactggatggatccctctgaagcctgggctaatgctacatgtcctggtgtgacatatgaccaggagagccaccaggtgatattgcgtcttggagaccaggagttcatcaagagtctgacacccttagaaggaactcaagacacctttaccaattttcagcaggtttatctctggaaagattctgacatggggtctcggcctgagtctatgggatgtagaaaagacacagtgccaaggccagcatctccaacagaagcaggtttgacaacagaacttttctcccctgtggacctcaaccaggtcattgtcaatggaaatcaatcactatccagccagaagcactggcttttcaagcacctgttttcagcccagcaggcaaacctatggtgcctttctcgttgtgtgcaggagcactctttctgtcagctcgcagagataacagagagtgcatccttgtacttcacctgcaccctctacccagaggcacaggtgtgtgatgacatcatggagtccaatgcccagggctgcagactgatcctgcctcagatgccaaaggccctgttccggaagaaagttatactggaagataaagtgaagaacttttacactcgcctgccgttccaaaaactgatggggatatccattagaaataaagtgcccatgtctgaaaaatctatttctaatgggttctttgaatgtgaacgacggtgcgatgcggacccatgctgcactggctttggatttctaaatgtttcccagttaaaaggaggagaggtgacatgtctcactctgaacagcttgggaattcagatgtgcagtgaggagaatggaggagcctggcgcattttggactgtggctctcctgacattgaagtccacacctatcccttcggatggtaccagaagcccattgctcaaaataatgctcccagtttttgccctttggttgttctgccttccctcacagagaaagtgtctctggactcgtggcagtccctggccctctcttcagtggttgttgatccatccattaggcactttgatgttgcccatgtcagcactgctgccaccagcaatttctctgctgtccgagacctctgtttgtcggaatgttcccaacatgaggcctgtctcatcaccactctgcaaacccaacctggggctgtgagatgtatgttctatgctgatactcaaagctgcacacatagtctgcagggtcagaactgccgacttctgcttcgtgaagaggccacccacatctaccggaagccaggaatctctctgctcagctatgaggcatctgtaccttctgtgcccatttccacccatggccggctgctgggcaggtcccaggccatccaggtgggtacctcatggaagcaagtggaccagttccttggagttccatatgctgccccgcccctggcagagaggcgcttccaggcaccagagcccttgaactggacaggctcctgggatgccagcaagccaagggccagctgctggcagccaggcaccagaacatccacgtctcctggagtcagtgaagattgtttgtatctcaatgtgttcatccctcagaatgtggcccctaacgcgtctgtgctggtgttcttccacaacaccatggacagggaggagagtgaaggatggccggctatcgacggctccttcttggctgctgttggcaacctcatcgtggtcactgccagctaccgagtgggtgtcttcggcttcctgagttctgggtccggagaggtgagtggcaactgggggctgctggaccaggtggcggctctgacctgggtgcagacccacatccgaggatttggcggggaccctcggcgcgtgtccctggcagcagaccgtggcggggctgatgtggccagcatccaccttctcacggccagggccaccaactcccaacttttccggagagctgtgctgatgggaggctccgcactctccccggccgccgtcatcagccatgagagggctcagcagcaggcaattgctttggcaaaggaggtcagttgccccatgtcatccagccaagaagtggtgtcctgcctccgccagaagcctgccaatgtcctcaatgatgcccagaccaagctcctggccgtgagtggccctttccactactggggtcctgtgatcgatggccacttcctccgtgagcctccagccagagcactgaagaggtctttatgggtagaggtcgatctgctcattgggagttctcaggacgacgggctcatcaacagagcaaaggctgtgaagcaatttgaggaaagtcgaggccggaccagtagcaaaacagccttttaccaggcactgcagaattctctgggtggcgaggactcagatgcccgcgtcgaggctgctgctacatggtattactctctggagcactccacggatgactatgcctccttctcccgggctctggagaatgccacccgggactactttatcatctgccctataatcgacatggccagtgcctgggcaaagagggcccgaggaaacgtcttcatgtaccatgctcctgaaaactacggccatggcagcctggagctgctggcggatgttcagtttgccttggggcttcccttctacccagcctacgaggggcagttttctctggaggagaagagcctgtcgctgaaaatcatgcagtacttttcccacttcatcagatcaggaaatcccaactacccttatgagttctcacggaaagtacccacatttgcaaccccctggcctgactttgtaccccgtgctggtggagagaactacaaggagttcagtgagctgctccccaatcgacagggcctgaagaaagccgactgctccttctggtccaagtacatctcgtctctgaagacatctgcagatggagccaagggcgggcagtcagcagagagtgaagaggaggagttgacggctggatctgggctaagagaagatctcctaagcctccaggaaccaggctctaagacctacagcaagtgaccagcccttgagctccccaaaaacctcacccgaggctgcccactatggtcatctttttctctaaaatagccacttaccttcaataaagtatctacatgcggtg

SEQ ID NO: 21468 - DNA, 669 bp, Homo sapiens
  misc_feature 1..669: note = ENST00000520769
  source 1..669: mol_type = unassigned DNA
tgcatttgtgaccttcagttccttccagaggaggttccctgaggtatctgggtattgccactgtgctgacagccaagggcgggaactggctgagacaggtttggagttgttactggatgaaatttatgacaccatttttgctggcctggaccttccttccaccttcactgaaaccaccctgtaccggatactgcagagacggttcctcgcagttcaatcagtcatctctggcagattccgatgccccacaaaatgtgaagtggagcggtttacagcaaccagctttggtcacccctatgttccaagctgccgccgaaatggcgactatcaggcggtgcagtgccagacggaagggccctgctggtgtgtggacgcccaggggaaggaaatgcatggaacccggcagcaaggggagccgccatcttgtggtgggtttcctctgggggcttcctctttcggcctcggatcatattactttggcggtcctccagaccaacctctctggaccccattaattcaactgccttctagtgtgcccctctggcccttcaagctcaacctgtctgagaaccagtttatcatcattaacttccaacatgtttctcatcttgtgtcagacctcgttgcattttcagggagctcagggaatattaggaggctcatagatga

SEQ ID NO: 21469 - DNA, 5065 bp, Homo sapiens
  misc_feature 1..5065: note = ENST00000523756
  source 1..5065: mol_type = unassigned DNA
ctcggctggagcatccgcccttctgcggtcgggcccctacatgccacagtgtgatgcgtttggaagttgggagcctgtgcagtgccacgctgggactgggcactgctggtgtgtagatgagaaaggagggttcatccctggctcactgactgcccgctctctgcagattccacagtgcccgacaacctgcgagaaatctcgaaccagtgggctgctttccagttggaaacaggctagatcccaagaaaacccatctccaaaagacctgttcgtcccagcctgcctagaagcccgcggtgtccgctgccattcaacgcgtcggaggtggttggtggaacaatcctgtgtgagacaatctcgggccccacaggctctgccatgcagcagtgccaattgctgtgccgccagggctcctggagcgtgtttccaccagggccattgatatgtagcctggagagcggacgctgggagtcacagctgcctcagccccgggcctgccaacggccccagctgtggcagaccatccagacccaagggcactttcagctccagctcccgccgggcaagatgtgcagtgctgactacgcggatttgctgcagactttccaggttttcatattggatgagctgacagcccgcggcttctgccagatccaggtgaagacttttggcaccctggtttccattcctgtctgcaacaactcctctgtgcaggtgggttgtctgaccagggagcgtttaggagtgaatgttacatggaaatcacggcttgaggacatcccagtggcttctcttcctgacttacatgacattgagagagccttggtgggcaaggatctccttgggcgcttcacagatctgatccagagtggctcattccagcttcatctggactccaagacgttcccagcggaaaccatccgcttcctccaaggggaccactttggcacctctcccaggacatggtttgggtgctcggaaggattctaccaagtcttgacaagtgaggccagtcaggacggactgggatgcgttaagtgtcctgaaggaagctattcccaagatgaggaatgcattccttgtcctgttggattctaccaagaacaggcagggagcttggcctgtgtcccatgtcctgtgggcagaacgaccatttctgctggagctttcagccagactcactgtgtcactgactgtcagaggaacgaagcaggcctgcaatgtgaccagaatggccagtatcgagccagccagaaggacaggggcagtgggaaggccttctgtgtggacggcgaggggcggaggctgccatggtgggaaacagaggcccctcttgaggactcacagtgtttgatgatgcagaagtttgagaaggttccagaatcaaaggtgatcttcgacgccaatgctcctgtggctgtcagatccaaagttcctgattctgagttccccgtgatgcagtgcttgacagattgcacagaggacgaggcctgcagcttcttcaccgtgtccacgacggagccagagatttcctgtgatttctatgcttggacaagtgacaatgttgcctgcatgacttctgaccagaaacgagatgcactggggaactcaaaggccaccagctttggaagtcttcgctgccaggtgaaagtgaggagccatggtcaagattctccagctgtgtatttgaaaaagggccaaggatccaccacaacacttcagaaacgctttgaacccactggtttccaaaacatgctttctggattgtacaaccccattgtgttctcagcctcaggagccaatctaaccgatgctcacctcttctgtcttcttgcatgcgaccgtgatctgtgttgcgatggcttcgtcctcacacaggttcaaggaggtgccatcatctgtgggttgctgagctcacccagtgtcctgctttgtaatgtcaaagactggatggatccctctgaagcctgggctaatgctacatgtcctggtgtgacatatgaccaggagagccaccaggtgatattgcgtcttggagaccaggagttcatcaagagtctgacacccttagaaggaactcaagacacctttaccaattttcagcaggtttatctctggaaagattctgacatggggtctcggcctgagtctatgggatgtagaaaagacacagtgccaaggccagcatctccaacagaagcaggtttgacaacagaacttttctcccctgtggacctcaaccaggtcattgtcaatggaaatcaatcactatccagccagaagcactggcttttcaagcacctgttttcagcccagcaggcaaacctatggtgcctttctcgttgtgtgcaggagcactctttctgtcagctcgcagagataacagagagtgcatccttgtacttcacctgcaccctctacccagaggcacaggtgtgtgatgacatcatggagtccaatgcccagggctgcagactgatcctgcctcagatgccaaaggccctgttccggaagaaagttatactggaagataaagtgaagaacttttacactcgcctgccgttccaaaaactgatggggatatccattagaaataaagtgcccatgtctgaaaaatctatttctaatgggttctttgaatgtgaacgacggtgcgatgcggacccatgctgcactggctttggatttctaaatgtttcccagttaaaaggaggagaggtgacatgtctcactctgaacagcttgggaattcagatgtgcagtgaggagaatggaggagcctggcgcattttggactgtggctctcctgacattgaagtccacacctatcccttcggatggtaccagaagcccattgctcaaaataatgctcccagtttttgccctttggttgttctgccttccctcacagagaaagtgtctctggactcgtggcagtccctggccctctcttcagtggttgttgatccatccattaggcactttgatgttgcccatgtcagcactgctgccaccagcaatttctctgctgtccgagacctctgtttgtcggaatgttcccaacatgaggcctgtctcatcaccactctgcaaacccaacctggggctgtgagatgtatgttctatgctgatactcaaagctgcacacatagtctgcagggtcagaactgccgacttctgcttcgtgaagaggccacccacatctaccggaagccaggaatctctctgctcagctatgaggcatctgtaccttctgtgcccatttccacccatggccggctgctgggcaggtcccaggccatccaggtgggtacctcatggaagcaagtggaccagttccttggagttccatatgctgccccgcccctggcagagaggcgcttccaggcaccagagcccttgaactggacaggctcctgggatgccagcaagccaagggccagctgctggcagccaggcaccagaacatccacgtctcctggagtcagtgaagattgtttgtatctcaatgtgttcatccctcagaatgtggcccctaacgcgtctgtgctggtgttcttccacaacaccatggacagggaggagagtgaaggatggccggctatcgacggctccttcttggctgctgttggcaacctcatcgtggtcactgccagctaccgagtgggtgtcttcggcttcctgagttctgggtccggagaggtgagtggcaactgggggctgctggaccaggtggcggctctgacctgggtgcagacccacatccgaggatttggcggggaccctcggcgcgtgtccctggcagcagaccgtggcggggctgatgtggccagcatccaccttctcacggccagggccaccaactcccaacttttccggagagctgtgctgatgggaggctccgcactctccccggccgccgtcatcagccatgagagggctcagcagcaggcaattgctttggcaaaggaggtcagttgccccatgtcatccagccaagaagtggtgtcctgcctccgccagaagcctgccaatgtcctcaatgatgcccagaccaagctcctggccgtgagtggccctttccactactggggtcctgtgatcgatggccacttcctccgtgagcctccagccagagcactgaagaggtctttatgggtagaggtcgatctgctcattgggagttctcaggacgacgggctcatcaacagagcaaaggctgtgaagcaatttgaggaaagtcgaggccggaccagtagcaaaacagccttttaccaggcactgcagaattctctgggtggcgaggactcagatgcccgcgtcgaggctgctgctacatggtattactctctggagcactccacggatgactatgcctccttctcccgggctctggagaatgccacccgggactactttatcatctgccctataatcgacatggccagtgcctgggcaaagagggcccgaggaaacgtcttcatgtaccatgctcctgaaaactacggccatggcagcctggagctgctggcggatgttcagtttgccttggggcttcccttctacccagcctacgaggggcagttttctctggaggagaagagcctgtcgctgaaaatcatgcagtacttttcccacttcatcagatcaggaaatcccaactacccttatgagttctcacggaaagtacccacatttgcaaccccctggcctgactttgtaccccgtgctggtggagagaactacaaggagttcagtgagctgctccccaatcgacagggcctgaagaaagccgactgctccttctggtccaagtacatctcgtctctgaagacatctgcagatggagccaagggcgggcagtcagcagagagtgaagaggaggagttgacggctggatctgggctaagagaagatctcctaagcctccaggaaccaggctctaagacctacagcaagtgaccagcccttgagctccccaaaaacctcacccgaggctgcccactatggtcatctttttctctaaaatagccacttaccttcaataaagtatctacatgcggtg

SEQ ID NO: 21470 - DNA, 334 bp, Homo sapiens
  misc_feature 1..334: note = ENST00000518097
  source 1..334: mol_type = unassigned DNA
acagtgtgatgcgtttggaagttgggagcctgtgcagtgccacgctgggactgggcactgctggtgtgtagatgagaaaggagggttcatccctggctcactgactgcccgctctctgcagattccacagtgcccgacaacctgcgagaaatctcgaaccagtgggctgctttccagttggaaacaggctagatcccaagaaaacccatctccaaaagacctgttcgtcccagcctgcctagaagtaagggtctggaagcacaggattggagccgggacttgtccccgctggtcagagatgatttttctttttgttcaatacgttcagcttagt

SEQ ID NO: 21471 - DNA, 678 bp, Homo sapiens
  misc_feature 1..678: note = ENST00000518505
  source 1..678: mol_type = unassigned DNA
ttggaagttgggagcctgtgcagtgccacgctgggactgggcactgctggtgtgtagatgagaaaggagggttcatccctggctcactgactgcccgctctctgcagattccacagtgcccgacaacctgcgagaaatctcgaaccagtgggctgctttccagttggaaacaggctagatcccaagaaaacccatctccaaaagacctgttcgtcccagcctgcctagaaacaggagagtatgccaggctgcaggcatcgggggctggcacctggtgtgtggaccctgcatcaggagaagagttgcggcctggctcgagcagcagtgcccagtcctgcagggcagaggatgggggcttttccccagtgcaatgtgaccaggcccagggcagctgctggtgtgtcatggacagcggagaagaggtgcctgggacgcgcgtgaccgggggccagcccgcctgtgagagcccgcggtgtccgctgccattcaacgcgtcggaggtggttggtggaacaatcctgtgtgagacaatctcgggccccacaggctctgccatgcagcagtgccaattgctgtgccgccagggctcctggagcgtgtttccaccagggccattgatatgtagcctggagagcggacgctgggagtcacagctgcctcagccccgggcctgccaac

SEQ ID NO: 21472 - DNA, 3706 bp, Homo sapiens
  misc_feature 1..3706: note = ENST00000519178
  source 1..3706: mol_type = unassigned DNA
ccaagaacaggcagggagcttggcctgtgtcccatgtcctgtgggcagaacgaccatttctgctggagctttcagccagactcactgtgtcactgactgtcagaggaacgaagcaggcctgcaatgtgaccagaatggccagtatcgagccagccagaaggacaggggcagtgggaaggccttctgtgtggacggcgaggggcggaggctgccatggtgggaaacagaggcccctcttgaggactcacagtgtttgatgatgcagaagtttgagaaggttccagaatcaaaggtgatcttcgacgccaatgctcctgtggctgtcagatccaaagttcctgattctgagttccccgtgatgcagtgcttgacagattgcacagaggacgaggcctgcagcttcttcaccgtgtccacgacggagccagagatttcctgtgatttctatgcttggacaagtgacaatgttgcctgcatgacttctgaccagaaacgagatgcactggggaactcaaaggccaccagctttggaagtcttcgctgccaggtgaaagtgaggagccatggtcaagattctccagctgtgtatttgaaaaagggtgccatcatctgtgggttgctgagctcacccagtgtcctgctttgtaatgtcaaagactggatggatccctctgaagcctgggctaatgctacatgtcctggtgtgacatatgaccaggagagccaccaggtgatattgcgtcttggagaccaggagttcatcaagagtctgacacccttagaaggaactcaagacacctttaccaattttcagcaggtttatctctggaaagattctgacatggggtctcggcctgagtctatgggatgtagaaaagacacagtgccaaggccagcatctccaacagaagcaggtttgacaacagaacttttctcccctgtggacctcaaccaggtcattgtcaatggaaatcaatcactatccagccagaagcactggcttttcaagcacctgttttcagcccagcaggcaaacctatggtgcctttctcgttgtgtgcaggagcactctttctgtcagctcgcagagataacagagagtgcatccttgtacttcacctgcaccctctacccagaggcacaggtgtgtgatgacatcatggagtccaatgcccagggctgcagactgatcctgcctcagatgccaaaggccctgttccggaagaaagttatactggaagataaagtgaagaacttttacactcgcctgccgttccaaaaactgatggggatatccattagaaataaagtgcccatgtctgaaaaatctatttctaatgggttctttgaatgtgaacgacggtgcgatgcggacccatgctgcactggctttggatttctaaatgtttcccagttaaaaggaggagaggtgacatgtctcactctgaacagcttgggaattcagatgtgcagtgaggagaatggaggagcctggcgcattttggactgtggctctcctgacattgaagtccacacctatcccttcggatggtaccagaagcccattgctcaaaataatgctcccagtttttgccctttggttgttctgccttccctcacagagaaagtgtctctggactcgtggcagtccctggccctctcttcagtggttgttgatccatccattaggcactttgatgttgcccatgtcagcactgctgccaccagcaatttctctgctgtccgagacctctgtttgtcggaatgttcccaacatgaggcctgtctcatcaccactctgcaaacccaacctggggctgtgagatgtatgttctatgctgatactcaaagctgcacacatagtctgcagggtcagaactgccgacttctgcttcgtgaagaggccacccacatctaccggaagccaggaatctctctgctcagctatgaggcatctgtaccttctgtgcccatttccacccatggccggctgctgggcaggtcccaggccatccaggtgggtacctcatggaagcaagtggaccagttccttggagttccatatgctgccccgcccctggcagagaggcgcttccaggcaccagagcccttgaactggacaggctcctgggatgccagcaagccaagggccagctgctggcagccaggcaccagaacatccacgtctcctggagtcagtgaagattgtttgtatctcaatgtgttcatccctcagaatgtggcccctaacgcgtctgtgctggtgttcttccacaacaccatggacagggaggagagtgaaggatggccggctatcgacggctccttcttggctgctgttggcaacctcatcgtggtcactgccagctaccgagtgggtgtcttcggcttcctgagttctgggtccggagaggtgagtggcaactgggggctgctggaccaggtggcggctctgacctgggtgcagacccacatccgaggatttggcggggaccctcggcgcgtgtccctggcagcagaccgtggcggggctgatgtggccagcatccaccttctcacggccagggccaccaactcccaacttttccggagagctgtgctgatgggaggctccgcactctccccggccgccgtcatcagccatgagagggctcagcagcaggcaattgctttggcaaaggaggtcagttgccccatgtcatccagccaagaagtggtgtcctgcctccgccagaagcctgccaatgtcctcaatgatgcccagaccaagctcctggccgtgagtggccctttccactactggggtcctgtgatcgatggccacttcctccgtgagcctccagccagagcactgaagaggtctttatgggtagaggtcgatctgctcattgggagttctcaggacgacgggctcatcaacagagcaaaggctgtgaagcaatttgaggaaagtcgaggccggaccagtagcaaaacagccttttaccaggcactgcagaattctctgggtggcgaggactcagatgcccgcgtcgaggctgctgctacatggtattactctctggagcactccacggatgactatgcctccttctcccgggctctggagaatgccacccgggactactttatcatctgccctataatcgacatggccagtgcctgggcaaagagggcccgaggaaacgtcttcatgtaccatgctcctgaaaactacggccatggcagcctggagctgctggcggatgttcagtttgccttggggcttcccttctacccagcctacgaggggcagttttctctggaggagaagagcctgtcgctgaaaatcatgcagtacttttcccacttcatcagatcaggaaatcccaactacccttatgagttctcacggaaagtacccacatttgcaaccccctggcctgactttgtaccccgtgctggtggagagaactacaaggagttcagtgagctgctccccaatcgacagggcctgaagaaagccgactgctccttctggtccaagtacatctcgtctctgaagacatctgcagatggagccaagggcgggcagtcagcagagagtgaagaggaggagttgacggctggatctgggctaagagaagatctcctaagcctccaggaaccaggctctaagacctacagcaagtgaccagcccttgagctccccaaaaacctcacccga

SEQ ID NO: 21473 - DNA, 185 bp, Homo sapiens
  misc_feature 1..185: note = ENST00000518058
  source 1..185: mol_type = unassigned DNA
attctgacatggggtctcggcctgagtctatgggatgtagaaaagacacagtgccaaggccagcatctccaacagaagcaggttgtgtgcaggagcactctttctgtcagctcgcagagataacagagagtgcatccttgtacttcacctgcaccctctacccagaggcacaggtgtgtgatgac

SEQ ID NO: 21474 - DNA, 3132 bp, Homo sapiens
  misc_feature 1..3132: note = ENST00000519543
  source 1..3132: mol_type = unassigned DNA
attgcttttaaggagggcacatagttttaagagaaataggaaatggcttaatctaatacggcacgtaaaccaggtataagatgaagtggctacagtattcattctttcatccaaccagacatttttgagcacatgtggctgtggccttggacattcacaggctagtgagaattccatgtgccagccactgcatgacagtgtggcaagggatgcaatgtggacaggtgtcggttgcagtgagaatgcaggagaaggaatgctagcagcctgcaggggccaggaaaggtttctcggaggaggccagaaggatctgccagatgctcccaggtttgacaacagaacttttctcccctgtggacctcaaccaggtcattgtcaatggaaatcaatcactatccagccagaagcactggcttttcaagcacctgttttcagcccagcaggcaaacctatggtgcctttctcgttgtgtgcaggagcactctttctgtcagctcgcagagataacagagagtgcatccttgtacttcacctgcaccctctacccagaggcacaggtgtgtgatgacatcatggagtccaatgcccagggctgcagactgatcctgcctcagatgccaaaggccctgttccggaagaaagttatactggaagataaagtgaagaacttttacactcgcctgccgttccaaaaactgatggggatatccattagaaataaagtgcccatgtctgaaaaatctatttctaatgggttctttgaatgtgaacgacggtgcgatgcggacccatgctgcactggctttggatttctaaatgtttcccagttaaaaggaggagaggtgacatgtctcactctgaacagcttgggaattcagatgtgcagtgaggagaatggaggagcctggcgcattttggactgtggctctcctgacattgaagtccacacctatcccttcggatggtaccagaagcccatgtctctggactcgtggcagtccctggccctctcttcagtggttgttgatccatccattaggcactttgatgttgcccatgtcagcactgctgccaccagcaatttctctgctgtccgagacctctgtttgtcggaatgttcccaacatgaggcctgtctcatcaccactctgcaaacccaacctggggctgtgagatgtatgttctatgctgatactcaaagctgcacacatagtctgcagggtcagaactgccgacttctgcttcgtgaagaggccacccacatctaccggaagccaggaatctctctgctcagctatgaggcatctgtaccttctgtgcccatttccacccatggccggctgctgggcaggtcccaggccatccaggtgggtacctcatggaagcaagtggaccagttccttggagttccatatgctgccccgcccctggcagagaggcgcttccaggcaccagagcccttgaactggacaggctcctgggatgccagcaagccaagggccagctgctggcagccaggcaccagaacatccacgtctcctggagtcagtgaagattgtttgtatctcaatgtgttcatccctcagaatgtggcccctaacgcgtctgtgctggtgttcttccacaacaccatggacagggaggagagtgaaggatggccggctatcgacggctccttcttggctgctgttggcaacctcatcgtggtcactgccagctaccgagtgggtgtcttcggcttcctgagttctgggtccggagaggtgagtggcaactgggggctgctggaccaggtggcggctctgacctgggtgcagacccacatccgaggatttggcggggaccctcggcgcgtgtccctggcagcagaccgtggcggggctgatgtggccagcatccaccttctcacggccagggccaccaactcccaacttttccggagagctgtgctgatgggaggctccgcactctccccggccgccgtcatcagccatgagagggctcagcagcaggcaattgctttggcaaaggaggtcagttgccccatgtcatccagccaagaagtggtgtcctgcctccgccagaagcctgccaatgtcctcaatgatgcccagaccaagctcctggccgtgagtggccctttccactactggggtcctgtgatcgatggccacttcctccgtgagcctccagccagagcactgaagaggtctttatgggtagaggtcgatctgctcattgggagttctcaggacgacgggctcatcaacagagcaaaggctgtgaagcaatttgaggaaagtcgaggccggaccagtagcaaaacagccttttaccaggcactgcagaattctctgggtggcgaggactcagatgcccgcgtcgaggctgctgctacatggtattactctctggagcactccacggatgactatgcctccttctcccgggctctggagaatgccacccgggactactttatcatctgccctataatcgacatggccagtgcctgggcaaagagggcccgaggaaacgtcttcatgtaccatgctcctgaaaactacggccatggcagcctggagctgctggcggatgttcagtttgccttggggcttcccttctacccagcctacgaggggcagttttctctggaggagaagagcctgtcgctgaaaatcatgcagtacttttcccacttcatcagatcaggaaatcccaactacccttatgagttctcacggaaagtacccacatttgcaaccccctggcctgactttgtaccccgtgctggtggagagaactacaaggagttcagtgagctgctccccaatcgacagggcctgaagaaagccgactgctccttctggtccaagtacatctcgtctctgaagacatctgcagatggagccaagggcgggcagtcagcagagagtgaagaggaggagttgacggctggatctgggctaagagaagatctcctaagcctccaggaaccaggctctaagacctacagcaagtgaccagcccttgagctccccaaaaacctcacccgaggctgcccactatggtcatctttttctctaaaatagccacttaccttcaataaagtatctacatgcggtgaagcat

SEQ ID NO: 21475 - DNA, 676 bp, Homo sapiens
  misc_feature 1..676: note = ENST00000520197
  source 1..676: mol_type = unassigned DNA
ttatactggaagataaagtgaagaacttttacactcgcctgccgttccaaaaactgatggggatatccattagaaataaagtgcccatgtctgaaaaatctatttctaatgggttctttgaatgtgaacgacggtgcgatgcggacccatgctgcactggctttggatttctaaatgtttcccagttaaaaggaggagaggtgacatgtctcactctgaacagcttgggaattcagatgtgcagtgaggagaatggaggagcctggcgcattttggactgtggctctcctgacattgaagtccacacctatcccttcggatggtaccagaagcccattgctcaaaataatgctcccagtttttgccctttggttgttctgccttccctcacagagaaagattcacatgtacctggccaaacgaacaactccatgttttccaaaaggcttggagaacataccaggtacctctcctctttccctttgtgtttgtcattttggcgaattactggaagatggtggttccagctgaaaggctttttggcaatttttaacagctgaaaataaaccttgaaataaacattttctcctttaactgatgtctgggaaggaagaaacaaaaaaagaaagagaagaaaggaaataaggaaggagggagggagagagtgaaggaggga

SEQ ID NO: 21476 - DNA, 712 bp, Homo sapiens
  misc_feature 1..712: note = ENST00000520089
  source 1..712: mol_type = unassigned DNA; mol_type = unassigned DNA
ttacactcgcctgccgttccaaaaactgatggggatatccattagaaataaagtgcccatgtctgaaaaatctatttctaatgggttctttgaatgtgaacgacggtgcgatgcggacccatgctgcactggctttggatttctaaatgtttcccagttaaaaggaggagaggtgacatgtctcactctgaacagcttgggaattcagatgtgcagtgaggagaatggaggagcctggcgcattttggactgtggctctcctgacattgaagtccacacctatcccttcggatggtaccagaagcccattgctcaaaataatgctcccagtttttgccctttggttgttctgccttccctcacagagaaaggtaagttcattgtctttttatctcttggatgagagtaccccctcattcatcttctttctcctcttcccccttgcttttgtacagaagttgatagcttgcatatcactcgcattaattccagctcctatgaattaaacacatgtataagtggggtgagtaccagcaacatgcccactttgcagatgagaaaattgactcacgggaatgaaatgatttgtggaaattatgtggctgattgaagcagagtaagacctaagtcgcgttctcccagttttcattttaaggattatttcgccctatcgagtaatgactagacacacacaatccggaggcaatgtcaa

SEQ ID NO: 21477 - DNA, 620 bp, Homo sapiens
  misc_feature 1..620: note = ENST00000519294
  source 1..620: mol_type = unassigned DNA
cccatgctgcactggctttggatttctaaatgtttcccagttaaaaggaggagaggtgacatgtctcactctgaacagcttgggaattcagatgtgcagtgaggagaatggaggagcctggcgcattttggactgtggctctcctgacattgaagtccacacctatcccttcggatggtaccagaagcccattgctcaaaataatgctcccagtttttgccctttggttgttctgccttccctcacagagaaagtgtttaaagtccgggaggtgagagggacccagctgaagaggatggagtgagggcttccgtataactggagtacctggtgtcatgggaagattcacatgtacctggccaaacgaacaactccatgttttccaaaaggcttggagaacataccaggtacctctcctctttccctttgtgtttgtcattttggcgaattactggaagatggtggttccagctgaaaggctttttggcaatttttaacagctgaaaataaaccttgaaataaacattttctcctttaactgatgtctgggaaggaagaaacaaaaaaagaaagagaagaaaggaaataaggaaggagggagggagagagtgaaggaggga

SEQ ID NO: 21478 - DNA, 743 bp, Homo sapiens
  misc_feature 1..743: note = ENST00000524151
  source 1..743: mol_type = unassigned DNA; mol_type = unassigned DNA
tctaaatgtttcccagttaaaaggaggagaggtgacatgtctcactctgaacagcttgggaattcagatgtgcagtgaggagaatggaggagcctggcgcattttggactgtggctctcctgacattgaagtccacacctatcccttcggatggtaccagaagcccattgctcaaaataatgctcccagtttttgccctttggttgttctgccttccctcacagagaaagggatcatgaaggtttgctgggggcctgaaagacttttcctgcctgaaaggtttcagaatgtcacggtttaccccagccagcctgtgcaggtgtggaaaccgcctcttctatttcccagctattccatattcaggagcaatcacttgatgagtgctgagcagctgaaagaaattcctcttggttttgattgcgggaagaagggtgaggatcctgaagacttttggatgccttggactcactgtttatttttgatgagtcctaagaaagtcatgtgatctttttatacaataaatgggatgggtctgtgattatttgaacgttggagagagtgtcaggcatttgctgccggtttgacattctgcccttggatctgatacaaaaatgcttggaggcactttccgcctgtttttcaaatgagggaggcaatggccagagcagaagctcacctgtcattacctgccagcaagcggcagacctctgcctgtggggtgcatgcagctctatagtgatgtg

SEQ ID NO: 21479 - DNA, 813 bp, Homo sapiens
  misc_feature 1..813: note = ENST00000522523
  source 1..813: mol_type = unassigned DNA; mol_type = unassigned DNA
ctgtttcctcctcatctgtatatagggctaccaaagctaccttcctcgtaaggttatgtgaggaccaagtgaagtgataccaacagagacctagcacagccctaagcacatgttaggaggagaggtgacatgtctcactctgaacagcttgggaattcagatgtgcagtgaggagaatggaggagcctggcgcattttggactgtggctctcctgacattgaagtccacacctatcccttcggatggtaccagaagcccattgctcaaaataatgctcccagtttttgccctttggttgttctgccttccctcacagagaaagtgtctctggactcgtggcagtccctggccctctcttcagtggttgttgatccatccattaggcactttgatgttgcccatgtcagcactgctgccaccagcaatttctctgctgtccgagacctctgtttgtcggaatgttcccaacatgaggcctgtctcatcaccactctgcaaacccaacctggggctgtgagatgtatgttctatgctgatactcaaagctgcacacatagtctgcagggtcagaactgccgacttctgcttcgtgaagaggccacccacatctaccggaagccaggaatctctctgctcagctatgaggcatctgtaccttctgtgcccatttccacccatggccggctgctgggcaggtcccaggccatccaggtgggtacctcatggaagcaagtggaccagttccttggagttccatatgctgccccgcccctggcagagaggcgcttccaggcaccagagcccttgaactg

SEQ ID NO: 21480 - DNA, 481 bp, Homo sapiens
  misc_feature 1..481: note = ENST00000522797
  source 1..481: mol_type = unassigned DNA; mol_type = unassigned DNA
gggaattcagatgtgcagtgaggagaatggaggagcctggcgcattttggactgtggctctcctgacattgaagtccacacctatcccttcggatggtaccagaagcccattgctcaaaataatgctcccagtttttgccctttggttgttctgccttccctcacagagaaagtgtttaaagtccgggaggtgagagggacccagctgaagaggatggagtgagggcttccgtataactggagtacctggtgtcatgggaagtgtctctggactcgtggcagtccctggccctctcttcagtggttgttgatccatccattaggcactttgatgttgcccatgtcagcactgctgccaccagcaatttctctgctgtccgagacctctgtttgtcggaatgttcccaacatgaggcctgtctcatcaccactctgcaaacccaacctggggctgtgagatgtatgttctatgctgatactc

SEQ ID NO: 21481 - DNA, 581 bp, Homo sapiens
  misc_feature 1..581: note = ENST00000518108
  source 1..581: mol_type = unassigned DNA; mol_type = unassigned DNA
acattcagaatgccagtggagagagcactcactgaggcctctccccttcctcacccctttctcttccctttcccaacaggaatctctctgctcagctatgaggcatctgtaccttctgtgcccatttccacccatggccggctgctgggcaggtcccaggccatccagggccagctgctggcagccaggcaccagaacatccacgtctcctggagtcagtgaagattgtttgtatctcaatgtgttcatccctcagaatgtggcccctaacgcgtctgtgctggtgttcttccacaacaccatggacagggaggagagtgaaggatggccggctatcgacggctccttcttggctgctgttggcaacctcatcgtggtcactgccagctaccgagtgggtgtcttcggcttcctgagttctgggtccggagaggtgagtggcaactgggggctgctggaccaggtggcggctctgacctgggtgcagacccacatccgaggatttggcggggaccctcggcgcgtgtccctggcagcagaccgtggcggggctgatgtggccagcatccaccttctcacgg

SEQ ID NO: 21482 - DNA, 829 bp, Homo sapiens
  misc_feature 1..829: note = ENST00000522996
  source 1..829: mol_type = unassigned DNA; mol_type = unassigned DNA
taatgcagcttgctagttaaggagccccccaggaggtgctggtgggagatggttctatctttgcagagttctcttcccagaggactttgccacaatctccgatcctcttaaagaaccatcagccctttgcctctatatacaaattcatctgcacagccaagactgaaggttcccttgtgcagcaccctcacttcacaggttaggaaactgaggcctagagagacatcttcagtatcacactgcatgctgatatgctgttgaccaatccttatcttcccattgtgtgcagccccagaatgggtcctgggactcccaagcttggaggaaggatgcagaaccctgatgtggcactgaggactccaggtgagcaggggctgaagatgatctgaaccatctgccctgagcctgctttctcttccagggaggctccgcactctccccggccgccgtcatcagccatgagagggctcagcagcaggcaattgctttggcaaaggaggtcagttgccccatgtcatccagccaagaagtggtgtcctgcctccgccagaagcctgccaatgtcctcaatgatgcccagaccaagctcctggccgtgagtggccctttccactactggggtcctgtgatcgatggccacttcctccgtgagcctccagccagagcactgaagaggtctttatgggtagaggtcgatctgctcattgggagttctcaggacgacgggctcatcaacagagcaaaggctgtgaagcaatttgaggaaagtcgaggccggaccagtagcaaaacagccttttaccaggcactgcagaattctctgggtggc

SEQ ID NO: 21483 - DNA, 465 bp, Homo sapiens
  misc_feature 1..465: note = ENST00000522809
  source 1..465: mol_type = unassigned DNA; mol_type = unassigned DNA
cctgcctccgccagaagcctgccaatgtcctcaatgatgcccagaccaagctcctggccgtgagtggccctttccactactggggtcctgtgatcgatggccacttcctccgtgagcctccagccagagcactgaagaggtctttatgggtagaggtcgatctgctcattgggagttctcaggacgacgggctcatcaacagagcaaaggctgtgaagcaatttgaggaaagtcgaggccggaccagtagcaaaacagccttttaccaggcactgcagaattctctgggtggcgaggactcagatgcccgcgtcgaggctgctgctacatggtattactctctggagcactccacggatgactatgcctccttctcccgggctctggagaatgccacccggtaagctaagctgcaggagggtgcagattcctactgctatgttttggagcagactcagttggtgt

SEQ ID NO: 21484 - DNA, 616 bp, Homo sapiens
  misc_feature 1..616: note = ENST00000521107
  source 1..616: mol_type = unassigned DNA; mol_type = unassigned DNA
tcagatgcccgcgtcgaggctgctgctacatggtattactctctggagcactccacggatgactatgcctccttctcccgggctctggagaatgccacccgggactactttatcatctgccctataatcgacatggccagtgcctgggcaaagagggcccgaggaaacgtcttcatgtaccatgctcctgaaaactacggccatggcagaaatcccaactacccttatgagttctcacggaaagtacccacatttgcaaccccctggcctgactttgtaccccgtgctggtggagagaactacaaggagttcagtgagctgctccccaatcgacagggcctgaagaaagccgactgctccttctggtccaagtacatctcgtctctgaagacatctgcagatggagccaagggcgggcagtcagcagagagtgaagaggaggagttgacggctggatctgggctaagagaagatctcctaagcctccaggaaccaggctctaagacctacagcaagtgaccagcccttgagctccccaaaaacctcacccgaggctgcccactatggtcatctttttctctaaaatagccacttaccttcaataaagtatctacat

SEQ ID NO: 21485 - DNA, 476 bp, Homo sapiens
  misc_feature 1..476: note = ENST00000522691
  source 1..476: mol_type = unassigned DNA; mol_type = unassigned DNA
cgagtgcaagtgggaagtgattcaggtgatgaaaggaaagacaaatttccctcatggatatttctttcttctcatttgcccagaaatcccaactacccttatgagttctcacggaaagtacccacatttgcaaccccctggcctgactttgtaccccgtgctggtggagagaactacaaggagttcagtgagctgctccccaatcgacagggcctgaagaaagccgactgctccttctggtccaagtacatctcgtctctgaagacatctgcagatggagccaagggcgggcagtcagcagagagtgaagaggaggagttgacggctggatctgggctaagagaagatctcctaagcctccaggaaccaggctctaagacctacagcaagtgaccagcccttgagctccccaaaaacctcacccgaggctgcccactatggtcatctttttctctaaaatagccacttaccttcaa

SEQ ID NO: 21486 - DNA, 4969 bp, Homo sapiens
  misc_feature 1..4969: note = ENST00000366930
  source 1..4969: mol_type = unassigned DNA; mol_type = unassigned DNA
gcccctcccgtcagttcgccagctgccagccccgggaccttttcatctcttcccttttggccggaggagccgagttcagatccgccactccgcacccgagactgacacactgaactccacttcctcctcttaaatttatttctacttaatagccactcgtctctttttttccccatctcattgctccaagaatttttttcttcttactcgccaaagtcagggttccctctgcccgtcccgtattaatatttccacttttggaactactggccttttctttttaaaggaattcaagcaggatacgtttttctgttgggcattgactagattgtttgcaaaagtttcgcatcaaaaacaacaacaacaaaaaaccaaacaactctccttgatctatactttgagaattgttgatttcttttttttattctgacttttaaaaacaacttttttttccacttttttaaaaaatgcactactgtgtgctgagcgcttttctgatcctgcatctggtcacggtcgcgctcagcctgtctacctgcagcacactcgatatggaccagttcatgcgcaagaggatcgaggcgatccgcgggcagatcctgagcaagctgaagctcaccagtcccccagaagactatcctgagcccgaggaagtccccccggaggtgatttccatctacaacagcaccagggacttgctccaggagaaggcgagccggagggcggccgcctgcgagcgcgagaggagcgacgaagagtactacgccaaggaggtttacaaaatagacatgccgcccttcttcccctccgaaaatgccatcccgcccactttctacagaccctacttcagaattgttcgatttgacgtctcagcaatggagaagaatgcttccaatttggtgaaagcagagttcagagtctttcgtttgcagaacccaaaagccagagtgcctgaacaacggattgagctatatcagattctcaagtccaaagatttaacatctccaacccagcgctacatcgacagcaaagttgtgaaaacaagagcagaaggcgaatggctctccttcgatgtaactgatgctgttcatgaatggcttcaccataaagacaggaacctgggatttaaaataagcttacactgtccctgctgcacttttgtaccatctaataattacatcatcccaaataaaagtgaagaactagaagcaagatttgcaggtattgatggcacctccacatataccagtggtgatcagaaaactataaagtccactaggaaaaaaaacagtgggaagaccccacatctcctgctaatgttattgccctcctacagacttgagtcacaacagaccaaccggcggaagaagcgtgctttggatgcggcctattgctttagaaatgtgcaggataattgctgcctacgtccactttacattgatttcaagagggatctagggtggaaatggatacacgaacccaaagggtacaatgccaacttctgtgctggagcatgcccgtatttatggagttcagacactcagcacagcagggtcctgagcttatataataccataaatccagaagcatctgcttctccttgctgcgtgtcccaagatttagaacctctaaccattctctactacattggcaaaacacccaagattgaacagctttctaatatgattgtaaagtcttgcaaatgcagctaaaattcttggaaaagtggcaagaccaaaatgacaatgatgatgataatgatgatgacgacgacaacgatgatgcttgtaacaagaaaacataagagagccttggttcatcagtgttaaaaaatttttgaaaaggcggtactagttcagacactttggaagtttgtgttctgtttgttaaaactggcatctgacacaaaaaaagttgaaggccttattctacatttcacctactttgtaagtgagagagacaagaagcaaattttttttaaagaaaaaaataaacactggaagaatttattagtgttaattatgtgaacaacgacaacaacaacaacaacaacaaacaggaaaatcccattaagtggagttgctgtacgtaccgttcctatcccgcgcctcacttgatttttctgtattgctatgcaataggcacccttcccattcttactcttagagttaacagtgagttatttattgtgtgttactatataatgaacgtttcattgcccttggaaaataaaacaggtgtataaagtggagaccaaatactttgccagaaactcatggatggcttaaggaacttgaactcaaacgagccagaaaaaaagaggtcatattaatgggatgaaaacccaagtgagttattatatgaccgagaaagtctgcattaagataaagaccctgaaaacacatgttatgtatcagctgcctaaggaagcttcttgtaaggtccaaaaactaaaaagactgttaataaaagaaactttcagtcagaataagtctgtaagtttttttttttctttttaattgtaaatggttctttgtcagtttagtaaaccagtgaaatgttgaaatgttttgacatgtactggtcaaacttcagaccttaaaatattgctgtatagctatgctataggttttttcctttgttttggtatatgtaaccatacctatattattaaaatagatggatatagaagccagcataattgaaaacacatctgcagatctcttttgcaaactattaaatcaaaacattaactactttatgtgtaatgtgtaaatttttaccatattttttatattctgtaataatgtcaactatgatttagattgacttaaatttgggctctttttaatgatcactcacaaatgtatgtttcttttagctggccagtacttttgagtaaagcccctatagtttgacttgcactacaaatgcattttttttttaataacatttgccctacttgtgctttgtgtttctttcattattatgacataagctacctgggtccacttgtcttttcttttttttgtttcacagaaaagatgggttcgagttcagtggtcttcatcttccaagcatcattactaaccaagtcagacgttaacaaatttttatgttaggaaaaggaggaatgttatagatacatagaaaattgaagtaaaatgttttcattttagcaaggatttagggttctaactaaaactcagaatctttattgagttaagaaaagtttctctaccttggtttaatcaatatttttgtaaaatcctattgttattacaaagaggacacttcataggaaacatctttttctttagtcaggtttttaatattcagggggaaattgaaagatatatattttagtcgatttttcaaaaggggaaaaaagtccaggtcagcataagtcattttgtgtatttcactgaagttataaggtttttataaatgttctttgaaggggaaaaggcacaagccaatttttcctatgatcaaaaaattctttctttcctctgagtgagagttatctatatctgaggctaaagtttaccttgctttaataaataatttgccacatcattgcagaagaggtatcctcatgctggggttaatagaatatgtcagtttatcacttgtcgcttatttagctttaaaataaaaattaataggcaaagcaatggaatatttgcagtttcacctaaagagcagcataaggaggcgggaatccaaagtgaagttgtttgatatggtctacttcttttttggaatttcctgaccattaattaaagaattggatttgcaagtttgaaaactggaaaagcaagagatgggatgccataatagtaaacagcccttgtgttggatgtaacccaatcccagatttgagtgtgtgttgattatttttttgtcttccacttttctattatgtgtaaatcacttttatttctgcagacattttcctctcagataggatgacattttgttttgtattattttgtctttcctcatgaatgcactgataatattttaaatgctctattttaagatctcttgaatctgttttttttttttttaatttgggggttctgtaaggtctttatttcccataagtaaatattgccatgggaggggggtggaggtggcaaggaaggggtgaagtgctagtatgcaagtgggcagcaattatttttgtgttaatcagcagtacaatttgatcgttggcatggttaaaaaatggaatataagattagctgttttgtattttgatgaccaattacgctgtattttaacacgatgtatgtctgtttttgtggtgctctagtggtaaataaattatttcgatgatatgtggatgtctttttcctatcagtaccatcatcgagtctagaaaacacctgtgatgcaataagactatctcaagctggaaaagtcataccacctttccgattgccctctgtgctttctcccttaaggacagtcacttcagaagtcatgctttaaagcacaagagtcaggccatatccatcaaggatagaagaaatccctgtgccgtctttttattcccttatttattgctatttggtaattgtttgagatttagtttccatccagcttgactgccgaccagaaaaaatgcagagagatgtttgcaccatgctttggctttctggttctatgttctgccaacgccagggccaaaagaactggtctagacagtatcccctgtagccccataacttggatagttgctgagccagccagatataacaagagccacgtgctttctggggttggttgtttgggatcagctacttgcctgtcagtttcactggtaccactgcaccacaaacaaaaaaacccaccctatttcctccaatttttttggctgctacctacaagaccagactcctcaaacgagttgccaatctcttaataaataggattaataaaaaaagtaattgtgactcaa

SEQ ID NO: 21487 - DNA, 5053 bp, Homo sapiens
  misc_feature 1..5053: note = ENST00000366929
  source 1..5053: mol_type = unassigned DNA; mol_type = unassigned DNA
gcccctcccgtcagttcgccagctgccagccccgggaccttttcatctcttcccttttggccggaggagccgagttcagatccgccactccgcacccgagactgacacactgaactccacttcctcctcttaaatttatttctacttaatagccactcgtctctttttttccccatctcattgctccaagaatttttttcttcttactcgccaaagtcagggttccctctgcccgtcccgtattaatatttccacttttggaactactggccttttctttttaaaggaattcaagcaggatacgtttttctgttgggcattgactagattgtttgcaaaagtttcgcatcaaaaacaacaacaacaaaaaaccaaacaactctccttgatctatactttgagaattgttgatttcttttttttattctgacttttaaaaacaacttttttttccacttttttaaaaaatgcactactgtgtgctgagcgcttttctgatcctgcatctggtcacggtcgcgctcagcctgtctacctgcagcacactcgatatggaccagttcatgcgcaagaggatcgaggcgatccgcgggcagatcctgagcaagctgaagctcaccagtcccccagaagactatcctgagcccgaggaagtccccccggaggtgatttccatctacaacagcaccagggacttgctccaggagaaggcgagccggagggcggccgcctgcgagcgcgagaggagcgacgaagagtactacgccaaggaggtttacaaaatagacatgccgcccttcttcccctccgaaactgtctgcccagttgttacaacaccctctggctcagtgggcagcttgtgctccagacagtcccaggtgctctgtgggtaccttgatgccatcccgcccactttctacagaccctacttcagaattgttcgatttgacgtctcagcaatggagaagaatgcttccaatttggtgaaagcagagttcagagtctttcgtttgcagaacccaaaagccagagtgcctgaacaacggattgagctatatcagattctcaagtccaaagatttaacatctccaacccagcgctacatcgacagcaaagttgtgaaaacaagagcagaaggcgaatggctctccttcgatgtaactgatgctgttcatgaatggcttcaccataaagacaggaacctgggatttaaaataagcttacactgtccctgctgcacttttgtaccatctaataattacatcatcccaaataaaagtgaagaactagaagcaagatttgcaggtattgatggcacctccacatataccagtggtgatcagaaaactataaagtccactaggaaaaaaaacagtgggaagaccccacatctcctgctaatgttattgccctcctacagacttgagtcacaacagaccaaccggcggaagaagcgtgctttggatgcggcctattgctttagaaatgtgcaggataattgctgcctacgtccactttacattgatttcaagagggatctagggtggaaatggatacacgaacccaaagggtacaatgccaacttctgtgctggagcatgcccgtatttatggagttcagacactcagcacagcagggtcctgagcttatataataccataaatccagaagcatctgcttctccttgctgcgtgtcccaagatttagaacctctaaccattctctactacattggcaaaacacccaagattgaacagctttctaatatgattgtaaagtcttgcaaatgcagctaaaattcttggaaaagtggcaagaccaaaatgacaatgatgatgataatgatgatgacgacgacaacgatgatgcttgtaacaagaaaacataagagagccttggttcatcagtgttaaaaaatttttgaaaaggcggtactagttcagacactttggaagtttgtgttctgtttgttaaaactggcatctgacacaaaaaaagttgaaggccttattctacatttcacctactttgtaagtgagagagacaagaagcaaattttttttaaagaaaaaaataaacactggaagaatttattagtgttaattatgtgaacaacgacaacaacaacaacaacaacaaacaggaaaatcccattaagtggagttgctgtacgtaccgttcctatcccgcgcctcacttgatttttctgtattgctatgcaataggcacccttcccattcttactcttagagttaacagtgagttatttattgtgtgttactatataatgaacgtttcattgcccttggaaaataaaacaggtgtataaagtggagaccaaatactttgccagaaactcatggatggcttaaggaacttgaactcaaacgagccagaaaaaaagaggtcatattaatgggatgaaaacccaagtgagttattatatgaccgagaaagtctgcattaagataaagaccctgaaaacacatgttatgtatcagctgcctaaggaagcttcttgtaaggtccaaaaactaaaaagactgttaataaaagaaactttcagtcagaataagtctgtaagtttttttttttctttttaattgtaaatggttctttgtcagtttagtaaaccagtgaaatgttgaaatgttttgacatgtactggtcaaacttcagaccttaaaatattgctgtatagctatgctataggttttttcctttgttttggtatatgtaaccatacctatattattaaaatagatggatatagaagccagcataattgaaaacacatctgcagatctcttttgcaaactattaaatcaaaacattaactactttatgtgtaatgtgtaaatttttaccatattttttatattctgtaataatgtcaactatgatttagattgacttaaatttgggctctttttaatgatcactcacaaatgtatgtttcttttagctggccagtacttttgagtaaagcccctatagtttgacttgcactacaaatgcattttttttttaataacatttgccctacttgtgctttgtgtttctttcattattatgacataagctacctgggtccacttgtcttttcttttttttgtttcacagaaaagatgggttcgagttcagtggtcttcatcttccaagcatcattactaaccaagtcagacgttaacaaatttttatgttaggaaaaggaggaatgttatagatacatagaaaattgaagtaaaatgttttcattttagcaaggatttagggttctaactaaaactcagaatctttattgagttaagaaaagtttctctaccttggtttaatcaatatttttgtaaaatcctattgttattacaaagaggacacttcataggaaacatctttttctttagtcaggtttttaatattcagggggaaattgaaagatatatattttagtcgatttttcaaaaggggaaaaaagtccaggtcagcataagtcattttgtgtatttcactgaagttataaggtttttataaatgttctttgaaggggaaaaggcacaagccaatttttcctatgatcaaaaaattctttctttcctctgagtgagagttatctatatctgaggctaaagtttaccttgctttaataaataatttgccacatcattgcagaagaggtatcctcatgctggggttaatagaatatgtcagtttatcacttgtcgcttatttagctttaaaataaaaattaataggcaaagcaatggaatatttgcagtttcacctaaagagcagcataaggaggcgggaatccaaagtgaagttgtttgatatggtctacttcttttttggaatttcctgaccattaattaaagaattggatttgcaagtttgaaaactggaaaagcaagagatgggatgccataatagtaaacagcccttgtgttggatgtaacccaatcccagatttgagtgtgtgttgattatttttttgtcttccacttttctattatgtgtaaatcacttttatttctgcagacattttcctctcagataggatgacattttgttttgtattattttgtctttcctcatgaatgcactgataatattttaaatgctctattttaagatctcttgaatctgttttttttttttttaatttgggggttctgtaaggtctttatttcccataagtaaatattgccatgggaggggggtggaggtggcaaggaaggggtgaagtgctagtatgcaagtgggcagcaattatttttgtgttaatcagcagtacaatttgatcgttggcatggttaaaaaatggaatataagattagctgttttgtattttgatgaccaattacgctgtattttaacacgatgtatgtctgtttttgtggtgctctagtggtaaataaattatttcgatgatatgtggatgtctttttcctatcagtaccatcatcgagtctagaaaacacctgtgatgcaataagactatctcaagctggaaaagtcataccacctttccgattgccctctgtgctttctcccttaaggacagtcacttcagaagtcatgctttaaagcacaagagtcaggccatatccatcaaggatagaagaaatccctgtgccgtctttttattcccttatttattgctatttggtaattgtttgagatttagtttccatccagcttgactgccgaccagaaaaaatgcagagagatgtttgcaccatgctttggctttctggttctatgttctgccaacgccagggccaaaagaactggtctagacagtatcccctgtagccccataacttggatagttgctgagccagccagatataacaagagccacgtgctttctggggttggttgtttgggatcagctacttgcctgtcagtttcactggtaccactgcaccacaaacaaaaaaacccaccctatttcctccaatttttttggctgctacctacaagaccagactcctcaaacgagttgccaatctcttaataaataggattaataaaaaaagtaattgtgactcaa

SEQ ID NO: 21488 - DNA, 405 bp, Homo sapiens
  misc_feature 1..405: note = ENST00000488793
  source 1..405: mol_type = unassigned DNA; mol_type = unassigned DNA
ccctccgaaaatgccatcccgcccactttctacagaccctacttcagaattgttcgatttgacgtctcagcaatggagaagaatgcttccaatttggtgaaagcagagttcagagtctttcgtttgcagaacccaaaagccagagtgcctgaacaacggattgagctatatcagattctcaagtccaaagatttaacatctccaacccagcgctacatcgacagcaaagttgtgaaaacaagagcagaaggcgaatggctctccttcgatgtaactgatgctgttcatgaatggcttcaccataaaggttacaagccactctctcttttcctcccaagatgttcagtatccctaagttactttaaattgattgcagatttaagggtatagacacacatacaaatg

SEQ ID NO: 21489 - DNA, 1508 bp, Homo sapiens
  misc_feature 1..1508: note = ENST00000479322
  source 1..1508: mol_type = unassigned DNA; mol_type = unassigned DNA
cgacagcaaagttgtgaaaacaagagcagaaggcgaatggctctccttcgatgtaactgatgctgttcatgaatggcttcaccataaaggttacaagccactctctcttttcctcccaagatgttcaacaggaacctgggatttaaaataagcttacactgtccctgctgcacttttgtaccatctaataattacatcatcccaaataaaagtgaagaactagaagcaagatttgcaggtattgatggcacctccacatataccagtggtgatcagaaaactataaagtccactaggaaaaaaaacagtgggaagaccccacatctcctgctaatgttattgccctcctacagacttgagtcacaacagaccaaccggcggaagaagcgtgctttggatgcggcctattgctttagaaatgtgcaggataattgctgcctacgtccactttacattgatttcaagagggatctagggtggaaatggatacacgaacccaaagggtacaatgccaacttctgtgctggagcatgcccgtatttatggagttcagacactcagcacagcagggtcctgagcttatataataccataaatccagaagcatctgcttctccttgctgcgtgtcccaagatttagaacctctaaccattctctactacattggcaaaacacccaagattgaacagctttctaatatgattgtaaagtcttgcaaatgcagctaaaattcttggaaaagtggcaagaccaaaatgacaatgatgatgataatgatgatgacgacgacaacgatgatgcttgtaacaagaaaacataagagagccttggttcatcagtgttaaaaaatttttgaaaaggcggtactagttcagacactttggaagtttgtgttctgtttgttaaaactggcatctgacacaaaaaaagttgaaggccttattctacatttcacctactttgtaagtgagagagacaagaagcaaattttttttaaagaaaaaaataaacactggaagaatttattagtgttaattatgtgaacaacgacaacaacaacaacaacaacaaacaggaaaatcccattaagtggagttgctgtacgtaccgttcctatcccgcgcctcacttgatttttctgtattgctatgcaataggcacccttcccattcttactcttagagttaacagtgagttatttattgtgtgttactatataatgaacgtttcattgcccttggaaaataaaacaggtgtataaagtggagaccaaatactttgccagaaactcatggatggcttaaggaacttgaactcaaacgagccagaaaaaaagaggtcatattaatgggatgaaaacccaagtgagttattatatgaccgagaaagtctgcattaagataaagaccctgaaaacacatgttatgtatcagctgcctaaggaagcttcttgtaaggtccaaaaactaaaaagactgttaataaaagaaactttcagtcagaataa

SEQ ID NO: 21490 - DNA, 210 bp, Homo sapiens
  misc_feature 1..210: note = ENST00000556507
  source 1..210: mol_type = unassigned DNA; mol_type = unassigned DNA
catacctccgcagtgcagacacaacccacagcacgctcattgtttctgcatcctgtctggggccctgcacgctgcacttactaaatggctcaaggcaatgttttgtgagaacatttctcaccgaagtgatcagttccagctaggaagagcaatgtgctgggactgtacaacactctgaaccctgaagcatctgcctcgccttgctgcgtg

SEQ ID NO: 21491 - DNA, 608 bp, Homo sapiens
  misc_feature 1..608: note = ENST00000557493
  source 1..608: mol_type = unassigned DNA; mol_type = unassigned DNA
agaataagggatgtgctaagcaaaggcaacagggaggcccaggccctcaagtggaaataagcttgatttgttctagcagcagcagcaaacagatcggtgtggctggagcatgagtccaacttaggtctagaaatcagcattcactgtccatgtcacacctttcagcccaatggagatatcctggaaaacattcacgaggtgatggaaatcaaattcaaaggcgtggacaatgaggatgaccatggccgtggagatctggggcgcctcaagaagcagaaggatcaccacaaccctcatctaatcctcatgatgattcccccacaccggctcgacaacccgggccaggggggtcagaggaagaagcgggctttggacaccaattactgcttccgcaacttggaggagaactgctgtgtgcgccccctctacattgacttccgacaggatctgggctggaagtgggtccatgaacctaagggctactatgccaacttctgctcaggcccttgcccatacctccgcagtgcagacacaacccacagcacggtatggagcaggctcatgccatctgaggcactggggctgaccgaccagaccacttgttaaaa

SEQ ID NO: 21492 - DNA, 1280 bp, Homo sapiens
  misc_feature 1..1280: note = ENST00000556285
  source 1..1280: mol_type = unassigned DNA; mol_type = unassigned DNA
ggggaggccgcctggttttcctccctccttctgcacgtctgctggggtctcttcctctccaggccttgccgtccccctggcctctcttcccagctcacacatgaagatgcacttgcaaagggctctggtggtcctggccctgctgaactttgccacggtcagcctctctctgtccacttgcaccaccttggacttcggccacatcaagaagaagagggtggaagccattaggggacagatcttgagcaagctcaggctcaccagcccccctgagccaacggtgatgacccacgtcccctatcaggtcctggccctttacaacagcacccgggagctgctggaggagatgcatggggagagggaggaaggctgcacccaggaaaacaccgagtcggaatactatgccaaagaaatccataaattcgacatgatccaggggctggcggagcacaacgaactggctgtctgccctaaaggaattacctccaaggttttccgcttcaatgtgtcctcagtggagaaaaatagaaccaacctattccgagcagaattccgggtcttgcgggtgcccaaccccagctctaagcggaatgagcagaggatcgagctcttccagatccttcggccagatgagcacattgccaaacagcgctatatcggtggcaagaatctgcccacacggggcactgccgagtggctgtcctttgatgtcactgacactgtgcgtgagtggctgttgagaagagagtccaacttaggtctagaaatcagcattcactgtccatgtcacacctttcagcccaatggagatatcctggaaaacattcacgaggtgatggaaatcaaattcaaaggcgtggacaatgaggatgaccatggccgtggagatctggggcgcctcaagaagcagaaggatcaccacaaccctcatctaatcctcatgatgattcccccacaccggctcgacaacccgggccaggggggtcagaggaagaagcgggctttggacaccaattactgcttccggtgagactgggcccacatgggaaccaacatctactgcctgcctactgcccaatggctaggtcaggccccagagccaagccacactcaacagagggtccctgatgctattcacaaacatctccaggaagaagactgaaaatctctcacagagattttctctgtgaaatctctttctgttttcctgggagtcccactgtttttccataggctaactctggaaggagctggctgaagtaaatgaggaaaactctgtg

SEQ ID NO: 21493 - DNA, 549 bp, Homo sapiens
  misc_feature 1..549: note = ENST00000555193
  source 1..549: mol_type = unassigned DNA; mol_type = unassigned DNA
atttctgcgagagcggctccggagcggcggtcggggagggagagggttgccagcgcttcctggaagtcctgaagctctcgcagtgcagtgagttcatgcaccttcttgccaagcctcagtctttgggatctggggaggccgcctggttttcctccctccttctgcacgtctgctggggtctcttcctctccaggccttgccgtccccctggcctctcttcccagctcacacatgaagatgcacttgcaaagggctctggtggtcctggccctgctgaactttgccacggtcagcctctctctgtccacttgcaccaccttggacttcggccacatcaagaagaagagggtggaagccattaggggacagatcttgagcaagctcaggctcaccagcccccctgagccaacggtgatgacccacgtcccctatcaggtcctggccctttacaacagcacccgggagctgctggaggagatgcatggggagagggaggaaggctgcacccaggaaaacaccgagtcggaatactatgccaaagaaatccat

SEQ ID NO: 21494 - DNA, 716 bp, Homo sapiens
  misc_feature 1..716: note = ENST00000556674
  source 1..716: mol_type = unassigned DNA; mol_type = unassigned DNA
ctagaggttcgggccgagaagaggagcgaaagcacagagccgacttcccctcacccatctgggaaatgggctcgggccaactgctgacttcgcgctcgctggcgcagctccctgcggagacctcggcggggagggaggctgaacatctggatgacatttctgcgagagcggctccggagcggcggtcggggagggagagagaagcaggggacagaagcaatggccgaggcagaagacaagccgaggtgctggtgaccctgggcgtctgagtggatgattggggctgctgcgctcagaggcctgcctccctgccttccaatgcatataaccccacaccccagccaatgaagacgagaggcagcgtgaacaaagtcatttagaaagcccccgaggaagtgtaaacaaaagagaaagcatgaatggagtgcctgagagacaagtgtgtcctgtactgcccccacctttagctgggccagcaactgcccggccctgcttctccccacctactcactggtgatctttttttttttacttttttttcccttttcttttccattctcttttcttattttctttcaaggcaaggcaaggattttgattttgggacccagccatggtccttctgcttcttctttaaaatacccactttctccccatcgccaagcggcgtttggcaatatcagatatccactctatttatttttacctaaggaaaa

SEQ ID NO: 21495 - DNA, 2522 bp, Homo sapiens
  misc_feature 1..2522: note = ENST00000238682
  source 1..2522: mol_type = unassigned DNA; mol_type = unassigned DNA
tgcttgccctccacctggcctgctgggagtcagagcccagcaaaacctgtttagacacatggacaagaatcccagcgctacaaggcacacagtccgcttcttcgtcctcagggttgccagcgcttcctggaagtcctgaagctctcgcagtgcagtgagttcatgcaccttcttgccaagcctcagtctttgggatctggggaggccgcctggttttcctccctccttctgcacgtctgctggggtctcttcctctccaggccttgccgtccccctggcctctcttcccagctcacacatgaagatgcacttgcaaagggctctggtggtcctggccctgctgaactttgccacggtcagcctctctctgtccacttgcaccaccttggacttcggccacatcaagaagaagagggtggaagccattaggggacagatcttgagcaagctcaggctcaccagcccccctgagccaacggtgatgacccacgtcccctatcaggtcctggccctttacaacagcacccgggagctgctggaggagatgcatggggagagggaggaaggctgcacccaggaaaacaccgagtcggaatactatgccaaagaaatccataaattcgacatgatccaggggctggcggagcacaacgaactggctgtctgccctaaaggaattacctccaaggttttccgcttcaatgtgtcctcagtggagaaaaatagaaccaacctattccgagcagaattccgggtcttgcgggtgcccaaccccagctctaagcggaatgagcagaggatcgagctcttccagatccttcggccagatgagcacattgccaaacagcgctatatcggtggcaagaatctgcccacacggggcactgccgagtggctgtcctttgatgtcactgacactgtgcgtgagtggctgttgagaagagagtccaacttaggtctagaaatcagcattcactgtccatgtcacacctttcagcccaatggagatatcctggaaaacattcacgaggtgatggaaatcaaattcaaaggcgtggacaatgaggatgaccatggccgtggagatctggggcgcctcaagaagcagaaggatcaccacaaccctcatctaatcctcatgatgattcccccacaccggctcgacaacccgggccaggggggtcagaggaagaagcgggctttggacaccaattactgcttccgcaacttggaggagaactgctgtgtgcgccccctctacattgacttccgacaggatctgggctggaagtgggtccatgaacctaagggctactatgccaacttctgctcaggcccttgcccatacctccgcagtgcagacacaacccacagcacggtgctgggactgtacaacactctgaaccctgaagcatctgcctcgccttgctgcgtgccccaggacctggagcccctgaccatcctgtactatgttgggaggacccccaaagtggagcagctctccaacatggtggtgaagtcttgtaaatgtagctgagaccccacgtgcgacagagagaggggagagagaaccaccactgcctgactgcccgctcctcgggaaacacacaagcaacaaacctcactgagaggcctggagcccacaaccttcggctccgggcaaatggctgagatggaggtttccttttggaacatttctttcttgctggctctgagaatcacggtggtaaagaaagtgtgggtttggttagaggaaggctgaactcttcagaacacacagactttctgtgacgcagacagaggggatggggatagaggaaagggatggtaagttgagatgttgtgtggcaatgggatttgggctaccctaaagggagaaggaagggcagagaatggctgggtcagggccagactggaagacacttcagatctgaggttggatttgctcattgctgtaccacatctgctctagggaatctggattatgttatacaaggcaagcattttttttttttttttaaagacaggttacgaagacaaagtcccagaattgtatctcatactgtctgggattaagggcaaatctattacttttgcaaactgtcctctacatcaattaacatcgtgggtcactacagggagaaaatccaggtcatgcagttcctggcccatcaactgtattgggccttttggatatgctgaacgcagaagaaagggtggaaatcaaccctctcctgtctgccctctgggtccctcctctcacctctccctcgatcatatttccccttggacacttggttagacgccttccaggtcaggatgcacatttctggattgtggttccatgcagccttggggcattatgggttcttcccccacttcccctccaagaccctgtgttcatttggtgttcctggaagcaggtgctacaacatgtgaggcattcggggaagctgcacatgtgccacacagtgacttggccccagacgcatagactgaggtataaagacaagtatgaatat

SEQ ID NO: 21496 - DNA, 2708 bp, Homo sapiens
  misc_feature 1..2708: note = ENST00000554980
  source 1..2708: mol_type = unassigned DNA; mol_type = unassigned DNA
catgtgatcccacaactactaggcgaatgggctggagttgcccttcacgcaccagaatgtcaggcaccaaaccctggcacctccaggcttcatcatgctcactgtctccgtgctcaagtcatctggaccctcagccatagttctctatcatctcctctgtgctgttttctaagttcacaactgtcttcccaagctgttcatcttggtgagcaatccacattccaacttcccatcatggtgaacaaggattcccaaagaagaaatgtccaagtaatttttacctcgttgtgtccttgttccttaggaaaaatatggcccagtgtaaccgtgatcttcatcttatctcttctagaatctgccactttgtctaggcccacagtcatggccctggtagaaatgcttgcatcttccactgagacggattctgcttcctgtttgcaagtgaccttgcctctagcattggttcctgacttgaatctttttgccagcattacatcctgtggctttttgaatttgtggccttttgaatcacagtctctgtgctcggagactctttagttactccctgtccgtagtctcttccagtccctctgcctcttgccctgatccttctgcagtagattggctcaacgatcccctctcccaaaaaccatgtagatggcatgagtttttgctttccttactgtatctgtgtacttttgcctccaagtaggtaggtgacaattttctcttaataccatcctttcaaagggaatgattattccacttctgtttcatgatggccactagtgtatgcccccatttggtgattcataatacaacaggaatacctggaatgtggcaacgtgcgcttgaaggtccactctgagctctggaggcactttctgtctcctgtgaccctcaatagaactcagttcctatgagtccctataggagcagaggccctggctcacccttgcatgggtggtgggcacacttccccatcacacagaggtgcttttctcactaattctgtcttattttgcagagtccaacttaggtctagaaatcagcattcactgtccatgtcacacctttcagcccaatggagatatcctggaaaacattcacgaggtgatggaaatcaaattcaaaggcgtggacaatgaggatgaccatggccgtggagatctggggcgcctcaagaagcagaaggatcaccacaaccctcatctaatcctcatgatgattcccccacaccggctcgacaacccgggccaggggggtcagaggaagaagcgggctttggacaccaattactgcttccgcaacttggaggagaactgctgtgtgcgccccctctacattgacttccgacaggatctgggctggaagtgggtccatgaacctaagggctactatgccaacttctgctcaggcccttgcccatacctccgcagtgcagacacaacccacagcacggtgctgggactgtacaacactctgaaccctgaagcatctgcctcgccttgctgcgtgccccaggacctggagcccctgaccatcctgtactatgttgggaggacccccaaagtggagcagctctccaacatggtggtgaagtcttgtaaatgtagctgagaccccacgtgcgacagagagaggggagagagaaccaccactgcctgactgcccgctcctcgggaaacacacaagcaacaaacctcactgagaggcctggagcccacaaccttcggctccgggcaaatggctgagatggaggtttccttttggaacatttctttcttgctggctctgagaatcacggtggtaaagaaagtgtgggtttggttagaggaaggctgaactcttcagaacacacagactttctgtgacgcagacagaggggatggggatagaggaaagggatggtaagttgagatgttgtgtggcaatgggatttgggctaccctaaagggagaaggaagggcagagaatggctgggtcagggccagactggaagacacttcagatctgaggttggatttgctcattgctgtaccacatctgctctagggaatctggattatgttatacaaggcaagcattttttttttttttttaaagacaggttacgaagacaaagtcccagaattgtatctcatactgtctgggattaagggcaaatctattacttttgcaaactgtcctctacatcaattaacatcgtgggtcactacagggagaaaatccaggtcatgcagttcctggcccatcaactgtattgggccttttggatatgctgaacgcagaagaaagggtggaaatcaaccctctcctgtctgccctctgggtccctcctctcacctctccctcgatcatatttccccttggacacttggttagacgccttccaggtcaggatgcacatttctggattgtggttccatgcagccttggggcattatgggttcttcccccacttcccctccaagaccctgtgttcatttggtgttcctggaagcaggtgctacaacatgtgaggcattcggggaagctgcacatgtgccacacagtgacttggccccagacgcatagactgaggtataaagacaagtatgaatattactctcaaaatctttgtataaataaatatttttggggcatcctggatgatttcatcttctggaatattgtttctagaacagtaaaagccttattctaaggtg

SEQ ID NO: 21497 - DNA, 4621 bp, Homo sapiens
  misc_feature 1..4621: note = ENST00000295754
  source 1..4621: mol_type = unassigned DNA; mol_type = unassigned DNA
ggagagggagaaggctctcgggcggagagaggtcctgcccagctgttggcgaggagtttcctgtttcccccgcagcgctgagttgaagttgagtgagtcactcgcgcgcacggagcgacgacacccccgcgcgtgcacccgctcgggacaggagccggactcctgtgcagcttccctcggccgccgggggcctccccgcgcctcgccggcctccaggccccctcctggctggcgagcgggcgccacatctggcccgcacatctgcgctgccggcccggcgcggggtccggagagggcgcggcgcggaggcgcagccaggggtccgggaaggcgccgtccgctgcgctgggggctcggtctatgacgagcagcggggtctgccatgggtcgggggctgctcaggggcctgtggccgctgcacatcgtcctgtggacgcgtatcgccagcacgatcccaccgcacgttcagaagtcggttaataacgacatgatagtcactgacaacaacggtgcagtcaagtttccacaactgtgtaaattttgtgatgtgagattttccacctgtgacaaccagaaatcctgcatgagcaactgcagcatcacctccatctgtgagaagccacaggaagtctgtgtggctgtatggagaaagaatgacgagaacataacactagagacagtttgccatgaccccaagctcccctaccatgactttattctggaagatgctgcttctccaaagtgcattatgaaggaaaaaaaaaagcctggtgagactttcttcatgtgttcctgtagctctgatgagtgcaatgacaacatcatcttctcagaagaatataacaccagcaatcctgacttgttgctagtcatatttcaagtgacaggcatcagcctcctgccaccactgggagttgccatatctgtcatcatcatcttctactgctaccgcgttaaccggcagcagaagctgagttcaacctgggaaaccggcaagacgcggaagctcatggagttcagcgagcactgtgccatcatcctggaagatgaccgctctgacatcagctccacgtgtgccaacaacatcaaccacaacacagagctgctgcccattgagctggacaccctggtggggaaaggtcgctttgctgaggtctataaggccaagctgaagcagaacacttcagagcagtttgagacagtggcagtcaagatctttccctatgaggagtatgcctcttggaagacagagaaggacatcttctcagacatcaatctgaagcatgagaacatactccagttcctgacggctgaggagcggaagacggagttggggaaacaatactggctgatcaccgccttccacgccaagggcaacctacaggagtacctgacgcggcatgtcatcagctgggaggacctgcgcaagctgggcagctccctcgcccgggggattgctcacctccacagtgatcacactccatgtgggaggcccaagatgcccatcgtgcacagggacctcaagagctccaatatcctcgtgaagaacgacctaacctgctgcctgtgtgactttgggctttccctgcgtctggaccctactctgtctgtggatgacctggctaacagtgggcaggtgggaactgcaagatacatggctccagaagtcctagaatccaggatgaatttggagaatgttgagtccttcaagcagaccgatgtctactccatggctctggtgctctgggaaatgacatctcgctgtaatgcagtgggagaagtaaaagattatgagcctccatttggttccaaggtgcgggagcacccctgtgtcgaaagcatgaaggacaacgtgttgagagatcgagggcgaccagaaattcccagcttctggctcaaccaccagggcatccagatggtgtgtgagacgttgactgagtgctgggaccacgacccagaggcccgtctcacagcccagtgtgtggcagaacgcttcagtgagctggagcatctggacaggctctcggggaggagctgctcggaggagaagattcctgaagacggctccctaaacactaccaaatagctcttctggggcaggctgggccatgtccaaagaggctgcccctctcaccaaagaacagaggcagcaggaagctgcccctgaactgatgcttcctggaaaaccaagggggtcactcccctccctgtaagctgtggggataagcagaaacaacagcagcagggagtgggtgacatagagcattctatgcctttgacattgtcataggataagctgtgttagcacttcctcaggaaatgagattgatttttacaatagccaataacatttgcactttattaatgcctgtatataaatatgaatagctatgttttatatatatatatatatatctatatatgtctatagctctatatatatagccataccttgaaaagagacaaggaaaaacatcaaatattcccaggaaattggttttattggagaactccagaaccaagcagagaaggaagggacccatgacagcattagcatttgacaatcacacatgcagtggttctctgactgtaaaacagtgaactttgcatgaggaaagaggctccatgtctcacagccagctatgaccacattgcacttgcttttgcaaaataatcattccctgcctagcacttctcttctggccatggaactaagtacagtggcactgtttgaggaccagtgttcccggggttcctgtgtgcccttatttctcctggacttttcatttaagctccaagccccaaatctggggggctagtttagaaactctccctcaacctagtttagaaactctaccccatctttaataccttgaatgttttgaaccccactttttaccttcatgggttgcagaaaaatcagaacagatgtccccatccatgcgattgccccaccatctactaatgaaaaattgttctttttttcatctttcccctgcacttatgttactattctctgctcccagccttcatccttttctaaaaaggagcaaattctcactctaggctttatcgtgtttactttttcattacacttgacttgattttctagttttctatacaaacaccaatgggttccatctttctgggctcctgattgctcaagcacagtttggcctgatgaagaggatttcaactacacaatactatcattgtcaggactatgacctcaggcactctaaacatatgttttgtttggtcagcacagcgtttcaaaaagtgaagccactttataaatatttggagattttgcaggaaaatctggatccccaggtaaggatagcagatggttttcagttatctccagtccacgttcacaaaatgtgaaggtgtggagacacttacaaagctgcctcacttctcactgtaaacattagctctttccactgcctacctggaccccagtctaggaattaaatctgcacctaaccaaggtcccttgtaagaaatgtccattcaagcagtcattctctgggtatataatatgattttgactaccttatctggtgttaagatttgaagttggccttttattggactaaaggggaactcctttaagggtctcagttagcccaagtttcttttgcttatatgttaatagttttaccctctgcattggagagaggagtgctttactccaagaagctttcctcatggttaccgttctctccatcatgccagccttctcaacctttgcagaaattactagagaggatttgaatgtgggacacaaaggtcccatttgcagttagaaaatttgtgtccacaaggacaagaacaaagtatgagctttaaaactccataggaaacttgttaatcaacaaagaagtgttaatgctgcaagtaatctcttttttaaaactttttgaagctacttattttcagccaaataggaatattagagagggactggtagtgagaatatcagctctgtttggatggtggaaggtctcattttattgagatttttaagatacatgcaaaggtttggaaatagaacctctaggcaccctcctcagtgtgggtgggctgagagttaaagacagtgtggctgcagtagcatagaggcgcctagaaattccacttgcaccgtagggcatgctgataccatcccaatagctgttgcccattgacctctagtggtgagtttctagaatactggtccattcatgagatattcaagattcaagagtattctcacttctgggttatcagcataaactggaatgtagtgtcagaggatactgtggcttgttttgtttatgtttttttttcttattcaagaaaaaagaccaaggaataacattctgtagttcctaaaaatactgacttttttcactactatacataaagggaaagttttattcttttatggaacacttcagctgtactcatgtattaaaataggaatgtgaatgctatatactctttttatatcaaaagtctcaagcacttatttttattctatgcattgtttgtcttttacataaataaaatgtttattagattgaataaagcaaaatactcaggtgagcatcctgcctcctgttcccattcctag

SEQ ID NO: 21498 - DNA, 4605 bp, Homo sapiens
  misc_feature 1..4605: note = ENST00000359013
  source 1..4605: mol_type = unassigned DNA; mol_type = unassigned DNA
actcgcgcgcacggagcgacgacacccccgcgcgtgcacccgctcgggacaggagccggactcctgtgcagcttccctcggccgccgggggcctccccgcgcctcgccggcctccaggccccctcctggctggcgagcgggcgccacatctggcccgcacatctgcgctgccggcccggcgcggggtccggagagggcgcggcgcggaggcgcagccaggggtccgggaaggcgccgtccgctgcgctgggggctcggtctatgacgagcagcggggtctgccatgggtcgggggctgctcaggggcctgtggccgctgcacatcgtcctgtggacgcgtatcgccagcacgatcccaccgcacgttcagaagtcggatgtggaaatggaggcccagaaagatgaaatcatctgccccagctgtaataggactgcccatccactgagacatattaataacgacatgatagtcactgacaacaacggtgcagtcaagtttccacaactgtgtaaattttgtgatgtgagattttccacctgtgacaaccagaaatcctgcatgagcaactgcagcatcacctccatctgtgagaagccacaggaagtctgtgtggctgtatggagaaagaatgacgagaacataacactagagacagtttgccatgaccccaagctcccctaccatgactttattctggaagatgctgcttctccaaagtgcattatgaaggaaaaaaaaaagcctggtgagactttcttcatgtgttcctgtagctctgatgagtgcaatgacaacatcatcttctcagaagaatataacaccagcaatcctgacttgttgctagtcatatttcaagtgacaggcatcagcctcctgccaccactgggagttgccatatctgtcatcatcatcttctactgctaccgcgttaaccggcagcagaagctgagttcaacctgggaaaccggcaagacgcggaagctcatggagttcagcgagcactgtgccatcatcctggaagatgaccgctctgacatcagctccacgtgtgccaacaacatcaaccacaacacagagctgctgcccattgagctggacaccctggtggggaaaggtcgctttgctgaggtctataaggccaagctgaagcagaacacttcagagcagtttgagacagtggcagtcaagatctttccctatgaggagtatgcctcttggaagacagagaaggacatcttctcagacatcaatctgaagcatgagaacatactccagttcctgacggctgaggagcggaagacggagttggggaaacaatactggctgatcaccgccttccacgccaagggcaacctacaggagtacctgacgcggcatgtcatcagctgggaggacctgcgcaagctgggcagctccctcgcccgggggattgctcacctccacagtgatcacactccatgtgggaggcccaagatgcccatcgtgcacagggacctcaagagctccaatatcctcgtgaagaacgacctaacctgctgcctgtgtgactttgggctttccctgcgtctggaccctactctgtctgtggatgacctggctaacagtgggcaggtgggaactgcaagatacatggctccagaagtcctagaatccaggatgaatttggagaatgttgagtccttcaagcagaccgatgtctactccatggctctggtgctctgggaaatgacatctcgctgtaatgcagtgggagaagtaaaagattatgagcctccatttggttccaaggtgcgggagcacccctgtgtcgaaagcatgaaggacaacgtgttgagagatcgagggcgaccagaaattcccagcttctggctcaaccaccagggcatccagatggtgtgtgagacgttgactgagtgctgggaccacgacccagaggcccgtctcacagcccagtgtgtggcagaacgcttcagtgagctggagcatctggacaggctctcggggaggagctgctcggaggagaagattcctgaagacggctccctaaacactaccaaatagctcttctggggcaggctgggccatgtccaaagaggctgcccctctcaccaaagaacagaggcagcaggaagctgcccctgaactgatgcttcctggaaaaccaagggggtcactcccctccctgtaagctgtggggataagcagaaacaacagcagcagggagtgggtgacatagagcattctatgcctttgacattgtcataggataagctgtgttagcacttcctcaggaaatgagattgatttttacaatagccaataacatttgcactttattaatgcctgtatataaatatgaatagctatgttttatatatatatatatatatctatatatgtctatagctctatatatatagccataccttgaaaagagacaaggaaaaacatcaaatattcccaggaaattggttttattggagaactccagaaccaagcagagaaggaagggacccatgacagcattagcatttgacaatcacacatgcagtggttctctgactgtaaaacagtgaactttgcatgaggaaagaggctccatgtctcacagccagctatgaccacattgcacttgcttttgcaaaataatcattccctgcctagcacttctcttctggccatggaactaagtacagtggcactgtttgaggaccagtgttcccggggttcctgtgtgcccttatttctcctggacttttcatttaagctccaagccccaaatctggggggctagtttagaaactctccctcaacctagtttagaaactctaccccatctttaataccttgaatgttttgaaccccactttttaccttcatgggttgcagaaaaatcagaacagatgtccccatccatgcgattgccccaccatctactaatgaaaaattgttctttttttcatctttcccctgcacttatgttactattctctgctcccagccttcatccttttctaaaaaggagcaaattctcactctaggctttatcgtgtttactttttcattacacttgacttgattttctagttttctatacaaacaccaatgggttccatctttctgggctcctgattgctcaagcacagtttggcctgatgaagaggatttcaactacacaatactatcattgtcaggactatgacctcaggcactctaaacatatgttttgtttggtcagcacagcgtttcaaaaagtgaagccactttataaatatttggagattttgcaggaaaatctggatccccaggtaaggatagcagatggttttcagttatctccagtccacgttcacaaaatgtgaaggtgtggagacacttacaaagctgcctcacttctcactgtaaacattagctctttccactgcctacctggaccccagtctaggaattaaatctgcacctaaccaaggtcccttgtaagaaatgtccattcaagcagtcattctctgggtatataatatgattttgactaccttatctggtgttaagatttgaagttggccttttattggactaaaggggaactcctttaagggtctcagttagcccaagtttcttttgcttatatgttaatagttttaccctctgcattggagagaggagtgctttactccaagaagctttcctcatggttaccgttctctccatcatgccagccttctcaacctttgcagaaattactagagaggatttgaatgtgggacacaaaggtcccatttgcagttagaaaatttgtgtccacaaggacaagaacaaagtatgagctttaaaactccataggaaacttgttaatcaacaaagaagtgttaatgctgcaagtaatctcttttttaaaactttttgaagctacttattttcagccaaataggaatattagagagggactggtagtgagaatatcagctctgtttggatggtggaaggtctcattttattgagatttttaagatacatgcaaaggtttggaaatagaacctctaggcaccctcctcagtgtgggtgggctgagagttaaagacagtgtggctgcagtagcatagaggcgcctagaaattccacttgcaccgtagggcatgctgataccatcccaatagctgttgcccattgacctctagtggtgagtttctagaatactggtccattcatgagatattcaagattcaagagtattctcacttctgggttatcagcataaactggaatgtagtgtcagaggatactgtggcttgttttgtttatgtttttttttcttattcaagaaaaaagaccaaggaataacattctgtagttcctaaaaatactgacttttttcactactatacataaagggaaagttttattcttttatggaacacttcagctgtactcatgtattaaaataggaatgtgaatgctatatactctttttatatcaaaagtctcaagcacttatttttattctatgcattgtttgtcttttacataaataaaatgtttattagattgaataaagcaaaatactcaggtgagcatcctgcctcctgttcccattcctagtagctaaa

SEQ ID NO: 21499 - DNA, 1910 bp, Homo sapiens
  misc_feature 1..1910: note = ENST00000381178
  source 1..1910: mol_type = unassigned DNA; mol_type = unassigned DNA
cggacctccacactgagccatgcccacccccgacgccaccacgccacaggccaagggcttccgcagggccgtgtctgagctggacgccaagcaggcagaggccatcatggtaagagggcagggcgccccggggcccagcctcacaggctctccgtggcctggaactgcagccccagctgcatcctacacccccaccccaaggtccccgcggttcattgggcgcaggcagagcctcatcgaggacgcccgcaaggagcgggaggcggcggtggcagcagcggccgctgcagtcccctcggagcccggggaccccctggaggctgtggcctttgaggagaaggaggggaaggccgtgctaaacctgctcttctccccgagggccaccaagccctcggcgctgtcccgagctgtgaaggtgtttgagacgtttgaagccaaaatccaccatctagagacccggcccgcccagaggccgcgagctgggggcccccacctggagtacttcgtgcgcctcgaggtgcgccgaggggacctggccgccctgctcagtggtgtgcgccaggtgtcagaggacgtgcgcagccccgcggggcccaaggtcccctggttcccaagaaaagtgtcagagctggacaagtgtcatcacctggtcaccaagttcgaccctgacctggacttggaccacccgggcttctcggaccaggtgtaccgccagcgcaggaagctgattgctgagatcgccttccagtacaggcacggcgacccgattccccgtgtggagtacaccgccgaggagattgccacctggaaggaggtctacaccacgctgaagggcctctacgccacgcacgcctgcggggagcacctggaggcctttgctttgctggagcgcttcagcggctaccgggaagacaatatcccccagctggaggacgtctcccgcttcctgaaggagcgcacgggcttccagctgcggcctgtggccggcctgctgtccgcccgggacttcctggccagcctggccttccgcgtgttccagtgcacccagtatatccgccacgcgtcctcgcccatgcactcccctgagccggactgctgccacgagctgctggggcacgtgcccatgctggccgaccgcaccttcgcgcagttctcgcaggacattggcctggcgtccctgggggcctcggatgaggaaattgagaagctgtccacgctgtactggttcacggtggagttcgggctgtgtaagcagaacggggaggtgaaggcctatggtgccgggctgctgtcctcctacggggagctcctgcactgcctgtctgaggagcctgagattcgggccttcgaccctgaggctgcggccgtgcagccctaccaagaccagacgtaccagtcagtctacttcgtgtctgagagcttcagtgacgccaaggacaagctcaggagctatgcctcacgcatccagcgccccttctccgtgaagttcgacccgtacacgctggccatcgacgtgctggacagcccccaggccgtgcggcgctccctggagggtgtccaggatgagctggacacccttgcccatgcgctgagtgccattggctaggtgcacggcgtccctgagggcccttcccaacctcccctggtcctgcactgtcccggagctcaggccctggtgaggggctgggtcccgggtgccccccatgccctccctgctgccaggctcccactgcccctgcacctgcttctcagcgcaacagctgtgtgtgcccgtggtgaggttgtgctgcctgtggtgaggtcctgtcctggctcccagggtcctgggggctgctgcactgccctccgcccttccctgacactgtctgctgccccaatcaccgtcacaataaaagaaactgtggtctcta

SEQ ID NO: 21500 - DNA, 1898 bp, Homo sapiens
  misc_feature 1..1898: note = ENST00000381175
  source 1..1898: mol_type = unassigned DNA; mol_type = unassigned DNA
cggacctccacactgagccatgcccacccccgacgccaccacgccacaggccaagggcttccgcagggccgtgtctgagctggacgccaagcaggcagaggccatcatgggcgccccggggcccagcctcacaggctctccgtggcctggaactgcagccccagctgcatcctacacccccaccccaaggtccccgcggttcattgggcgcaggcagagcctcatcgaggacgcccgcaaggagcgggaggcggcggtggcagcagcggccgctgcagtcccctcggagcccggggaccccctggaggctgtggcctttgaggagaaggaggggaaggccgtgctaaacctgctcttctccccgagggccaccaagccctcggcgctgtcccgagctgtgaaggtgtttgagacgtttgaagccaaaatccaccatctagagacccggcccgcccagaggccgcgagctgggggcccccacctggagtacttcgtgcgcctcgaggtgcgccgaggggacctggccgccctgctcagtggtgtgcgccaggtgtcagaggacgtgcgcagccccgcggggcccaaggtcccctggttcccaagaaaagtgtcagagctggacaagtgtcatcacctggtcaccaagttcgaccctgacctggacttggaccacccgggcttctcggaccaggtgtaccgccagcgcaggaagctgattgctgagatcgccttccagtacaggcacggcgacccgattccccgtgtggagtacaccgccgaggagattgccacctggaaggaggtctacaccacgctgaagggcctctacgccacgcacgcctgcggggagcacctggaggcctttgctttgctggagcgcttcagcggctaccgggaagacaatatcccccagctggaggacgtctcccgcttcctgaaggagcgcacgggcttccagctgcggcctgtggccggcctgctgtccgcccgggacttcctggccagcctggccttccgcgtgttccagtgcacccagtatatccgccacgcgtcctcgcccatgcactcccctgagccggactgctgccacgagctgctggggcacgtgcccatgctggccgaccgcaccttcgcgcagttctcgcaggacattggcctggcgtccctgggggcctcggatgaggaaattgagaagctgtccacgctgtactggttcacggtggagttcgggctgtgtaagcagaacggggaggtgaaggcctatggtgccgggctgctgtcctcctacggggagctcctgcactgcctgtctgaggagcctgagattcgggccttcgaccctgaggctgcggccgtgcagccctaccaagaccagacgtaccagtcagtctacttcgtgtctgagagcttcagtgacgccaaggacaagctcaggagctatgcctcacgcatccagcgccccttctccgtgaagttcgacccgtacacgctggccatcgacgtgctggacagcccccaggccgtgcggcgctccctggagggtgtccaggatgagctggacacccttgcccatgcgctgagtgccattggctaggtgcacggcgtccctgagggcccttcccaacctcccctggtcctgcactgtcccggagctcaggccctggtgaggggctgggtcccgggtgccccccatgccctccctgctgccaggctcccactgcccctgcacctgcttctcagcgcaacagctgtgtgtgcccgtggtgaggttgtgctgcctgtggtgaggtcctgtcctggctcccagggtcctgggggctgctgcactgccctccgcccttccctgacactgtctgctgccccaatcaccgtcacaataaaagaaactgtggtctcta

SEQ ID NO: 21501 - DNA, 1889 bp, Homo sapiens
  misc_feature 1..1889: note = ENST00000352909
  source 1..1889: mol_type = unassigned DNA; mol_type = unassigned DNA
ggacccagagggggctttgacgtcagctcagcttataagaggctgctgggccagggctgtggagacggagcccggacctccacactgagccatgcccacccccgacgccaccacgccacaggccaagggcttccgcagggccgtgtctgagctggacgccaagcaggcagaggccatcatgtccccgcggttcattgggcgcaggcagagcctcatcgaggacgcccgcaaggagcgggaggcggcggtggcagcagcggccgctgcagtcccctcggagcccggggaccccctggaggctgtggcctttgaggagaaggaggggaaggccgtgctaaacctgctcttctccccgagggccaccaagccctcggcgctgtcccgagctgtgaaggtgtttgagacgtttgaagccaaaatccaccatctagagacccggcccgcccagaggccgcgagctgggggcccccacctggagtacttcgtgcgcctcgaggtgcgccgaggggacctggccgccctgctcagtggtgtgcgccaggtgtcagaggacgtgcgcagccccgcggggcccaaggtcccctggttcccaagaaaagtgtcagagctggacaagtgtcatcacctggtcaccaagttcgaccctgacctggacttggaccacccgggcttctcggaccaggtgtaccgccagcgcaggaagctgattgctgagatcgccttccagtacaggcacggcgacccgattccccgtgtggagtacaccgccgaggagattgccacctggaaggaggtctacaccacgctgaagggcctctacgccacgcacgcctgcggggagcacctggaggcctttgctttgctggagcgcttcagcggctaccgggaagacaatatcccccagctggaggacgtctcccgcttcctgaaggagcgcacgggcttccagctgcggcctgtggccggcctgctgtccgcccgggacttcctggccagcctggccttccgcgtgttccagtgcacccagtatatccgccacgcgtcctcgcccatgcactcccctgagccggactgctgccacgagctgctggggcacgtgcccatgctggccgaccgcaccttcgcgcagttctcgcaggacattggcctggcgtccctgggggcctcggatgaggaaattgagaagctgtccacgctgtactggttcacggtggagttcgggctgtgtaagcagaacggggaggtgaaggcctatggtgccgggctgctgtcctcctacggggagctcctgcactgcctgtctgaggagcctgagattcgggccttcgaccctgaggctgcggccgtgcagccctaccaagaccagacgtaccagtcagtctacttcgtgtctgagagcttcagtgacgccaaggacaagctcaggagctatgcctcacgcatccagcgccccttctccgtgaagttcgacccgtacacgctggccatcgacgtgctggacagcccccaggccgtgcggcgctccctggagggtgtccaggatgagctggacacccttgcccatgcgctgagtgccattggctaggtgcacggcgtccctgagggcccttcccaacctcccctggtcctgcactgtcccggagctcaggccctggtgaggggctgggtcccgggtgccccccatgccctccctgctgccaggctcccactgcccctgcacctgcttctcagcgcaacagctgtgtgtgcccgtggtgaggttgtgctgcctgtggtgaggtcctgtcctggctcccagggtcctgggggctgctgcactgccctccgcccttccctgacactgtctgctgccccaatcaccgtcacaataaaagaaactgtggtctcta

SEQ ID NO: 21502 - DNA, 1115 bp, Homo sapiens
  misc_feature 1..1115: note = ENST00000324155
  source 1..1115: mol_type = unassigned DNA; mol_type = unassigned DNA
cggacctccacactgagccatgcccacccccgacgccaccacgccacaggccaagggcttccgcagggccgtgtctgagctggacgccaagcaggcagaggccatcatgggccaccaagccctcggcgctgtcccgagctgtgaaggtgtttgagacgtttgaagccaaaatccaccatctagagacccggcccgcccagaggccgcgagctgggggcccccacctggagtacttcgtgcgcctcgaggtgcgccgaggggacctggccgccctgctcagtggtgtgcgccaggtgtcagaggacgtgcgcagccccgcggggcccaaggtcccctggttcccaagaaaagtgtcagagctggacaagtgtcatcacctggtcaccaagttcgaccctgacctggacttggaccacccgggcttctcggaccaggtgtaccgccagcgcaggaagctgattgctgagatcgccttccagtacaggcacggcgacccgattccccgtgtggagtacaccgccgaggagattgccacctggaaggaggtctacaccacgctgaagggcctctacgccacgcacgcctgcggggagcacctggaggcctttgctttgctggagcgcttcagcggctaccgggaagacaatatcccccagctggaggacgtctcccgcttcctgaaggagcgcacgggcttccagctgcggcctgtggccggcctgctgtccgcccgggacttcctggccagcctggccttccgcgtgttccagtgcacccagtatatccgccacgcgtcctcgcccatgcactcccctgagccggactgctgccacgagctgctggggcacgtgcccatgctggccgaccgcaccttcgcgcagttctcgcaggacattggcctggcgtccctgggggcctcggatgaggaaattgagaagctgtccacgctgtactggttcacggtggagttcgggctgtgtaagcagaacggggaggtgaaggcctatggtgccgggctgctgtcctcctacggggagctcctgcactgcctgtctgaggagcctgagattcgggccttcgaccctgaggctgcggccgtgcagccctaccaagac

SEQ ID NO: 21503 - DNA, 745 bp, Homo sapiens
  misc_feature 1..745: note = ENST00000479437
  source 1..745: mol_type = unassigned DNA; mol_type = unassigned DNA
aagaggctacccatcctgtcgggccatccccagtgtgctgagggaccgcccctcatggccccctatcccctgggattccctaaagccaccagcaaaagcccctcccgggggcctgggtcttcaggggtccccaagaggcctgcgttggtaggggctcaggcaggcagaggcacccacagttcaggaggggggtttcgggcactggggtggggcattagagggccctgagcctggctgcccgcaggaaggaggtctacaccacgctgaagggcctctacgccacgcacgcctgcggggagcacctggaggcctttgctttgctggagcgcttcagcggctaccgggaagacaatatcccccagctggaggacgtctcccgcttcctgaaggagcgcacgggcttccagctgcggcctgtggccggcctgctgtccgcccgggacttcctggccagcctggccttccgcgtgttccagtgcacccagtatatccgccacgcgtcctcgcccatgcactcccctgagccggactgctgccacgagctgctggggcacgtgcccatgctggccgaccgcaccttcgcgcagttctcgcaggacattggcctggcgtccctgggggcctcggatgaggaaattgagaagctgtccacgctgtactggttcacggtggagttcgggctgtgtaagcagaacggggaggtgaaggcctatggtgccgggctgctgtcctcctacggggagct

SEQ ID NO: 21504 - DNA, 483 bp, Homo sapiens
  misc_feature 1..483: note = ENST00000416223
  source 1..483: mol_type = unassigned DNA; mol_type = unassigned DNA
ggacttggaccacccgggcttctcggaccaggtgtaccgccagcgcaggaagctgattgctgagatcgccttccagtacaggcacggcgacccgattccccgtgtggagtacaccgccgaggagattgccacctgagcgcacgggcttccagctgcggcctgtggccggcctgctgtccgcccgggacttcctggccagcctggccttccgcgtgttccagtgcacccagtatatccgccacgcgtcctcgcccatgcactcccctgagccggactgctgccacgagctgctggggcacgtgcccatgctggccgaccgcaccttcgcgcagttctcgcaggacattggcctggcgtccctgggggcctcggatgaggaaattgagaagctgtccacgctgtactggttcacggtggagttcgggctgtgtaagcagaacggggaggtgaaggcctatggtgccgggctgctgtcctcctacg

SEQ ID NO: 21505 - DNA, 347 bp, Homo sapiens
  misc_feature 1..347: note = ENST00000412076
  source 1..347: mol_type = unassigned DNA; mol_type = unassigned DNA
ggacttggaccacccgggcttctcggaccaggtgtaccgccagcgcaggaagctgattgctgagatcgccttccagtacaggcacggcgacccgattccccgtgtggagtacaccgccgaggagattgccacctgggactgctgccacgagctgctggggcacgtgcccatgctggccgaccgcaccttcgcgcagttctcgcaggacattggcctggcgtccctgggggcctcggatgaggaaattgagaagctgtccacgctgtactggttcacggtggagttcgggctgtgtaagcagaacggggaggtgaaggcctatggtgccgggctgctgtcctcctacg

SEQ ID NO: 21506 - DNA, 839 bp, Homo sapiens
  misc_feature 1..839: note = ENST00000461172
  source 1..839: mol_type = unassigned DNA; mol_type = unassigned DNA
ttgcagagcgcacgggcttccagctgcggcctgtggccggcctgctgtccgcccgggacttcctggccagcctggccttccgcgtgttccagtgcacccagtatatccgccacgcgtcctcgcccatgcactcccctgagccggactgctgccacgagctgctggggcacgtgcccatgctggccgaccgcaccttcgcgcagttctcgcaggtacgccgcggcctcggagggagccggggtcacccaggggctggcttggcgccgggggcgggcggggatcgatgtgcgggtgggtgaagtgtgctgcctgctcccgggccccgccaaggaggctcggcgccccgagggtcgcgcggcatagggcggggctggagcggagcctcccacggcctgtgctgccacctgccggctacctgggaacggcgcccacgggcttaggaatgtggtcaaggagggctgcctggaggaggaggcccggtggaggtgcggatcctgggcggccagggaaggtctctgccgccagggaagtgtcccagagacccctggaggggctgctgacacccccggtgcccccacctcgagcatgacccagggctgcctctccccatccttcatcctccctgctccacaggacattggcctggcgtccctgggggcctcggatgaggaaattgagaagctgtccacggtgggttgacccctccctgcagggcctggggtgtgggtttgggggtctgaatccaggcctcaccctcttgccgtccaggctgaggcctctccttccacccacgaattgtgaccctcaccctggcctgcctgcatcctggcctggcctcc

SEQ ID NO: 21507 - DNA, 985 bp, Homo sapiens
  misc_feature 1..985: note = ENST00000381168
  source 1..985: mol_type = unassigned DNA; mol_type = unassigned DNA
cggacctccacactgagccatgcccacccccgacgccaccacgccacaggccaagggcttccgcagggccgtgtctgagctggacgccaagcaggcagaggccatcatggtaagagggcagggccaccaagccctcggcgctgtcccgagctgtgaaggtgtttgagacgtttgaagccaaaatccaccatctagagacccggcccgcccagaggccgcgagctgggggcccccacctggagtacttcgtgcgcctcgaggtgcgccgaggggacctggccgccctgctcagtggtgtgcgccaggtgtcagaggacgtgcgcagccccgcggggcccaaggtcccctggttcccaagaaaagtgtcagagctggacaagtgtcatcacctggtcaccaagttcgaccctgacctggacttggaccacccgggcttctcggaccaggtgtaccgccagcgcaggaagctgattgctgagatcgccttccagtacaggcagggacctgctgaccactggccccctccccagcggcgacccgattccccgtgtggagtacaccgccgaggagattgccacctggaaggaggtctacaccacgctgaagggcctctacgccacgcacgcctgcggggagcacctggaggcctttgctttgctggagcgcttcagcggctaccgggaagacaatatcccccagctggaggacgtctcccgcttcctgaaggagcgcacgggcttccagctgcggcctgtggccggcctgctgtccgcccgggacttcctggccagcctggccttccgcgtgttccagtgcacccagtatatccgccacgcgtcctcgcccatgcactcccctgagccggactgctgccacgagctgctggggcacgtgcccatgctggccgaccgcaccttcgcgcagttctcgcaggacattggcctggcgtccctgggggcctcggatgaggaaattgagaagctgt

SEQ ID NO: 21508 - DNA, 963 bp, Homo sapiens
  misc_feature 1..963: note = ENST00000469226
  source 1..963: mol_type = unassigned DNA; mol_type = unassigned DNA
cctctctctccatctctgtctctttctccttctctctctcttcctgcttttgctccctaagacgtttgaagccaaaatccaccatctagagacccggcccgcccagaggccgcgagctgggggcccccacctggagtacttcgtgcgcctcgaggtgcgccgaggggacctggccgccctgctcagtggtgtgcgccaggtgtcagaggacgtgcgcagccccgcggggcccaaggtcccctggttcccaagaaaagtgtcagagctggacaagtgtcatcacctggtcaccaagttcgaccctgacctggacttggaccacccgggcttctcggaccaggtgtaccgccagcgcaggaagctgattgctgagatcgccttccagtacaggcagtgaggggcccctgcgctcgggacccagactccgtcctgcaggctgacgctggacctggggggtgggagggaaggacaaaggggaggacccatcttgtcaccagcatcagtgcctcctgccaggcagctctgctccagggctttccatgtccccaaatcccagtggggaaactgaggcccaggggggctagagcaacctgccgaggccacatagccggctcacggcacagtcagctggggtgcaccctcctgtccatcctccaacccaaaggcctcgctgcactaggcgggtgtggacctgtgcccagtgaagctccctccctccctcctgcccttctcactccccgaggggacctgctgaccactggccccctccccagcggcgacccgattccccgtgtggagtacaccgccgaggagattgccacctggaaggaggtctacaccacgctgaagggcctctacgccacgcacgcctgcggggagcacctggaggcctttgctttgctggagcgcttcagcggctaccgggaagacaatatcccccagctggaggacgtctcccgcttc

SEQ ID NO: 21509 - DNA, 1535 bp, Homo sapiens
  misc_feature 1..1535: note = ENST00000333684
  source 1..1535: mol_type = unassigned DNA; mol_type = unassigned DNA
cggacctccacactgagccatgcccacccccgacgccaccacgccacaggccaagggcttccgcagggccgtgtctgagctggacgccaagcaggcagaggccatcatgtccccgcggttcattgggcgcaggcagagcctcatcgaggacgcccgcaaggagcgggaggcggcggtggcagcagcggccgctgcagtcccctcggagcccggggaccccctggaggctgtggcctttgaggagaaggaggggaaggccgtgctaaacctgctcttctccccgagggccaccaagccctcggcgctgtcccgagctgtgaaggtgtttgagacgtttgaagccaaaatccaccatctagagacccggcccgcccagaggccgcgagctgggggcccccacctggagtacttcgtgcgcctcgaggtgcgccgaggggacctggccgccctgctcagtggtgtgcgccaggtgtcagaggacgtgcgcagccccgcggggcccaaggtcccctggttcccaagaaaagtgtcagagctggacaagtgtcatcacctggtcaccaagttcgaccctgacctggacttggaccacccgggcttctcggaccaggtgtaccgccagcgcaggaagctgattgctgagatcgccttccagtacaggcacggcgacccgattccccgtgtggagtacaccgccgaggagattgccacctgggactgctgccacgagctgctggggcacgtgcccatgctggccgaccgcaccttcgcgcagttctcgcaggacattggcctggcgtccctgggggcctcggatgaggaaattgagaagctgtccacgctgtactggttcacggtggagttcgggctgtgtaagcagaacggggaggtgaaggcctatggtgccgggctgctgtcctcctacggggagctcctgcactgcctgtctgaggagcctgagattcgggccttcgaccctgaggctgcggccgtgcagccctaccaagaccagacgtaccagtcagtctacttcgtgtctgagagcttcagtgacgccaaggacaagctcaggagctatgcctcacgcatccagcgccccttctccgtgaagttcgacccgtacacgctggccatcgacgtgctggacagcccccaggccgtgcggcgctccctggagggtgtccaggatgagctggacacccttgcccatgcgctgagtgccattggctaggtgcacggcgtccctgagggcccttcccaacctcccctggtcctgcactgtcccggagctcaggccctggtgaggggctgggtcccgggtgccccccatgccctccctgctgccaggctcccactgcccctgcacctgcttctcagcgcaacagctgtgtgtgcccgtggtgaggttgtgctgcctgtggtgaggtcctgtcctggctcccagggtcctgggggctgctgcactgccctccgcccttccctgacactgtctgctgccccaatcaccgtcacaataaaagaaactgtggtctcta

SEQ ID NO: 21510 - DNA, 5811 bp, Homo sapiens
  misc_feature 1..5811: note = ENST00000366787
  source 1..5811: mol_type = unassigned DNA; mol_type = unassigned DNA
aggaggaggagacggcatccagtacagaggggctggacttggacccctgcagcagccctgcacaggagaagcggcatataaagccgcgctgcccgggagccgctcggccacgtccaccggagcatcctgcactgcagggccggtctctcgctccagcagagcctgcgcctttctgactcggtccggaacactgaaaccagtcatcactgcatctttttggcaaaccaggagctcagctgcaggaggcaggatggtctggaggctggtcctgctggctctgtgggtgtggcccagcacgcaagctggtcaccaggacaaagacacgaccttcgaccttttcagtatcagcaacatcaaccgcaagaccattggcgccaagcagttccgcgggcccgaccccggcgtgccggcttaccgcttcgtgcgctttgactacatcccaccggtgaacgcagatgacctcagcaagatcaccaagatcatgcggcagaaggagggcttcttcctcacggcccagctcaagcaggacggcaagtccaggggcacgctgttggctctggagggccccggtctctcccagaggcagttcgagatcgtctccaacggccccgcggacacgctggatctcacctactggattgacggcacccggcatgtggtctccctggaggacgtcggcctggctgactcgcagtggaagaacgtcaccgtgcaggtggctggcgagacctacagcttgcacgtgggctgcgacctcatagacagcttcgctctggacgagcccttctacgagcacctgcaggcggaaaagagccggatgtacgtggccaaaggctctgccagagagagtcacttcaggggtttgcttcagaacgtccacctagtgtttgaaaactctgtggaagatattctaagcaagaagggttgccagcaaggccagggagctgagatcaacgccatcagtgagaacacagagacgctgcgcctgggtccgcatgtcaccaccgagtacgtgggccccagctcggagaggaggcccgaggtgtgcgaacgctcgtgcgaggagctgggaaacatggtccaggagctctcggggctccacgtcctcgtgaaccagctcagcgagaacctcaagagagtgtcgaatgataaccagtttctctgggagctcattggtggccctcctaagacaaggaacatgtcagcttgctggcaggatggccggttctttgcggaaaatgaaacgtgggtggtggacagctgcaccacgtgtacctgcaagaaatttaaaaccatttgccaccaaatcacctgcccgcctgcaacctgcgccagtccatcctttgtggaaggcgaatgctgcccttcctgcctccactcggtggacggtgaggagggctggtctccgtgggcagagtggacccagtgctccgtgacgtgtggctctgggacccagcagagaggccggtcctgtgacgtcaccagcaacacctgcttggggccctccatccagacacgggcttgcagtctgagcaagtgtgacacccgcatccggcaggacggcggctggagccactggtcaccttggtcttcatgctctgtgacctgtggagttggcaatatcacacgcatccgtctctgcaactccccagtgccccagatggggggcaagaattgcaaagggagtggccgggagaccaaagcctgccagggcgccccatgcccaatcgatggccgctggagcccctggtccccgtggtcggcctgcactgtcacctgtgccggtgggatccgggagcgcacccgggtctgcaacagccctgagcctcagtacggagggaaggcctgcgtgggggatgtgcaggagcgtcagatgtgcaacaagaggagctgccccgtggatggctgtttatccaacccctgcttcccgggagcccagtgcagcagcttccccgatgggtcctggtcatgcggctcctgccctgtgggcttcttgggcaatggcacccactgtgaggacctggacgagtgtgccctggtccccgacatctgcttctccaccagcaaggtgcctcgctgtgtcaacactcagcctggcttccactgcctgccctgcccgccccgatacagagggaaccagcccgtcggggtcggcctggaagcagccaagacggaaaagcaagtgtgtgagcccgaaaacccatgcaaggacaagacacacaactgccacaagcacgcggagtgcatctacctgggccacttcagcgaccccatgtacaagtgcgagtgccagacaggctacgcgggcgacgggctcatctgcggggaggactcggacctggacggctggcccaacctcaatctggtctgcgccaccaacgccacctaccactgcatcaaggataactgcccccatctgccaaattctgggcaggaagactttgacaaggacgggattggcgatgcctgtgatgatgacgatgacaatgacggtgtgaccgatgagaaggacaactgccagctcctcttcaatccccgccaggctgactatgacaaggatgaggttggggaccgctgtgacaactgcccttacgtgcacaaccctgcccagatcgacacagacaacaatggagagggtgacgcctgctccgtggacattgatggggacgatgtcttcaatgaacgagacaattgtccctacgtctacaacactgaccagagggacacggatggtgacggtgtgggggatcactgtgacaactgccccctggtgcacaaccctgaccagaccgacgtggacaatgaccttgttggggaccagtgtgacaacaacgaggacatagatgacgacggccaccagaacaaccaggacaactgcccctacatctccaacgccaaccaggctgaccatgacagagacggccagggcgacgcctgtgaccctgatgatgacaacgatggcgtccccgatgacagggacaactgccggcttgtgttcaacccagaccaggaggacttggacggtgatggacggggtgatatttgtaaagatgattttgacaatgacaacatcccagatattgatgatgtgtgtcctgaaaacaatgccatcagtgagacagacttcaggaacttccagatggtccccttggatcccaaagggaccacccaaattgatcccaactgggtcattcgccatcaaggcaaggagctggttcagacagccaactcggaccccggcatcgctgtaggttttgacgagtttgggtctgtggacttcagtggcacattctacgtaaacactgaccgggacgacgactatgccggcttcgtctttggttaccagtcaagcagccgcttctatgtggtgatgtggaagcaggtgacgcagacctactgggaggaccagcccacgcgggcctatggctactccggcgtgtccctcaaggtggtgaactccaccacggggacgggcgagcacctgaggaacgcgctgtggcacacggggaacacgccggggcaggtgcgaaccttatggcacgaccccaggaacattggctggaaggactacacggcctataggtggcacctgactcacaggcccaagactggctacatcagagtcttagtgcatgaaggaaaacaggtcatggcagactcaggacctatctatgaccaaacctacgctggcgggcggctgggtctatttgtcttctctcaagaaatggtctatttctcagacctcaagtacgaatgcagagatatttaaacaagatttgctgcatttccggcaatgccctgtgcatgccatggtccctagacacctcagttcattgtggtccttgtggcttctctctctagcagcacctcctgtcccttgaccttaactctgatggttcttcacctcctgccagcaaccccaaacccaagtgccttcagaggataaatatcaatggaactcagagatgaacatctaacccactagaggaaaccagtttggtgatatatgagactttatgtggagtgaaaattgggcatgccattacattgctttttcttgtttgtttaaaaagaatgacgtttacatataaaatgtaattacttattgtatttatgtgtatatggagttgaagggaatactgtgcataagccattatgataaattaagcatgaaaaatattgctgaactacttttggtgcttaaagttgtcactattcttgaattagagttgctctacaatgacacacaaatcccattaaataaattataaacaagggtcaattcaaatttgaagtaatgttttagtaaggagagattagaagacaacaggcatagcaaatgacataagctaccgattaactaatcggaacatgtaaaacagttacaaaaataaacgaactctcctcttgtcctacaatgaaagccctcatgtgcagtagagatgcagtttcatcaaagaacaaacatccttgcaaatgggtgtgacgcggttccagatgtggatttggcaaaacctcatttaagtaaaaggttagcagagcaaagtgcggtgctttagctgctgcttgtgccgctgtggcgtcggggaggctcctgcctgagcttccttccccagctttgctgcctgagaggaaccagagcagacgcacaggccggaaaaggcgcatctaacgcgtatctaggctttggtaactgcggacaagttgcttttacctgatttgatgatacatttcattaaggttccagttataaatattttgttaatatttattaagtgactatagaatgcaactccatttaccagtaacttattttaaatatgcctagtaacacatatgtagtataatttctagaaacaaacatctaataagtatataatcctgtgaaaatatgaggcttgataatattaggttgtcacgatgaagcatgctagaagctgtaacagaatacatagagaataatgaggagtttatgatggaaccttaaatatataatgttgccagcgattttagttcaatatttgttactgttatctatctgctgtatatggaattcttttaattcaaacgctgaaaagaatcagcatttagtcttgccaggcacacccaataatcagtcatgtgtaatatgcacaagtttgtttttgtttttgttttttttgttggttggtttgtttttttgctttaagttgcatgatctttctgcaggaaatagtcactcatcccactccacataaggggtttagtaagagaagtctgtctgtctgatgatggatagggggcaaatctttttcccctttctgttaatagtcatcacatttctatgccaaacaggaacaatccataactttagtcttaatgtacacattgcattttgataaaattaattttgttgtttcctttgaggttgatcgttgtgttgttgttttgctgcactttttacttttttgcgtgtggagctgtattcccgagaccaacgaagcgttgggatacttcattaaatgtagcgactgtcaacagcgtgcaggttttctgtttctgtgttgtggggtcaaccgtacaatggtgtgggagtgacgatgatgtgagtatttagaatgtaccatattttttgtaaattatttatgtttttctaaacaaatttatcgtataggttgatgaaacgtcatgtgttttgccaaagactgtaaatatttatttatgtgttcacatggtcaaaatttcaccactgaaaccctgcacttagctagaacctcatttttaaagattaacaacaggaaataaattgtaaaaaaggttttctatacatga

SEQ ID NO: 21511 - DNA, 875 bp, Homo sapiens
  misc_feature 1..875: note = ENST00000488355
  source 1..875: mol_type = unassigned DNA; mol_type = unassigned DNA
gacaatgacaacatcccagatattgatgatgtgtgtcctgaaaacaatgccatcagtgagacagacttcaggaacttccagatggtccccttggatcccaaagggaccacccaaattgatcccaactgggtcattcgccatcaaggcaaggagctggttcagacagccaactcggaccccggcatcgctgtaggttttgacgagtttgggtctgtggacttcagtggcacattctacgtaaacactgaccgggacgacgactatgccggcttcgtctttggttaccagtcaagcagccgcttctatgtggtgatgtggaagcaggtgacgcagacctactgggaggaccagcccacgcgggcctatggctactccggcgtgtccctcaaggtggtgaactccaccacggggacgggcgagcacctgaggaacgcgctgtggcacacggggaacacgccggggcaggtgcgaaccttatggcacgaccccaggaacattggctggaaggactacacggcctataggtggcacctgactcacaggcccaagactggctacatcagagtcttagtgcatgaaggaaaacaggtcatggcagactcaggacctatctatgaccaaacctacgctggcgggcggctgggtctatttgtcttctctcaagaaatggtctatttctcagacctcaagtacgaatgcagagatgaacatctaacccactagaggaaaccagtttggtgatatatgagactttatgtggagtgaaaattgggcatgccattacattgctttttcttgtttgtttaaaaagaatgacgtttacatataaaatgtaattacttattgtatttatgtgtatatggagttgaagggaa

SEQ ID NO: 21512 - DNA, 641 bp, Homo sapiens
  misc_feature 1..641: note = ENST00000461848
  source 1..641: mol_type = unassigned DNA; mol_type = unassigned DNA
acaccgcttacaggcaaatacccctctaggcggcacagcctgatctctctccgcttcttgtgttagtccggcaggacggcggctggagccactggtcaccttggtcttcatgctctgtgacctgtggagttggcaatatcacacgcatccgtctctgcaactccccagtgccccagatggggggcaagaattgcaaagggagtggccgggagaccaaagcctgccagggcgccccatgcccaatcgatggccgctggagcccctggtccccgtggtcggcctgcactgtcacctgtgccggtgggatccgggagcgcacccgggtctgcaacagccctgagcctcagtacggagggaaggcctgcgtgggggatgtgcaggagcgtcagatgtgcaacaagaggagctgccccgtgggtgagtgaggggtagaagcgggggcactgaaacccgggcttccattctgatgaaaagcacaaacgctttgggaaactagatgaaaaacacagaaaagaaaaatcaattttagttgcacacgcaaagataactacttttaacatctgtgtttcagtcctcctgtatttctaatgtaaaaacaaaaaagatgccaggtggcgtggcctgtggaatgtgggtagttg

SEQ ID NO: 21513 - DNA, 481 bp, Homo sapiens
  misc_feature 1..481: note = ENST00000472733
  source 1..481: mol_type = unassigned DNA; mol_type = unassigned DNA
gtctccaacggccccgcggacacgctggatctcacctactggattgacggcacccggcatgtggtctccctggaggacgtcggcctggctgactcgcagtggaagaacgtcaccgtgcaggtggctggcgagacctacagcttgcacgtgggctgcgacctcatagacagcttcgctctggacgagcccttctacgagcacctgcaggcggaaaagagccggatgtacgtggccaaaggctctgccagagagagtcacttcaggggtttgcttcagaacgtccacctagtgtttgaaaactctgtggaagatattctaagcaagaagggttgccagcaaggccagggaggtaggtgtgttgtgaaaaatgcattttatatactggcttggatggatttctattgtgacatggtgtatgtgtgtgtgtgtatgtgtgtgcattcatgcttgtaaaaatttaagtaaaaatatttgggtaact

SEQ ID NO: 21514 - DNA, 437 bp, Homo sapiens
  misc_feature 1..437: note = ENST00000435791
  source 1..437: mol_type = unassigned DNA
acattctgctccggtaacccatgcctgtggctcgctgggctaagtcagcccctggtgaagtttcatttgccgaattcatctctcatgacaacccgatgaggtgggcattttacatgacgctacgtttcattctacggatgaggaaactgagacagagaagttaagagctcagctgcaggaggcaggatggtctggaggctggtcctgctggctctgtgggtgtggcccagcacgcaagctggtcaccaggacaaagacacgaccttcgaccttttcagtatcagcaacatcaaccgcaagaccattggcgccaagcagttccgcgggcccgaccccggcgtgccggcttaccgcttcgtgcgctttgactacatcccaccggtgaacgcagatgacctcagcaagatcaccaagatcatgcggcagaaggagggctt

SEQ ID NO: 21515 - DNA, 5280 bp, Homo sapiens
  misc_feature 1..5280: note = ENST00000617924
  source 1..5280: mol_type = unassigned DNA
gagcatcctgcactgcagggccggtctctcgctccagcagagcctgcgcctttctgactcggtccggaacactgaaaccagtcatcactgcatctttttggcaaaccaggagctcagctgcaggaggcaggatggtctggaggctggtcctgctggctctgtgggtgtggcccagcacgcaagctggtcaccaggacaaagacacgaccttcgaccttttcagtatcagcaacatcaaccgcaagaccattggcgccaagcagttccgcgggcccgaccccggcgtgccggcttaccgcttcgtgcgctttgactacatcccaccggtgaacgcagatgacctcagcaagatcaccaagatcatgcggcagaaggagggcttcttcctcacggcccagctcaagcaggacggcaagtccaggggcacgctgttggctctggagggccccggtctctcccagaggcagttcgagatcgtctccaacggccccgcggacacgctggatctcacctactggattgacggcacccggcatgtggtctccctggaggacgtcggcctggctgactcgcagtggaagaacgtcaccgtgcaggtggctggcgagacctacagcttgcacgtgggctgcgacctcatagacagcttcgctctggacgagcccttctacgagcacctgcaggcggaaaagagccggatgtacgtggccaaaggctctgccagagagagtcacttcaggggtttgcttcagaacgtccacctagtgtttgaaaactctgtggaagatattctaagcaagaagggttgccagcaaggccagggagctgagatcaacgccatcagtgagaacacagagacgctgcgcctgggtccgcatgtcaccaccgagtacgtgggccccagctcggagaggaggcccgaggtgtgcgaacgctcgtgcgaggagctgggaaacatggtccaggagctctcggggctccacgtcctcgtgaaccagctcagcgagaacctcaagagagtgtcgaatgataaccagtttctctgggagctcattggtggccctcctaagacaaggaacatgtcagcttgctggcaggatggccggttctttgcggaaaatgaaacgtgggtggtggacagctgcaccacgtgtacctgcaagaaatttaaaaccatttgccaccaaatcacctgcccgcctgcaacctgcgccagtccatcctttgtggaaggcgaatgctgcccttcctgcctccactcggtggacggtgaggagggctggtctccgtgggcagagtggacccagtgctccgtgacgtgtggctctgggacccagcagagaggccggtcctgtgacgtcaccagcaacacctgcttggggccctccatccagacacgggcttgcagtctgagcaagtgtgacacccgcatccggcaggacggcggctggagccactggtcaccttggtcttcatgctctgtgacctgtggagttggcaatatcacacgcatccgtctctgcaactccccagtgccccagatggggggcaagaattgcaaagggagtggccgggagaccaaagcctgccagggcgccccatgcccaatcgatggccgctggagcccctggtccccgtggtcggcctgcactgtcacctgtgccggtgggatccgggagcgcacccgggtctgcaacagccctgagcctcagtacggagggaaggcctgcgtgggggatgtgcaggagcgtcagatgtgcaacaagaggagctgccccgtggatggctgtttatccaacccctgcttcccgggagcccagtgcagcagcttccccgatgggtcctggtcatgcggctcctgccctgtgggcttcttgggcaatggcacccactgtgaggacctggacgagtgtgccctggtccccgacatctgcttctccaccagcaaggtgcctcgctgtgtcaacactcagcctggcttccactgcctgccctgcccgccccgatacagagggaaccagcccgtcggggtcggcctggaagcagccaagacggaaaagcaagtgtgtgagcccgaaaacccatgcaaggacaagacacacaactgccacaagcacgcggagtgcatctacctgggccacttcagcgaccccatgtacaagtgcgagtgccagacaggctacgcgggcgacgggctcatctgcggggaggactcggacctggacggctggcccaacctcaatctggtctgcgccaccaacgccacctaccactgcatcaaggataactgcccccatctgccaaattctgggcaggaagactttgacaaggacgggattggcgatgcctgtgatgatgacgatgacaatgacggtgtgaccgatgagaaggacaactgccagctcctcttcaatccccgccaggctgactatgacaaggatgaggttggggaccgctgtgacaactgcccttacgtgcacaaccctgcccagatcgacacagacaacaatggagagggtgacgcctgctccgtggacattgatggggacgatgtcttcaatgaacgagacaattgtccctacgtctacaacactgaccagagggacacggatggtgacggtgtgggggatcactgtgacaactgccccctggtgcacaaccctgaccagaccgacgtggacaatgaccttgttggggaccagtgtgacaacaacgaggacatagatgacgacggccaccagaacaaccaggacaactgcccctacatctccaacgccaaccaggctgaccatgacagagacggccagggcgacgcctgtgaccctgatgatgacaacgatggcgtccccgatgacagggacaactgccggcttgtgttcaacccagaccaggaggacttggacggtgatggacggggtgatatttgtaaagatgattttgacaatgacaacatcccagatattgatgatgtgtgtcctgaaaacaatgccatcagtgagacagacttcaggaacttccagatggtccccttggatcccaaagggaccacccaaattgatcccaactgggtcattcgccatcaaggcaaggagctggttcagacagccaactcggaccccggcatcgctgtaggttttgacgagtttgggtctgtggacttcagtggcacattctacgtaaacactgaccgggacgacgactatgccggcttcgtctttggttaccagtcaagcagccgcttctatgtggtgatgtggaagcaggtgacgcagacctactgggaggaccagcccacgcgggcctatggctactccggcgtgtccctcaaggtggtgaactccaccacggggacgggcgagcacctgaggaacgcgctgtggcacacggggaacacgccggggcaggtgcgaaccttatggcacgaccccaggaacattggctggaaggactacacggcctataggtggcacctgactcacaggcccaagactggctacatcagagtcttagtgcatgaaggaaaacaggtcatggcagactcaggacctatctatgaccaaacctacgctggcgggcggctgggtctatttgtcttctctcaagaaatggtctatttctcagacctcaagtacgaatgcagagatatttaaacaagatttgctgcatttccggcaatgccctgtgcatgccatggtccctagacacctcagttcattgtggtccttgtggcttctctctctagcagcacctcctgtcccttgaccttaactctgatggttcttcacctcctgccagcaaccccaaacccaagtgccttcagaggataaatatcaatggaactcagagatgaacatctaacccactagaggaaaccagtttggtgatatatgagactttatgtggagtgaaaattgggcatgccattacattgctttttcttgtttgtttaaaaagaatgacgtttacatataaaatgtaattacttattgtatttatgtgtatatggagttgaagggaatactgtgcataagccattatgataaattaagcatgaaaaatattgctgaactacttttggtgcttaaagttgtcactattcttgaattagagttgctctacaatgacacacaaatcccattaaataaattataaacaagggtcaattcaaatttgaagtaatgttttagtaaggagagattagaagacaacaggcatagcaaatgacataagctaccgattaactaatcggaacatgtaaaacagttacaaaaataaacgaactctcctcttgtcctacaatgaaagccctcatgtgcagtagagatgcagtttcatcaaagaacaaacatccttgcaaatgggtgtgacgcggttccagatgtggatttggcaaaacctcatttaagtaaaaggttagcagagcaaagtgcggtgctttagctgctgcttgtgccgctgtggcgtcggggaggctcctgcctgagcttccttccccagctttgctgcctgagaggaaccagagcagacgcacaggccggaaaaggcgcatctaacgcgtatctaggctttggtaactgcggacaagttgcttttacctgatttgatgatacatttcattaaggttccagttataaatattttgttaatatttattaagtgactatagaatgcaactccatttaccagtaacttattttaaatatgcctagtaacacatatgtagtataatttctagaaacaaacatctaataagtatataatcctgtgaaaatatgaggcttgataatattaggttgtcacgatgaagcatgctagaagctgtaacagaatacatagagaataatgaggagtttatgatggaaccttaaatatataatgttgccagcgattttagttcaatatttgttactgttatctatctgctgtatatggaattcttttaattcaaacgctgaaaagaatcagcatttagtcttgccaggcacacccaataatcagtcatgtgtaatatgcacaagtttgtttttgtttttgttttttttgttggttggtttgtttttttgctttaagttgcatgatctttctgcaggaaatagtcactcatcccactccacataaggggtttagtaagagaagtctgtctgtctgatgatggatagggggcaaatctttttcccctttctgttaatagtcatcacatttctatgccaaacaggaacaatccataactttagtcttaatgtacacattgcattttgataaaattaattttgttgtttc

SEQ ID NO: 21516 - DNA, 573 bp, Homo sapiens
  misc_feature 1..573: note = ENST00000513310
  source 1..573: mol_type = unassigned DNA
gtggctaagggagggaagggtaatttgggggctcttgagagatgagagaaacaacgactggagggattaagaagaactcttaggagcagcttggcctaaaggctgtgtgggacgtgcctgctttgccttcgccttccaccatgatctctttgaccttctcccatcttccagtcagaggctaaacccaggcgctctgctgccagtcctgacagaccccgccctgaatgatctctatgtgatttccaccttcaagctgcagactaaaagttcagccaccatcttcggtctttactcttcaactgacaacagtaaatattttgaatttactgtgatgggacgcttaaacaaagaaaagttaaaacaatgaagatgagcaggaagaaaaaaataccatccaaacacccagcaaataaccatactaatgtagacatattttcttctaatcttctagccatcctccgttacctgaagaacgatgggaaggtgcatttggtggttttcaacaacctgcagctggcagacggaaggcggcacaggatcctcctgaggctgagcaatttgcagcgaggggcc

SEQ ID NO: 21517 - DNA, 564 bp, Homo sapiens
  misc_feature 1..564: note = ENST00000510218
  source 1..564: mol_type = unassigned DNA
aatttgggggctcttgagagatgagagaaacaacgactggagggattaagaagaactcttaggagcagcttggcctaaaggctgtgtgggacgtgcctgctttgccttcgccttccaccatgatcgtaagttttctgagaccccctcagccatgtttcctgtagagcctgtggagtttctttgaccttctcccatcttccagtcagaggctaaacccaggcgctctgctgccagtcctgacagaccccgccctgaatgatctctatgtgatttccaccttcaagctgcagactaaaagttcagccaccatcttcggtctttactcttcaactgacaacagtaaatattttgaatttactgtgatgggacgcttaaacaaagccatcctccgttacctgaagaacgatgggaaggtgcatttggtggttttcaacaacctgcagctggcagacggaaggcggcacaggatcctcctgaggctgagcaatttgcagcgaggggccggctccctagagctctacctggactgcatccaggtggattccgttcacaatctccccaggg

SEQ ID NO: 21518 - DNA, 3222 bp, Homo sapiens
  misc_feature 1..3222: note = ENST00000350881
  source 1..3222: mol_type = unassigned DNA
agcagccagctccccagcaccgcacggcggggacgcgagcgcgcccccgacggcagcccggacgccgagcacgggtcacctgcggcgccggcccgggcgccgaccgaggttcaacgcacggcccggggacccccaggcggggccaacgccgccgtcgcccccggcctcgcggggagcaggaagagccaacatgctggccccgcgcggagccgccgtcctcctgctgcacctggtcctgcagcggtggctagcggcaggcgcccaggccaccccccaggtctttgaccttctcccatcttccagtcagaggctaaacccaggcgctctgctgccagtcctgacagaccccgccctgaatgatctctatgtgatttccaccttcaagctgcagactaaaagttcagccaccatcttcggtctttactcttcaactgacaacagtaaatattttgaatttactgtgatgggacgcttaaacaaagccatcctccgttacctgaagaacgatgggaaggtgcatttggtggttttcaacaacctgcagctggcagacggaaggcggcacaggatcctcctgaggctgagcaatttgcagcgaggggccggctccctagagctctacctggactgcatccaggtggattccgttcacaatctccccagggcctttgctggcccctcccagaaacctgagaccattgaattgaggactttccagaggaagccacaggacttcttggaagagctgaagctggtggtgagaggctcactgttccaggtggccagcctgcaagactgcttcctgcagcagagtgagccactggctgccacaggcacaggggactttaaccggcagttcttgggtcaaatgacacaattaaaccaactcctgggagaggtgaaggaccttctgagacagcaggttaaggaaacatcatttttgcgaaacaccatagctgaatgccaggcttgcggtcctctcaagtttcagtctccgaccccaagcacggtggtgcccccggctccccctgcaccgccaacacgcccacctcgtcggtgtgactccaacccatgtttccgaggtgtccaatgtaccgacagtagagatggcttccagtgtgggccctgccccgagggctacacaggaaacgggatcacctgtattgatgttgatgagtgcaaataccatccctgctacccgggcgtgcactgcataaatttgtctcctggcttcagatgtgacgcctgcccagtgggcttcacagggcccatggtgcagggtgttgggatcagttttgccaagtcaaacaagcaggtctgcactgacattgatgagtgtcgaaatggagcgtgcgttcccaactcgatctgcgttaatactttgggatcttaccgctgtgggccttgtaagccggggtatactggtgatcagataaggggatgcaaagcggaaagaaactgcagaaacccagagctgaacccttgcagtgtgaatgcccagtgcattgaagagaggcagggggatgtgacatgtgtgtgtggagtcggttgggctggagatggctatatctgtggaaaggatgtggacatcgacagttaccccgacgaagaactgccatgctctgccaggaactgtaaaaaggacaactgcaaatatgtgccaaattctggccaagaagatgcagacagagatggcattggcgacgcttgtgacgaggatgctgacggagatgggatcctgaatgagcaggataactgtgtcctgattcataatgtggaccaaaggaacagcgataaagatatctttggggatgcctgtgataactgcctgagtgtcttaaataacgaccagaaagacaccgatggggatggaagaggagatgcctgtgatgatgacatggatggagatggaataaaaaacattctggacaactgcccaaaatttcccaatcgtgaccaacgggacaaggatggtgatggtgtgggggatgcctgtgacagttgtcctgatgtcagcaaccctaaccagtctgatgtggataatgatctggttggggactcctgtgacaccaatcaggacagtgatggagatgggcaccaggacagcacagacaactgccccaccgtcattaacagtgcccagctggacaccgataaggatggaattggtgacgagtgtgatgatgatgatgacaatgatggtatcccagacctggtgccccctggaccagacaactgccggctggtccccaacccagcccaggaggatagcaacagcgacggagtgggagacatctgtgagtctgactttgaccaggaccaggtcatcgatcggatcgacgtctgcccagagaacgcagaggtcaccctgaccgacttcagggcttaccagaccgtggtcctggatcctgaaggggatgcccagatcgatcccaactgggtggtcctgaaccagggcatggagattgtacagaccatgaacagtgatcctggcctggcagtggggtacacagcttttaatggagttgacttcgaagggaccttccatgtgaatacccagacagatgatgactatgcaggctttatctttggctaccaagatagctccagcttctacgtggtcatgtggaagcagacggagcagacatattggcaagccaccccattccgagcagttgcagaacctggcattcagctcaaggctgtgaagtctaagacaggtccaggggagcatctccggaactccctgtggcacacgggggacaccagtgaccaggtcaggctgctgtggaaggactccaggaatgtgggctggaaggacaaggtgtcctaccgctggttcctacagcacaggccccaggtgggctacatcagggtacgattttatgaaggctctgagttggtggctgactctggcgtcaccatagacaccacaatgcgtggaggccgacttggcgttttctgcttctctcaagaaaacatcatctggtccaacctcaagtatcgctgcaatgacaccatccctgaggacttccaagagtttcaaacccagaatttcgaccgcttcgataattaaaccaaggaagcaatctgtaactgcttttcggaacactaaaaccatatatattttaacttcaattttctttagcttttaccaacccaaatatatcaaaacgttttatgtgaatgtggcaataaaggagaagagatcatttttaaaaa

SEQ ID NO: 21519 - DNA, 3094 bp, Homo sapiens
  misc_feature 1..3094: note = ENST00000511733
  source 1..3094: mol_type = unassigned DNA
ggagcgatgtatgcccagagtctgctcttgacatccctgagaaagacgcagaattactctacttgccctgccacctgcattttctgctctgactttgcttgaacgacaaaaagaaagtttatttcaaggattggcttgatgtcttaatttctgagtctttgaccttctcccatcttccagtcagaggctaaacccaggcgctctgctgccagtcctgacagaccccgccctgaatgatctctatgtgatttccaccttcaagctgcagactaaaagttcagccaccatcttcggtctttactcttcaactgacaacagtaaatattttgaatttactgtgatgggacgcttaaacaaagccatcctccgttacctgaagaacgatgggaaggtgcatttggtggttttcaacaacctgcagctggcagacggaaggcggcacaggatcctcctgaggctgagcaatttgcagcgaggggccggctccctagagctctacctggactgcatccaggtggattccgttcacaatctccccagggcctttgctggcccctcccagaaacctgagaccattgaattgaggactttccagaggaagccacaggacttcttggaagagctgaagctggtggtgagaggctcactgttccaggtggccagcctgcaagactgcttcctgcagcagagtgagccactggctgccacaggcacaggggactttaaccggcagttcttgggtcaaatgacacaattaaaccaactcctgggagaggtgaaggaccttctgagacagcaggttaaggaaacatcatttttgcgaaacaccatagctgaatgccaggcttgcggtcctctcaagtttcagtctccgaccccaagcacggtggtgcccccggctccccctgcaccgccaacacgcccacctcgtcggtgtgactccaacccatgtttccgaggtgtccaatgtaccgacagtagagatggcttccagtgtgggccctgccccgagggctacacaggaaacgggatcacctgtattgatgttgatgagtgcaaataccatccctgctacccgggcgtgcactgcataaatttgtctcctggcttcagatgtgacgcctgcccagtgggcttcacagggcccatggtgcagggtgttgggatcagttttgccaagtcaaacaagcaggtctgcactgacattgatgagtgtcgaaatggagcgtgcgttcccaactcgatctgcgttaatactttgggatcttaccgctgtgggccttgtaagccggggtatactggtgatcagataaggggatgcaaagcggaaagaaactgcagaaacccagagctgaacccttgcagtgtgaatgcccagtgcattgaagagaggcagggggatgtgacatgtgtgtgtggagtcggttgggctggagatggctatatctgtggaaaggatgtggacatcgacagttaccccgacgaagaactgccatgctctgccaggaactgtaaaaaggacaactgcaaatatgtgccaaattctggccaagaagatgcagacagagatggcattggcgacgcttgtgacgaggatgctgacggagatgggatcctgaatgagcaggataactgtgtcctgattcataatgtggaccaaaggaacagcgataaagatatctttggggatgcctgtgataactgcctgagtgtcttaaataacgaccagaaagacaccgatggggatggaagaggagatgcctgtgatgatgacatggatggagatggaataaaaaacattctggacaactgcccaaaatttcccaatcgtgaccaacgggacaaggatggtgatggtgtgggggatgcctgtgacagttgtcctgatgtcagcaaccctaaccagtctgatgtggataatgatctggttggggactcctgtgacaccaatcaggacagtgatggagatgggcaccaggacagcacagacaactgccccaccgtcattaacagtgcccagctggacaccgataaggatggaattggtgacgagtgtgatgatgatgatgacaatgatggtatcccagacctggtgccccctggaccagacaactgccggctggtccccaacccagcccaggaggatagcaacagcgacggagtgggagacatctgtgagtctgactttgaccaggaccaggtcatcgatcggatcgacgtctgcccagagaacgcagaggtcaccctgaccgacttcagggcttaccagaccgtggtcctggatcctgaaggggatgcccagatcgatcccaactgggtggtcctgaaccagggcatggagattgtacagaccatgaacagtgatcctggcctggcagtggggtacacagcttttaatggagttgacttcgaagggaccttccatgtgaatacccagacagatgatgactatgcaggctttatctttggctaccaagatagctccagcttctacgtggtcatgtggaagcagacggagcagacatattggcaagccaccccattccgagcagttgcagaacctggcattcagctcaaggctgtgaagtctaagacaggtccaggggagcatctccggaactccctgtggcacacgggggacaccagtgaccaggtcaggctgctgtggaaggactccaggaatgtgggctggaaggacaaggtgtcctaccgctggttcctacagcacaggccccaggtgggctacatcagggtacgattttatgaaggctctgagttggtggctgactctggcgtcaccatagacaccacaatgcgtggaggccgacttggcgttttctgcttctctcaagaaaacatcatctggtccaacctcaagtatcgctgcaatgacaccatccctgaggacttccaagagtttcaaacccagaatttcgaccgcttcgataattaaaccaaggaagcaatctgtaactgcttttcggaacactaaaaccatatatattttaacttcaattttctttagcttttaccaacccaaatatatcaaaacgttttatgtgaatgtggcaataaaggagaagagatcattttt

SEQ ID NO: 21520 - DNA, 612 bp, Homo sapiens
  misc_feature 1..612: note = ENST00000515510
  source 1..612: mol_type = unassigned DNA
cagtctgatgtggataatgatctggttggggactcctgtgacaccaatcaggacagtggaattgttctgtggaagtgagttttgtgaaccctcctagctcaacacgatggagtcccacattaagactcaaggctggatcaactgatcagattctggaagaacatcaccaaaaacagacgtgtgtcactcagccctagcggcacctgcaacccaagttggttgaatctgcggatacggaaccgcggatacagaggcctgactgtactagctaagtgaacttaaacatatttcccagtctcttcacatctcaacttcttcatctgcaaagaggagataaataaatgcatcgcacaggttatggtgaaaaatcaagataatgtagagtaaccatgagaggtctcagactccaggacacctcttggaggcagggcagactcatcttcaggtggcccctcagcccagaaagtcaggtggacagagaaggagagttctgagaagtcctttagaccagcactgagcccggcctacacactctcctcgagaaggcgtggccctgttcactttgcccttctccccatggcgttcagtgatggagatgggcaccaggacagc

SEQ ID NO: 21521 - DNA, 853 bp, Homo sapiens
  misc_feature 1..853: note = ENST00000504720
  source 1..853: mol_type = unassigned DNA
ctcatatggtgcctgaggttttgagcttccttaaggttacttggccccttcaagactgttctgaactccctcaactctctctgcagggcatggagattgtacagaccatgaacagtgatcctggcctggcagtggggtacacagcttttaatggagttgacttcgaagggaccttccatgtgaatacccagacagatgatgactatgcaggctttatctttggctaccaagatagctccagcttctacgtggtcatgtggaagcagacggagcagacatattggcaagccaccccattccgagcagttgcagaacctggcattcagctcaaggctgtgaagtctaagacaggtccaggggagcatctccggaactccctgtggcacacgggggacaccagtgaccaggtcaggctgctgtggaaggactccaggaatgtgggctggaaggacaaggtgtcctaccgctggttcctacagcacaggccccaggtgggctacatcagggtacgattttatgaaggctctgagttggtggctgactctggcgtcaccatagacaccacaatgcgtggaggccgacttggcgttttctgcttctctcaagaaaacatcatctggtccaacctcaagtatcgctgcaatgacaccatccctgaggacttccaagagtttcaaacccagaatttcgaccgcttcgataattaaaccaaggaagcaatctgtaactgcttttcggaacactaaaaccatatatattttaacttcaattttctttagcttttaccaacccaaatatatcaaaacgttttatgtgaatgtggcaataaaggagaagagatcatttttaaaaa

SEQ ID NO: 21522 - DNA, 558 bp, Homo sapiens
  misc_feature 1..558: note = ENST00000511888
  source 1..558: mol_type = unassigned DNA
aagtttttaagcatggtatctagacaaggcaactcacatgacaataagacacaaaactttctcactcaagatagcaggtttggtttggtttgatttttaactcaagtttgatagtgtgaccaacatcatgttaggccttgtgagagacagaagttgggaagaaacaccccccacccccctccacacacacacggacacacacggtccctgccctcaaggacttccagtctagtaagtaagtggcaacagctacagtacaatccaggtcagcgaaaaatggagcctaaaacagagcaaagaaagacgcagggtacgattttatgaaggctctgagttggtggctgactctggcgtcaccatagacaccacaatgcgtggaggccgacttggcgttttctgcttctctcaagaaaacatcatctggtccaacctcaagtatcgctgcaatgacaccatccctgaggacttccaagagtttcaaacccagaatttcgaccgcttcgataattaaaccaaggaagcaatctgtaactgcttttcggaacactaaaaccatat

SEQ ID NO: 21523 - DNA, 532 bp, Homo sapiens
  misc_feature 1..532: note = ENST00000472720
  source 1..532: mol_type = unassigned DNA; mol_type = unassigned DNA
agtgctgaggagccagagtcgccgccgggttgccagacgctggaatgggtggtcttccgacacacaccaccatctttcttgcgctcgggaagctcggggctcagcggctcccagaggttacggcggcggctctggcgagacgggaataggcaagtcaagaggctgaaaaatctgaagcatgtttccaaagagcaacctaacagtcacttgctgggtatggaggagcatgaggaagctctttctattgctttctctcttgctgtcccatgcagctcatttggaaggcaaaaaggataatcagttcatctggaaaccaggacttgccaagtagaagaaagcacttattggagagggggagtagagtcaagcaaataaacctgagatttttaggatcatttttataagtcttgaattcgttgatgatgttaacaaaaaagtccgtggggaaggtgtacaggagactgtggtcccggaggagtccagagtcgggcagtgtggtgttttcatgttgacgggtggacaagtcacctgt

SEQ ID NO: 21524 - DNA, 6111 bp, Homo sapiens
  misc_feature 1..6111: note = ENST00000409968
  source 1..6111: mol_type = unassigned DNA; mol_type = unassigned DNA
agtgctgaggagccagagtcgccgccgggttgccagacgctggaatgggtggtcttccgacacacaccaccatctttcttgcgctcgggaagctcggggctcagcggctcccagaggttacggcggcggctctggcgagacgggaataggcaagtcaagaggctgaaaaatctgaagcatgtttccaaagagcaacctaacagtcacttgctgggtatggaggagcatgaggaagctctttctattgctttctctcttgctgtcccatgcagctcatttggaaggcaaaaaggataatcagttcatctggaaaccaggtccgtggggaaggtgtacaggagactgtggtcccggaggagtccagagtcgggcagtgtggtgttttcatgttgacgggtggacaagtcacctgtctaactgtggtgagagcaacaggcctccaaaggaaagaagttgtttccgagtttgtgactggcacagtgacctctttcagtgggaggtttctgactggcaccactgtgtgcttgttccttacgctcgcggtgaagtcaagcctcggactgcagagtgtgtgacggctcagcatggactgcagcaccggatggtgcgctgcattcagaagctgaaccgaactgtggttgcaaatgaaatatgcgaacactttgcccttcagcctcctacagaacaggcttgcctcattccttgtccccgggattgtgtagtatctgagttcttaccatggtccaactgtagcaagggatgtgggaagaaattgcagcatagaactcgcgcggtcatagctccccctctctttggtggtttgcaatgtccaaatctgactgagtcaagagcctgtgatgctcccatttcctgtcctcttggggaagaggaatatacatttagccttaaggttggaccatggagtaaatgcagactgcctcatcttaaagaaattaatccaagcggaagaactgttctggattttaactctgattcaaatgagcgagtcacctttaaacatcaaagttacaaagcacatcatcattcgaagtcttgggcaatagagataggttatcaaacccggcaggtttcgtgtacaagaagtgatggacaaaatgctatgttaagcctttgccttcaagattccttcccattgactgttcagtcctgcatcatgcccaaagactgtgaaacctcccagtggtcctcctggagcccctgctccaagacatgccgttcagggagtctcttgccaggatttaggagcaggagccggaacgtgaagcacatggctattggaggtggaaaggagtgtcctgaacttcttgagaaagaggcctgcattgttgaaggagaacttctgcagcaatgtcccaggtattcctggagaacttctgaatggaaagaatgccaagtctctctcctcctcgagcagcaggatccccactggcatgtgacgggacccgtgtgtggcggtgggatccagacccgggaggtgtactgtgcccagagcgtaccagcagctgccgcactgagggccaaggaagtctctagacctgtggaaaaggcattatgtgtgggacccgccccgttgccctctcagctctgcaatatcccttgctctacggactgcatagtatcttcctggtcagcctggggcctgtgcatccatgaaaactgtcatgatcctcaggggaaaaaaggatttagaacgaggcagcgccatgtcctcatggaatctacagggcctgcagggcattgccctcatttggtggagtctgttccttgtgaggatccaatgtgctaccgatggctggcatcagaagggatctgtttccctgatcatggaaaatgtggcctgggacatcgtattctgaaggccgtctgccagaatgaccgcggagaagatgtatcagggagtctttgcccagttccccctcctcctgagaggaagtcttgtgaaattccctgccgaatggactgtgtgctgagcgagtggacggagtggtcatcctgttcccagtcctgttcaaataaaaactcagatgggaaacagaccaggtcaagaactatcctggcactggctggggaaggtggaaagccatgtccccctagtcaggctctccaagagcatcgtttgtgtaatgaccattcctgtatgcagcttcactgggagacatcgccttggggcccttgttctgaggacacattggtaactgcccttaatgcaaccattggctggaatggagaagccacgtgtggtgtaggcattcagactcggagagtcttctgtgtcaagagtcacgtgggacaagtaatgaccaaaagatgtccagattctactcgacctgaaactgtgcgcccctgttttctcccatgcaaaaaagactgtattgtgactgctttcagtgagtggacaccctgcccaaggatgtgccaagcaggaaatgccacagtaaaacagtctcgatacagaatcatcatccaagaagcagccaatggaggccaggaatgcccagataccttatatgaggagagagagtgtgaagatgtttccttgtgtcctgtatatcggtggaagccacagaaatggagcccttgcatcttagtgccagagtctgtctggcagggaataacgggcagcagtgaagcctgtggaaaggggttacaaacaagagctgtctcatgcatctctgatgacaaccggtcagcagaaatgatggaatgcctcaagcagacaaacggcatgcctctccttgtgcaagaatgcacagtcccatgtcgagaagactgcaccttcactgcttggtccaagtttacgccctgctccacgaactgtgaagccacaaaaagtaggcggcgacagctcacagggaaaagcagaaagaaggagaaatgccaggattctgacctttaccctctagtggagacagaactatgtccttgtgatgaatttatatcccaaccttatggaaactggtcagattgcattcttccagaaggcagaagggagcctcaccgaggactgcgggtacaagcagacagcaaagaatgtggagaaggcctgcgctttcgagcagtagcctgttctgataaaaatggaagacctgttgacccctccttctgcagcagctctggttacattcaagaaaaatgtgtcattccctgcccatttgattgcaagttaagcgattggtctagttgggggtcttgcagttcatcttgtggaattggagtgagaattcgatccaaatggctaaaagaaaaaccttacaatggaggacgaccatgtcccaaactggatctcaagaatcaggtacatgaggcagtcccatgttacagtgagtgcaatcagtattcctgggttgtagaacactggtcttcatgcaaaatcaacaatgagctgaggtccctgcgctgtggaggaggaacacaatctaggaaaatcagatgtgtgaatactgcggatggtgaaggtggagcagtggatagcaacctgtgcaaccaggatgaaattcccccagaaacccagtcctgttctcttatgtgtcccaatgagtgtgtcatgtctgagtggggactttggagcaaatgcccacagtcatgcgatccccacacaatgcagagaagaactcgccacctgctaagaccatcactgaactcaaggacttgtgctgaagactcacaggtgcagccttgcctcctgaatgaaaattgcttccagttccagtacaatctaacagagtggagcacatgccagctgagtgaaaacgcaccctgtggtcaaggcgtcaggacccgcctgctaagctgtgtgtgcagtgatggcaagccagtcagcatggaccaatgtgagcagcataatttggagaagccccagagaatgagcattccctgcttggtggaatgcgtggtcaactgtcagctctcagggtggacggcttggacagagtgttcacagacctgtggccatggaggtcgaatgagccggactcgatttatcattatgccaacccaaggagaaggacggccatgccccacagagcttacccaggagaaaacctgcccagtgaccccctgctacagctgggtccttggcaactggtctgcatgtaaattggagggtggagactgtggggaaggagttcagatccgcagcctttcctgcatggtccacagtggttcaatatctcatgcagctggacgtgtcgaggatgcactgtgtggagaaatgccctttcaggacagcatcctgaagcagctgtgttctgtgccttgcccaggagactgccatttaacagaatggtcagagtggagcacatgtgaattaacctgcattgatggaagaagctttgagactgtgggccgccagtctagatcaaggacttttataattcagtcttttgagaaccaagacagctgcccccaacaggttctagaaacacgcccttgtacaggaggcaaatgttatcactacacatggaaagcaagtctttggaacaataacgaacgaactgtatggtgccagcgttcagatggcgttaatgtcacaggaggctgctcccctcaggcccgtcctgctgccattcggcagtgcattccagcctgcagaaaacctttctcctactgtacacagggtggagtctgtggttgtgagaagggctatacagagataatgaaatcaaatggtttcctggattactgcatgaaagtaccaggctcagaggataaaaaagctgatgtgaaaaacctttctgggaaaaacagacctgtgaattcaaaaatacatgatatttttaaaggatggtctcttcaaccacttgatccagatggccgagtaaaaatttgggtttatggcgtttcaggtggcgcttttctcatcatgattttcctaatatttacttcctaccttgtttgcaagaagccaaaaccacatcaaagcacacctccccaacagaagcctctgaccttagcctacgatggagacttagacatgtaatctgaaaaagaaatccaaatgtagacatcaactgccttaaccgctttctcttttgtagctctcagacttctcagttttttgaggaatctcaagatgtgatatattgggcagaatacaaatattgcaaaagtaatattgcctcaacttcatttggacatggagtcaaggattattaggtctgccattttgttttcaagttgtttgtgggtgtgttttatttttttggttttcccaagggacctgaaaacccttctcttcctgtttggaactgggaggaagaaaacatgatggaattcccacagacttgagtaaacttgatcttcagcagcataatgacaatccagaggaaaatacagtcaaggcatttactctaaatgacgagtctgacactgcattgttacgcactatattagtgcaaagtctttattcttcccatacttcaacactgagttttctagagtttactttggtttaaagactttcaaattggattgcctatttttcatgaacacagagagaatggattaccatttcagaaattctctgagtttttaacctttaaatattgtattttgttttgtagccaggggatgatggcgcttcatgggttgcagctactgaaaatagcagcgtgtgtgtaattgctggactagatgaaagctaggtcatttctgaagggaatgtgtactgaatgttagagtgtacaaatgaaatatgtggttaaattggagaatgaggtagattatttgattactaaaactgtattttaacaaaaacttatccatgtagatatagcattaaccacacacagttgtaattcagtttaatgatgacaaactctgcttttgtaatttcaattttcttatctgaatatttataaattcttctttcaaatttaattatctgacctcatttaatatacatcaaacaccgatcctgtttgtacaaagtcttgcttttataaggtttcaataatatctaaaacaacacattaaaaagctgagaccattttatgaagataattgtttgtaatcataggtgttgaaagtaaaaaggtgccatcttgtggtattgacttgtatttataacaaataaactgctcaagagactgc

SEQ ID NO: 21525 - DNA, 563 bp, Homo sapiens
  misc_feature 1..563: note = ENST00000485379
  source 1..563: mol_type = unassigned DNA; mol_type = unassigned DNA
ggccacttgggtagaggcttagctcttgctttgctctgtgcttgctgaatgaacttggagaaaccacccaaagtcttgggagcttagtttttcagtaaaattgatgaattaaactaaatcagctctgaagctcactctagctccgaaagtcctgttgactgttggaacatagaaatatcctgtgtttttactcttctctggaagatatgacttgctaagtggtctgaagctgtctctagacctgtggaaaaggcattatgtgtgggacccgccccgttgccctctcagctctgcaatatcccttgctctacggactgcatagtatcttcctggtcagcctggggcctgtgcatccatgaaaactgtcatgatcctcaggggaaaaaaggatttagaacgaggcagcgccatgtcctcatggaatctacagggcctgcagggcattgccctcatttggtggagtctgttccttgtgaggatccaatgtgctaccgatggctggcatcagaagggatctgtttccctgatcatggaaaatgtggcctgggacatcgtattctgaa

SEQ ID NO: 21526 - DNA, 531 bp, Homo sapiens
  misc_feature 1..531: note = ENST00000480352
  source 1..531: mol_type = unassigned DNA; mol_type = unassigned DNA
gtttgtactttgaagactaaaagaagtagaagacagaatttcagatcctttaagcattgtgaaaacctagatagcctgtgtctctgtggaactctaaatgaaaatgacagaaaaactaaaagtgagataggacagagttcagtctattaaaatgaagacttacatgtataaggcaacattctgttcttcaggtccctttccaagccaaactaactgaaaagctgacacctcccttatcattttaggtcgaatgagccggactcgatttatcattatgccaacccaaggagaaggacggccatgccccacagagcttacccaggagaaaacctgcccagtgaccccctgctacagctgggtccttggcaactggtctgcatgtaaattggagggtggagactgtggggaaggagttcagatccgcagcctttcctgcatggtccacagtggttcaatatctcatgcagctggacgtgtcgaggatgcactgtgtggagaaatgccctttcaggacagcatcctgaagcagct

SEQ ID NO: 21527 - DNA, 5846 bp, Homo sapiens
  misc_feature 1..5846: note = ENST00000413152
  source 1..5846: mol_type = unassigned DNA; mol_type = unassigned DNA
atgcataacacagcagatgaggtggttttgtatcacaaattagcaggtccgtggggaaggtgtacaggagactgtggtcccggaggagtccagagtcgggcagtgtggtgttttcatgttgacgggtggacaagtcacctgtctaactgtggtgagagcaacaggcctccaaaggaaagaagttgtttccgagtttgtgactggcacagtgacctctttcagtgggaggtttctgactggcaccactgtgtgcttgttccttacgctcgcggtgaagtcaagcctcggactgcagagtgtgtgacggctcagcatggactgcagcaccggatggtgcgctgcattcagaagctgaaccgaactgtggttgcaaatgaaatatgcgaacactttgcccttcagcctcctacagaacaggcttgcctcattccttgtccccgggattgtgtagtatctgagttcttaccatggtccaactgtagcaagggatgtgggaagaaattgcagcatagaactcgcgcggtcatagctccccctctctttggtggtttgcaatgtccaaatctgactgagtcaagagcctgtgatgctcccatttcctgtcctcttggggaagaggaatatacatttagccttaaggttggaccatggagtaaatgcagactgcctcatcttaaagaaattaatccaagcggaagaactgttctggattttaactctgattcaaatgagcgagtcacctttaaacatcaaagttacaaagcacatcatcattcgaagtcttgggcaatagagataggttatcaaacccggcaggtttcgtgtacaagaagtgatggacaaaatgctatgttaagcctttgccttcaagattccttcccattgactgttcagtcctgcatcatgcccaaagactgtgaaacctcccagtggtcctcctggagcccctgctccaagacatgccgttcagggagtctcttgccaggatttaggagcaggagccggaacgtgaagcacatggctattggaggtggaaaggagtgtcctgaacttcttgagaaagaggcctgcattgttgaaggagaacttctgcagcaatgtcccaggtattcctggagaacttctgaatggaaagaatgccaagtctctctcctcctcgagcagcaggatccccactggcatgtgacgggacccgtgtgtggcggtgggatccagacccgggaggtgtactgtgcccagagcgtaccagcagctgccgcactgagggccaaggaagtctctagacctgtggaaaaggcattatgtgtgggacccgccccgttgccctctcagctctgcaatatcccttgctctacggactgcatagtatcttcctggtcagcctggggcctgtgcatccatgaaaactgtcatgatcctcaggggaaaaaaggatttagaacgaggcagcgccatgtcctcatggaatctacagggcctgcagggcattgccctcatttggtggagtctgttccttgtgaggatccaatgtgctaccgatggctggcatcagaagggatctgtttccctgatcatggaaaatgtggcctgggacatcgtattctgaaggccgtctgccagaatgaccgcggagaagatgtatcagggagtctttgcccagttccccctcctcctgagaggaagtcttgtgaaattccctgccgaatggactgtgtgctgagcgagtggacggagtggtcatcctgttcccagtcctgttcaaataaaaactcagatgggaaacagaccaggtcaagaactatcctggcactggctggggaaggtggaaagccatgtccccctagtcaggctctccaagagcatcgtttgtgtaatgaccattcctgtatgcagcttcactgggagacatcgccttggggcccttgttctgaggacacattggtaactgcccttaatgcaaccattggctggaatggagaagccacgtgtggtgtaggcattcagactcggagagtcttctgtgtcaagagtcacgtgggacaagtaatgaccaaaagatgtccagattctactcgacctgaaactgtgcgcccctgttttctcccatgcaaaaaagactgtattgtgactgctttcagtgagtggacaccctgcccaaggatgtgccaagcaggaaatgccacagtaaaacagtctcgatacagaatcatcatccaagaagcagccaatggaggccaggaatgcccagataccttatatgaggagagagagtgtgaagatgtttccttgtgtcctgtatatcggtggaagccacagaaatggagcccttgcatcttagtgccagagtctgtctggcagggaataacgggcagcagtgaagcctgtggaaaggggttacaaacaagagctgtctcatgcatctctgatgacaaccggtcagcagaaatgatggaatgcctcaagcagacaaacggcatgcctctccttgtgcaagaatgcacagtcccatgtcgagaagactgcaccttcactgcttggtccaagtttacgccctgctccacgaactgtgaagccacaaaaagtaggcggcgacagctcacagggaaaagcagaaagaaggagaaatgccaggattctgacctttaccctctagtggagacagaactatgtccttgtgatgaatttatatcccaaccttatggaaactggtcagattgcattcttccagaaggcagaagggagcctcaccgaggactgcgggtacaagcagacagcaaagaatgtggagaaggcctgcgctttcgagcagtagcctgttctgataaaaatggaagacctgttgacccctccttctgcagcagctctggttacattcaagaaaaatgtgtcattccctgcccatttgattgcaagttaagcgattggtctagttgggggtcttgcagttcatcttgtggaattggagtgagaattcgatccaaatggctaaaagaaaaaccttacaatggaggacgaccatgtcccaaactggatctcaagaatcaggctcaggtacatgaggcagtcccatgttacagtgagtgcaatcagtattcctgggttgtagaacactggtcttcatgcaaaatcaacaatgagctgaggtccctgcgctgtggaggaggaacacaatctaggaaaatcagatgtgtgaatactgcggatggtgaaggtggagcagtggatagcaacctgtgcaaccaggatgaaattcccccagaaacccagtcctgttctcttatgtgtcccaatgagtgtgtcatgtctgagtggggactttggagcaaatgcccacagtcatgcgatccccacacaatgcagagaagaactcgccacctgctaagaccatcactgaactcaaggacttgtgctgaagactcacaggtgcagccttgcctcctgaatgaaaattgcttccagttccagtacaatctaacagagtggagcacatgccagctgagtgaaaacgcaccctgtggtcaaggcgtcaggacccgcctgctaagctgtgtgtgcagtgatggcaagccagtcagcatggaccaatgtgagcagcataatttggagaagccccagagaatgagcattccctgcttggtggaatgcgtggtcaactgtcagctctcagggtggacggcttggacagagtgttcacagacctgtggccatggaggtcgaatgagccggactcgatttatcattatgccaacccaaggagaaggacggccatgccccacagagcttacccaggagaaaacctgcccagtgaccccctgctacagctgggtccttggcaactggtctgcatgtaaattggagggtggagactgtggggaaggagttcagatccgcagcctttcctgcatggtccacagtggttcaatatctcatgcagctggacgtgtcgaggatgcactgtgtggagaaatgccctttcaggacagcatcctgaagcagctgtgttctgtgccttgcccaggagactgccatttaacagaatggtcagagtggagcacatgtgaattaacctgcattgatggaagaagctttgagactgtgggccgccagtctagatcaaggacttttataattcagtcttttgagaaccaagacagctgcccccaacaggttctagaaacacgcccttgtacaggaggcaaatgttatcactacacatggaaagcaagtctttggaacaataacgaacgaactgtatggtgccagcgttcagatggcgttaatgtcacaggaggctgctcccctcaggcccgtcctgctgccattcggcagtgcattccagcctgcagaaaacctttctcctactgtacacagggtggagtctgtggttgtgagaagggctatacagagataatgaaatcaaatggtttcctggattactgcatgaaagtaccaggctcagaggataaaaaagctgatgtgaaaaacctttctgggaaaaacagacctgtgaattcaaaaatacatgatatttttaaaggatggtctcttcaaccacttgatccagatggccgagtaaaaatttgggtttatggcgtttcaggtggcgcttttctcatcatgattttcctaatatttacttcctaccttgtttgcaagaagccaaaaccacatcaaagcacacctccccaacagaagcctctgaccttagcctacgatggagacttagacatgtaatctgaaaaagaaatccaaatgtagacatcaactgccttaaccgctttctcttttgtagctctcagacttctcagttttttgaggaatctcaagatgtgatatattgggcagaatacaaatattgcaaaagtaatattgcctcaacttcatttggacatggagtcaaggattattaggtctgccattttgttttcaagttgtttgtgggtgtgttttatttttttggttttcccaagggacctgaaaacccttctcttcctgtttggaactgggaggaagaaaacatgatggaattcccacagacttgagtaaacttgatcttcagcagcataatgacaatccagaggaaaatacagtcaaggcatttactctaaatgacgagtctgacactgcattgttacgcactatattagtgcaaagtctttattcttcccatacttcaacactgagttttctagagtttactttggtttaaagactttcaaattggattgcctatttttcatgaacacagagagaatggattaccatttcagaaattctctgagtttttaacctttaaatattgtattttgttttgtagccaggggatgatggcgcttcatgggttgcagctactgaaaatagcagcgtgtgtgtaattgctggactagatgaaagctaggtcatttctgaagggaatgtgtactgaatgttagagtgtacaaatgaaatatgtggttaaattggagaatgaggtagattatttgattactaaaactgtattttaacaaaaacttatccatgtagatatagcattaaccacacacagttgtaattcagtttaatgatgacaaactctgcttttgtaatttcaattttcttatctgaatatttataaattcttctttcaaatttaattatctgacctcatttaatatacatcaaacaccgatcctgtttgtacaaagtcttgcttttataaggtttcaataatatctaaaacaacacattaaaaagctgagaccattttatgaagataattgtttgtaatcataggtgttgaaagtaaaaaggtgccatcttgtggtattgacttgtatttataacaaataaactgctcaagagactgc

SEQ ID NO: 21528 - DNA, 5939 bp, Homo sapiens
  misc_feature 1..5939: note = ENST00000272643
  source 1..5939: mol_type = unassigned DNA; mol_type = unassigned DNA
atgtttccaaagagcaacctaacagtcacttgctgggtatggaggagcatgaggaagctctttctattgctttctctcttgctgtcccatgcagctcatttggaaggcaaaaaggataatcagttcatctggaaaccaggtccgtggggaaggtgtacaggagactgtggtcccggaggagtccagagtcgggcagtgtggtgttttcatgttgacgggtggacaagtcacctgtctaactgtggtgagagcaacaggcctccaaaggaaagaagttgtttccgagtttgtgactggcacagtgacctctttcagtgggaggtttctgactggcaccactgtgtgcttgttccttacgctcgcggtgaagtcaagcctcggactgcagagtgtgtgacggctcagcatggactgcagcaccggatggtgcgctgcattcagaagctgaaccgaactgtggttgcaaatgaaatatgcgaacactttgcccttcagcctcctacagaacaggcttgcctcattccttgtccccgggattgtgtagtatctgagttcttaccatggtccaactgtagcaagggatgtgggaagaaattgcagcatagaactcgcgcggtcatagctccccctctctttggtggtttgcaatgtccaaatctgactgagtcaagagcctgtgatgctcccatttcctgtcctcttggggaagaggaatatacatttagccttaaggttggaccatggagtaaatgcagactgcctcatcttaaagaaattaatccaagcggaagaactgttctggattttaactctgattcaaatgagcgagtcacctttaaacatcaaagttacaaagcacatcatcattcgaagtcttgggcaatagagataggttatcaaacccggcaggtttcgtgtacaagaagtgatggacaaaatgctatgttaagcctttgccttcaagattccttcccattgactgttcagtcctgcatcatgcccaaagactgtgaaacctcccagtggtcctcctggagcccctgctccaagacatgccgttcagggagtctcttgccaggatttaggagcaggagccggaacgtgaagcacatggctattggaggtggaaaggagtgtcctgaacttcttgagaaagaggcctgcattgttgaaggagaacttctgcagcaatgtcccaggtattcctggagaacttctgaatggaaagaatgccaagtctctctcctcctcgagcagcaggatccccactggcatgtgacgggacccgtgtgtggcggtgggatccagacccgggaggtgtactgtgcccagagcgtaccagcagctgccgcactgagggccaaggaagtctctagacctgtggaaaaggcattatgtgtgggacccgccccgttgccctctcagctctgcaatatcccttgctctacggactgcatagtatcttcctggtcagcctggggcctgtgcatccatgaaaactgtcatgatcctcaggggaaaaaaggatttagaacgaggcagcgccatgtcctcatggaatctacagggcctgcagggcattgccctcatttggtggagtctgttccttgtgaggatccaatgtgctaccgatggctggcatcagaagggatctgtttccctgatcatggaaaatgtggcctgggacatcgtattctgaaggccgtctgccagaatgaccgcggagaagatgtatcagggagtctttgcccagttccccctcctcctgagaggaagtcttgtgaaattccctgccgaatggactgtgtgctgagcgagtggacggagtggtcatcctgttcccagtcctgttcaaataaaaactcagatgggaaacagaccaggtcaagaactatcctggcactggctggggaaggtggaaagccatgtccccctagtcaggctctccaagagcatcgtttgtgtaatgaccattcctgtatgcagcttcactgggagacatcgccttggggcccttgttctgaggacacattggtaactgcccttaatgcaaccattggctggaatggagaagccacgtgtggtgtaggcattcagactcggagagtcttctgtgtcaagagtcacgtgggacaagtaatgaccaaaagatgtccagattctactcgacctgaaactgtgcgcccctgttttctcccatgcaaaaaagactgtattgtgactgctttcagtgagtggacaccctgcccaaggatgtgccaagcaggaaatgccacagtaaaacagtctcgatacagaatcatcatccaagaagcagccaatggaggccaggaatgcccagataccttatatgaggagagagagtgtgaagatgtttccttgtgtcctgtatatcggtggaagccacagaaatggagcccttgcatcttagtgccagagtctgtctggcagggaataacgggcagcagtgaagcctgtggaaaggggttacaaacaagagctgtctcatgcatctctgatgacaaccggtcagcagaaatgatggaatgcctcaagcagacaaacggcatgcctctccttgtgcaagaatgcacagtcccatgtcgagaagactgcaccttcactgcttggtccaagtttacgccctgctccacgaactgtgaagccacaaaaagtaggcggcgacagctcacagggaaaagcagaaagaaggagaaatgccaggattctgacctttaccctctagtggagacagaactatgtccttgtgatgaatttatatcccaaccttatggaaactggtcagattgcattcttccagaaggcagaagggagcctcaccgaggactgcgggtacaagcagacagcaaagaatgtggagaaggcctgcgctttcgagcagtagcctgttctgataaaaatggaagacctgttgacccctccttctgcagcagctctggttacattcaagaaaaatgtgtcattccctgcccatttgattgcaagttaagcgattggtctagttgggggtcttgcagttcatcttgtggaattggagtgagaattcgatccaaatggctaaaagaaaaaccttacaatggaggacgaccatgtcccaaactggatctcaagaatcagggacaggtacatgaggcagtcccatgttacagtgagtgcaatcagtattcctgggttgtagaacactggtcttcatgcaaaatcaacaatgagctgaggtccctgcgctgtggaggaggaacacaatctaggaaaatcagatgtgtgaatactgcggatggtgaaggtggagcagtggatagcaacctgtgcaaccaggatgaaattcccccagaaacccagtcctgttctcttatgtgtcccaatgagtgtgtcatgtctgagtggggactttggagcaaatgcccacagtcatgcgatccccacacaatgcagagaagaactcgccacctgctaagaccatcactgaactcaaggacttgtgctgaagactcacaggtgcagccttgcctcctgaatgaaaattgcttccagttccagtacaatctaacagagtggagcacatgccagctgagtgaaaacgcaccctgtggtcaaggcgtcaggacccgcctgctaagctgtgtgtgcagtgatggcaagccagtcagcatggaccaatgtgagcagcataatttggagaagccccagagaatgagcattccctgcttggtggaatgcgtggtcaactgtcagctctcagggtggacggcttggacagagtgttcacagacctgtggccatggaggtcgaatgagccggactcgatttatcattatgccaacccaaggagaaggacggccatgccccacagagcttacccaggagaaaacctgcccagtgaccccctgctacagctgggtccttggcaactggtctgcatgtaaattggagggtggagactgtggggaaggagttcagatccgcagcctttcctgcatggtccacagtggttcaatatctcatgcagctggacgtgtcgaggatgcactgtgtggagaaatgccctttcaggacagcatcctgaagcagctgtgttctgtgccttgcccaggagactgccatttaacagaatggtcagagtggagcacatgtgaattaacctgcattgatggaagaagctttgagactgtgggccgccagtctagatcaaggacttttataattcagtcttttgagaaccaagacagctgcccccaacaggttctagaaacacgcccttgtacaggaggcaaatgttatcactacacatggaaagcaagtctttggaacaataacgaacgaactgtatggtgccagcgttcagatggcgttaatgtcacaggaggctgctcccctcaggcccgtcctgctgccattcggcagtgcattccagcctgcagaaaacctttctcctactgtacacagggtggagtctgtggttgtgagaagggctatacagagataatgaaatcaaatggtttcctggattactgcatgaaagtaccaggctcagaggataaaaaagctgatgtgaaaaacctttctgggaaaaacagacctgtgaattcaaaaatacatgatatttttaaaggatggtctcttcaaccacttgatccagatggccgagtaaaaatttgggtttatggcgtttcaggtggcgcttttctcatcatgattttcctaatatttacttcctaccttgtttgcaagaagccaaaaccacatcaaagcacacctccccaacagaagcctctgaccttagcctacgatggagacttagacatgtaatctgaaaaagaaatccaaatgtagacatcaactgccttaaccgctttctcttttgtagctctcagacttctcagttttttgaggaatctcaagatgtgatatattgggcagaatacaaatattgcaaaagtaatattgcctcaacttcatttggacatggagtcaaggattattaggtctgccattttgttttcaagttgtttgtgggtgtgttttatttttttggttttcccaagggacctgaaaacccttctcttcctgtttggaactgggaggaagaaaacatgatggaattcccacagacttgagtaaacttgatcttcagcagcataatgacaatccagaggaaaatacagtcaaggcatttactctaaatgacgagtctgacactgcattgttacgcactatattagtgcaaagtctttattcttcccatacttcaacactgagttttctagagtttactttggtttaaagactttcaaattggattgcctatttttcatgaacacagagagaatggattaccatttcagaaattctctgagtttttaacctttaaatattgtattttgttttgtagccaggggatgatggcgcttcatgggttgcagctactgaaaatagcagcgtgtgtgtaattgctggactagatgaaagctaggtcatttctgaagggaatgtgtactgaatgttagagtgtacaaatgaaatatgtggttaaattggagaatgaggtagattatttgattactaaaactgtattttaacaaaaacttatccatgtagatatagcattaaccacacacagttgtaattcagtttaatgatgacaaactctgcttttgtaatttcaattttcttatctgaatatttataaattcttctttcaaatttaattatctgacctcatttaatatacatcaaacaccgatcctgtttgtacaaagtcttgcttttataaggtttcaataatatctaaaacaacacattaaaaagctgagaccattttatgaagataattgtttgtaatcataggtgttgaaagtaaaaaggtgccatcttgtggtattgacttgtatttataacaaataaactgctcaagagactgc

SEQ ID NO: 21529 - DNA, 893 bp, Homo sapiens
  misc_feature 1..893: note = ENST00000392595
  source 1..893: mol_type = unassigned DNA; mol_type = unassigned DNA
cctaattagcaaggataacaagaatcgtccgcactaaagtcccctgcagcgtgaccatgtcgagaccccggaagaggctggctgggacttctggttcagacaagggactatcaggaaaacgcaccaaaactgagaactcaggtgaggcattagctaaagtggaggactccaaccctcagaagacttcagccactaaaaactgtttgaagaatctaagcagccactggctgatgaagtcagagccagagagccgcctagagaaaggtgtagatgtgaagttcagcattgaggatctcaaagcacagcccaaacagacaacatgctgggatggtgttcgtaactaccaggctcggaacttccttagagccatgaagctgggagaagaagccttcttctaccatagcaactgcaaagagccaggcatcgcaggactcatgaagatcgtgaaagaggcttacccagaccacacacagtttgagaaaaacaatccccattatgacccatctagcaaagaggacaaccctaagtggtccatggtggatgtacagtttgttcggatgatgaaacgtttcattcccctggctgagctcaaatcctatcatcaagctcacaaagctactggtggccccttaaaaaatatggttctcttcactcgccagagattatcaatccagcccctgacccaggaagagtttgattttgttttgagcctggaggaaaaggaaccaagttaactgagatactgctgctggaatgggcgagacattgctgcaaagaagtcaagcttttttcagacaaaaggtgtgagggggcttgcttggtatgcttacctgggcttgtgtacctcagtggtttttgtgtacttttttcaataaaatatcaaagttgaagaa

SEQ ID NO: 21530 - DNA, 1299 bp, Homo sapiens
  misc_feature 1..1299: note = ENST00000341541
  source 1..1299: mol_type = unassigned DNA; mol_type = unassigned DNA
tgcggcgcagcggaggcggaccgcagtcgagtctgcagagtgttgggtctgtagccagcaaattacttcatcatctagattatccattcagttgatcctaattagcaaggataacaaggtaacacaaggcttacttatattcacccaacaaaagtgtctctgtggagccacttcccagtgaactacatactgagataggggttcctggatgagaaggaccaaggacagaaccgagaagagtttaggggcaggttatgcgagatggaaatggcgcagataacggagggaaggatttgagggctcaaacgtaggcgtctgtgtttcgcaaaagttggagacgttctaggctgcctctcgttgcctccatctcgctctgcgcgggttttggaggacattagcattctttcttgtatctccgttgattccagaatcgtccgcactaaagtcccctgcagcgtgaccatgtcgagaccccggaagaggctggctgggacttctggttcagacaagggactatcaggaaaacgcaccaaaactgagaactcaggtgaggcattagctaaagtggaggactccaaccctcagaagacttcagccactaaaaactgtttgaagaatctaagcagccactggctgatgaagtcagagccagagagccgcctagagaaaggtgtagatgtgaagttcagcattgaggatctcaaagcacagcccaaacagacaacatgctgggatggtgttcgtaactaccaggctcggaacttccttagagccatgaagctgggagaagaagccttcttctaccatagcaactgcaaagagccaggcatcgcaggactcatgaagatcgtgaaagaggcttacccagaccacacacagtttgagaaaaacaatccccattatgacccatctagcaaagaggacaaccctaagtggtccatggtggatgtacagtttgttcggatgatgaaacgtttcattcccctggctgagctcaaatcctatcatcaagctcacaaagctactggtggccccttaaaaaatatggttctcttcactcgccagagattatcaatccagcccctgacccaggaagagtttgattttgttttgagcctggaggaaaaggaaccaagttaactgagatactgctgctggaatgggcgagacattgctgcaaagaagtcaagcttttttcagacaaaaggtgtgagggggcttgcttggtatgcttacctgggcttgtgtacctcagtggtttttgtgtacttttttcaataaaatatcaaagttgaagaa

SEQ ID NO: 21531 - DNA, 943 bp, Homo sapiens
  misc_feature 1..943: note = ENST00000392594
  source 1..943: mol_type = unassigned DNA; mol_type = unassigned DNA
cgccgcgggggtcgcgctgcacagcctgcggcgcagcggaggcggaccgcagtcgagtctgcagagtgttggaatcgtccgcactaaagtcccctgcagcgtgaccatgtcgagaccccggaagaggctggctgggacttctggttcagacaagggactatcaggaaaacgcaccaaaactgagaactcaggtgaggcattagctaaagtggaggactccaaccctcagaagacttcagccactaaaaactgtttgaagaatctaagcagccactggctgatgaagtcagagccagagagccgcctagagaaaggtgtagatgtgaagttcagcattgaggatctcaaagcacagcccaaacagacaacatgctgggatggtgttcgtaactaccaggctcggaacttccttagagccatgaagctgggagaagaagccttcttctaccatagcaactgcaaagagccaggcatcgcaggactcatgaagatcgtgaaagaggcttacccagaccacacacagtttgagaaaaacaatccccattatgacccatctagcaaagaggacaaccctaagtggtccatggtggatgtacagtttgttcggatgatgaaacgtttcattcccctggctgagctcaaatcctatcatcaagctcacaaagctactggtggccccttaaaaaatatggttctcttcactcgccagagattatcaatccagcccctgacccaggaagagtttgattttgttttgagcctggaggaaaaggaaccaagttaactgagatactgctgctggaatgggcgagacattgctgcaaagaagtcaagcttttttcagacaaaaggtgtgagggggcttgcttggtatgcttacctgggcttgtgtacctcagtggtttttgtgtacttttttcaataaaatatcaaagttgaagaa

SEQ ID NO: 21532 - DNA, 835 bp, Homo sapiens
  misc_feature 1..835: note = ENST00000352327
  source 1..835: mol_type = unassigned DNA; mol_type = unassigned DNA
acagcctgcggcgcagcggaggcggaccgcagtcgagtctgcagagtgttgggtctgtagccagcaaattacttcatcatctagattatccattcagttgatcctaattagcaaggataacaagaatcgtccgcactaaagtcccctgcagcgtgaccatgtcgagaccccggaagaggctggctgggacttctggttcagacaagggactatcaggaaaacgcaccaaaactgagaactcaggtgaggcattagctaaagtggaggactccaaccctcagaagacttcagccactaaaaactgtttgaagaatctaagcagccactggctgatgaagtcagagccagagagccgcctagagaaaggtgtagatgtgaagttcagcattgaggatctcaaagcacagcccaaacagacaacatgctgggatggtgttcgtaactaccaggctcggaacttccttagagccatgaagctgggagaagaagccttcttctaccatagcaactgcaaagagccaggcatcgcaggactcatgaagatcgtgaaagaggcttacccagaccacacacagtttgagaaaaacaatccccattatgacccatctagcaaagaggacaaccctaagtggtccatgaagagtttgattttgttttgagcctggaggaaaaggaaccaagttaactgagatactgctgctggaatgggcgagacattgctgcaaagaagtcaagcttttttcagacaaaaggtgtgagggggcttgcttggtatgcttacctgggcttgtgtacctcagtggtttttgtgtacttttttcaataaaatatcaaa

SEQ ID NO: 21533 - DNA, 926 bp, Homo sapiens
  misc_feature 1..926: note = ENST00000531135
  source 1..926: mol_type = unassigned DNA; mol_type = unassigned DNA
tgcacagcctgcggcgcagcggaggcggaccgcagtcgagtctgcagagtgttgggtctgtagccagcaaattacttcatcatctagattatccattcagttgatcctaattagcaaggataacaagaatcgtccgcactaaagtcccctgcagcgtgaccatgtcgagaccccggaagaggctggctgggacttctggttcagacaagggactatcaggaaaacgcaccaaaactgagaactcaggtgaggcattagctaaagtggaggactccaaccctcagaagacttcagccactaaaaactgtttgaagaatctaagcagccactggctgatgaagtcagagccagagagccgcctagagaaaggtgtagatgtgaagttcagcattgaggatctcaaagcacagcccaaacagacaacatgctgggatggtgttcgtaactaccaggctcggaacttccttagagccatgaagctgggagaagaagccttcttctaccatagcaactgcaaagagccaggcatcgcaggactcatgaagatcgtgaaagaggcttacccagaccacacacagtttgagaaaaacaatccccattatgacccatctagcaaagaggacaaccctaagtggtccatggtaaagactatgctttctatttcatgacaggggaaggatgaaccaggggaagaagacggttggggtgactgtaggtcaaggtacacggcccagcacttactcagatgaggtgatactgagataggagcttcctgtgggcggttaaaaatacagtgggcacagtcagcctagacacgtctttctgtcatgtacactgttgtcacataggtggatgtacagtttgttcggatgatgaaacgtttcattcccctggctgagctcaaatcctatcatcaagctcacaaa

SEQ ID NO: 21534 - DNA, 1074 bp, Homo sapiens
  misc_feature 1..1074: note = ENST00000533975
  source 1..1074: mol_type = unassigned DNA; mol_type = unassigned DNA
agcctgcggcgcagcggaggcggaccgcagtcgagtctgcagagtgttgggtctgtagccagcaaattacttcatcatctagattatccattcagttgatcctaattagcaaggataacaaggtaacacaaggcttacttatattcacccaacaaaagtgtctctgtggagccacttcccagtgaactacatactgagataggggttcctggatgagaaggaccaaggacagaaccgagaagagtttaggggcaggttatgcgagatggaaatggcgcagataacggagggaaggatttgagggctcaaacgtaggcgtctgtgtttcgcaaaagttggagacgttctaggctgcctctcgttgcctccatctcgctctgcgcgggttttggaggacattagcattctttcttgtatctccgttgattccagaatcgtccgcactaaagtcccctgcagcgtgaccatgtcgagaccccggaagaggctggctgggacttctggttcagacaagggactatcaggaaaacgcaccaaaactgagaactcaggtgaggcattagctaaagtggaggactccaaccctcagaagacttcagccactaaaaactgtttgaagaatctaagcagccactggctgatgaagtcagagccagagagccgcctagagaaaggtgtagatgtgaagttcagcattgaggatctcaaagcacagcccaaacagacaacatgctgggatggtgttcgtaactaccaggctcggaacttccttagagccatgaagctgggagaagaagccttcttctaccatagcaactgcaaagagccaggcatcgcaggactcatgaagatcgtgaaagaggcttacccagaccacacacagtttgagaaaaacaatccccattatgacccatctagcaaagaggacaaccctaagtggtccatggtaaagactatgctttctatttcatgacaggggaaggatgaaccaggggaagaagacggttggggtgactgtaggtcaaggtacacggcccagcacttactcagatgaggtgatactgagataggagc

SEQ ID NO: 21535 - DNA, 745 bp, Homo sapiens
  misc_feature 1..745: note = ENST00000533781
  source 1..745: mol_type = unassigned DNA; mol_type = unassigned DNA
caggagccacagtgagcaagaaggaaagacgtatgagatgagaataataatgcttttattatgcacttattgtaatgccaggcattgtctaggccctttgtattacctcatttaagcttcaaaatagttgcaagtaggtgctcagtttcctctttcctatgcaaaggcatagaagagagagtgaggaaaggaaaacatgtattgactactgtccggacctttaatcctgaacaaccctgtaaggtgttcttaccctattgaatagataatccagaagataccctgtaaggtaggtattcttgtctaatttttatagataaggaaagcttcttaacagtaagattaagttcctacagctggtaatggatccatgatttgaatccaggtctgactccaaagctaagctttttccattatgaaacattgcctttaacaagcatgatcttttctttttgcttctcctattgcagacaagggactatcaggaaaacgcaccaaaactgagaactcaggtgaggcattagctaaagtggaggactccaaccctcagaagacttcagccactaaaaactgtttgaagaatctaagcagccactggctgatgaagtcagagccagagagccgcctagagaaaggtgtagatgtgaagcattgaggatctcaaagcacagcccaaacagacaacatgctgggatggtgttcgtaactaccaggctcggaacttccttagagccatgaagctggg

SEQ ID NO: 21536 - DNA, 377 bp, Homo sapiens
  misc_feature 1..377: note = ENST00000525677
  source 1..377: mol_type = unassigned DNA; mol_type = unassigned DNA
tgggtctgtagccagcaaattacttcatcatctagattatccattcagttgatcctaattagcaaggataacaagaatcgtccgcactaaagtcccctgcagcgtgaccatgtcgagaccccggaagaggctggctgggacttctggttcaggcacattctgattgtcttgggatgaaatcgaatcatcaccatttttctacaatgtcctgaatgaactgtttctttcaacttttattggcaccttcaaggagcagaaaggagatgggccaggagccacagtgagcaagaaggaaagacacaagggactatcaggaaaacgcaccaaaactgagaactcaggtgaggcattagctaaagtggaggactccaaccctc

SEQ ID NO: 21537 - DNA, 4603 bp, Homo sapiens
  misc_feature 1..4603: note = ENST00000266085
  source 1..4603: mol_type = unassigned DNA; mol_type = unassigned DNA
gcgcagagcgggcagcaggcaggcggcgggcgctcagacggcttctcctcctcctcttgctcctccagctcctgctccttcgccgggaggccgcccgccgagtcctgcgccagcgccgaggcagcctcgctgcgccccatcccgtcccgccgggcactcggagggcagcgcgccggaggccaaggttgccccgcacggcccggcgggcgagcgagctcgggctgcagcagccccgccggcggcgcgcacggcaactttggagaggcgagcagcagccccggcagcggcggcagcagcggcaatgaccccttggctcgggctcatcgtgctcctgggcagctggagcctgggggactggggcgccgaggcgtgcacatgctcgcccagccacccccaggacgccttctgcaactccgacatcgtgatccgggccaaggtggtggggaagaagctggtaaaggaggggcccttcggcacgctggtctacaccatcaagcagatgaagatgtaccgaggcttcaccaagatgccccatgtgcagtacatccatacggaagcttccgagagtctctgtggccttaagctggaggtcaacaagtaccagtacctgctgacaggtcgcgtctatgatggcaagatgtacacggggctgtgcaacttcgtggagaggtgggaccagctcaccctctcccagcgcaaggggctgaactatcggtatcacctgggttgtaactgcaagatcaagtcctgctactacctgccttgctttgtgacttccaagaacgagtgtctctggaccgacatgctctccaatttcggttaccctggctaccagtccaaacactacgcctgcatccggcagaagggcggctactgcagctggtaccgaggatgggcccccccggataaaagcatcatcaatgccacagacccctgagcgccagaccctgccccacctcacttccctcccttcccgctgagcttcccttggacactaactcttcccagatgatgacaatgaaattagtgcctgttttcttgcaaatttagcacttggaacatttaaagaaaggtctatgctgtcatatggggtttattgggaactatcctcctggccccaccctgccccttctttttggttttgacatcattcatttccacctgggaatttctggtgccatgccagaaagaatgaggaacctgtattcctcttcttcgtgataatataatctctatttttttaggaaaacaaaaatgaaaaactactccatttgaggattgtaattcccacccctcttgcttcttccccacctcaccatctcccagaccctcttccctttgcccttctcctccaatacataaaggacacagacaaggaacttgctgaaaggccaaccatttcaggatcagtcaaaggcagcaagcagatagactcaaggtgtgtgaaagatgttatacaccaggagctgccactgcatgtcccaaccagactgtgtctgtctgtgtctgcatgtaagagtgagggagggaaggaaggaactacaagagagtcggagatgatgcagcacacacacaattccccagcccagtgatgcttgtgttgaccagatgttcctgagtctggagcaagcacccaggccagaataacagagctttcttagttggtgaagacttaaacatctgcctgaggtcaggaggcaatttgcctgccttgtacaaaagctcaggtgaaagactgagatgaatgtctttcctctccctgcctcccaccagacttcctcctggaaaacgctttggtagatttggccaggagctttcttttatgtaaattggataaatacacacaccatacactatccacagatatagccaagtagatttgggtagaggatactatttccagaatagtgtttagctcacctagggggatatgtttgtatacacatttgcatatacccacatggggacataagctaatttttttacaggacacagaattctgttcaatgctgttaaatatgccaatagtttaatctcttctattttgttgtcgttgcttgtttgaagaaaatcatgacattccaagttgacatttttttttcattttaattaaaatttgaaattctgaacaccgtcagcaccctctcttccctatcatgggtcatctgacccctgtccgtctccttgtccctgcttcatgtttgggggcctttctttaactgccttcctggcttagctcagatggcagatgagagtgtagtcaagggcctgggcacaggagggagagctgcagagtgtcctgcctgccttggctggagggacacctctcctgggtgtggagacagcttggttccctttccctagctccctggtgggtgaatgccacctcctgagatcctcacctcttggaattaaaattgttggtcactggggaaagcctgagtttgcaaccagttgtagggtttctgttgtgtttttttttttttttttgaaataaaactataatataaattctcctattaaataaaattattttaagttttagtgtcaaaagtgagatgctgagagtaggtgataatgtatattttacagagtgggggttggcaggatggtgacattgaacatgattgctctctgtctcttttttcagcttatgggtatttatcttctattagtatttgtatcttcagttcattccactttaggaaacagagctgccaattgaaacagaagaagaaaaaaaaaaaaagcagcagacaacacactgtagagtcttgcacacacacaagtgcccaggcaaggtgcttggcagaaccgcagagtgggaagagagtaccggcatcgggtttccttgggatcaatttcattaccgtgtacctttcccattgtggtcatgccatttggcagggggagaatgggaggcttggccttctttgtgaggcagtgtgagcagaagctgatgccagcatgtcactggttttgaagggatgagcccagacttgatgttttgggattgtccttattttaacctcaaggtctcgcatggtggggcccctgaccaacctacacaagttccctcccacaagtggacatcagtgtcttctctgtgaggcatctggccattcgcactccctggtgtggtcagcctctctcacacaaggaggaacttgggtgaaggctgagtgtgaggcacctgaagtttccctgcggagtcgataaattagcagaaccacatccccatctgttaggccttggtgaggaggccctgggcaaagaagggtctttcgcaaagcgatgtcagagggcggttttgagctttctataagctatagctttgtttatttcacccgttcacttactgtataatttaaaatcatttatgtagctgagacacttctgtatttcaatcatatcatgaacattttattttgctaaatcttgtgtcatgtgtaggctgtaatatgtgtacattgtgtttaagagaaaaatgaaacccacatgccgccattttcctgaatcaaattctgcagtggaatggagaggaaaatacttctaggcaagcagctagactggtgaattgggggaaatagaaggaactagtaactgagactcctccagcctcctccctattggaatcccaatggctcctggagtaggaaaaaagtttaaactacattcatgttcttgttctgtgtcactcggccctgggtagtctaccatttacttcaccccaagtcctgctgcccatccagttgggaagccatgattttcctaagaatccagggccatgggagatacaattccaagttctcgcttcctcctttgggcatctcttctgcctcccaatcaaggaagctccatgctcaggctctcagctctcgggccagtgctctgctctgtccagggtaggtaatactgggagactcctgtcttttaccctcccctcgttccagacctgcctcatggtggcaacatggttcttgaacaattaaagaaacaaatgactttttggaatagccctgtctagggcaaactgtggcccccaggagacactacccttccatgccccagacctctgtcttgcatgtgacaattgacaatctggactaccccaagatggcacccaagtgtttggcttctggctacctaaggttaacatgtcactagagtatttttatgagagacaaacattataaaaatctgatggcaaaagcaaaacaaaatggaaagtaggggaggtggatgtgacaacaacttccaaattggctctttggaggcgagaggaaggggagaacttggagaatagtttttgctttgggggtagaggcttcttagattctcccagcatccgcctttccctttagccagtctgctgtcctgaaacccagaagtgatggagagaaaccaacaagagatctcgaaccctgtctagaaggaatgtatttgttgctaaatttcgtagcactgtttacagttttcctccatgttatttatgaattttatattccgtgaatgtatattgtcttgtaatgttgcataatgttcactttttatagtgtgtcctttattctaaacagtaaagtggttttatttctatcacaca

SEQ ID NO: 21538 - DNA, 2150 bp, Homo sapiens
  misc_feature 1..2150: note = ENST00000486483
  source 1..2150: mol_type = unassigned DNA; mol_type = unassigned DNA
aaaagcataaagaatgtataacaacctaattgttacaagggagtggaattaataatctacaagaaggcacaaaaggacagaaaagaaacagaacaaatgagaaaaatagaaagccaacagtaatatggatttttagactctgaggagcagttggagctaatccacattatggaaatggaaaccaccgaacctgagccagactgtgtagtgcagcctccctctcctcctgatgacttttcatgccaaatgagactctctgagaagatcactccattgaagacttgttttaagaaaaaggatcagaaaagattgggaactggaaccctgaggtctttgaggccaatattaaacactcttctagaatctggctcacttgatggggtttttagatctaggaaccagagtacagatgagaacagcttacatgaacctatgatgaagaaagccatggaaatcaattcatcatgcccaccagcagaaaataatatgtctgttctgattcctgataggacaaatgttggggaccagataccggaagcccatccttccactgaagctccagaacgagtggttccaatccaagatcacagctttccatcagaaaccctcagtgggacggtggcagattccacaccagctcacttccagactgatcttttgcacccagtttcaagtgatgttcctactagtcctgactgcttagacaaagtcatagattatgttccaggcattttccaagaaaacagttttacaatccaatacattctggacaccagtgataagctgagtactgagctctttcaggacaaaagtgaagaggcttcccttgacctcgtgtttgagctggtgaaccagttgcagtaccacactcaccaagagaacggaattgaaatttgcatggactttctgcaaggcacttgtatttatggcagggattgtttgaagcaccacactgtcttgccatatcattggcagatcaaaaggacaactactcaaaagtggcagagtgtattcaatgattctcaggagcacttggaaagattttactgtaacccagaaaatgatagaatgagaatgaagtatggaggacaagaattttgggcagatttgaatgccatgaacgtgtatgaaacaactgaatttgaccaactacgaaggctgtccacaccaccctctagcaatgtcaactctatttaccacacagtctggaaattcttctgtagggaccactttggatggagagagtatcccgagtctgtcattcgattgattgaagaagccaactctcggggtctgaaagaggttcgatttatgatgtggaataaccactacatcctccacaattcattcttcaggagagagataaaaaggagacccctcttccgctcctgttttatactgcttccatatttacagacacttggtggggttcccacacaagctcctccacctcttgaagcaacttcatcatcacaaattatctgcccagatggggtcacttcagcaaacttttaccctgaaacttgggtttatatgcatccatctcaggacttcatccaagtccctgtttctgcagaggataaaagttatcggatcatttacaatctttttcataagactgtgcctgagtttaaatacagaattttgcagatattgagagtccaaaaccagtttctttgggagaaatataaaaggaaaaaggaatatatgaacaggaaaatgtttggccgtgacaggataataaatgagagacatttatttcatggaacatcccaggatgtggtagatggaatctgcaaacacaactttgaccctcgagtctgtggaaagcatgctacaatgtttggacaaggcagttattttgcaaagaaggcaagctactctcataacttttctaagaagtcctccaaaggagtccacttcatgtttctggccaaagtgctgacgggcagatacacaatgggcagtcatggcatgagaaggcccccgccagtcaatcctggcagtgtcaccagtgacctttatgactcttgtgtggataatttctttgagcctcagatttttgtcatttttaatgatgaccagagttacccttattttgttatccaatatgaagaagtcagtaacactgtttccatttgaaaaatctt

SEQ ID NO: 21539 - DNA, 4109 bp, Homo sapiens
  misc_feature 1..4109: note = ENST00000295924
  source 1..4109: mol_type = unassigned DNA; mol_type = unassigned DNA
agacgcggaccctcagggacactgcggacgcgagaaaggacacgccccctcgcgggagcataagtccaccgcacagaactcgcgcgcctcccctcgaacgaacgcgcacgcgcgcgcagggggcgggtcttcttcccgacacccactgagcgcccggcctcctcaccccaccccaccgaactccggccgcccaggctccgcctccgcgacgggccgtcgggaggaggcgaccggaagccacttaaagcagagatcgaggtgacaggcgagctggctggactcggagcgcggtcgaggctttctgcgttcgcggcggcggaatggcccgtgcgcggctcgccgcgtcgcggctctgtggtccctagacgtcggctcccgccctcggcgctgatctccggcgcgggcactgctttccactcggctcctgtcgtccgttctctcaggctcccgttcaggatttttagactctgaggagcagttggagctaatccacattatggaaatggaaaccaccgaacctgagccagactgtgtagtgcagcctccctctcctcctgatgacttttcatgccaaatgagactctctgagaagatcactccattgaagacttgttttaagaaaaaggatcagaaaagattgggaactggaaccctgaggtctttgaggccaatattaaacactcttctagaatctggctcacttgatggggtttttagatctaggaaccagagtacagatgagaacagcttacatgaacctatgatgaagaaagccatggaaatcaattcatcatgcccaccagcagaaaataatatgtctgttctgattcctgataggacaaatgttggggaccagataccggaagcccatccttccactgaagctccagaacgagtggttccaatccaagatcacagctttccatcagaaaccctcagtgggacggtggcagattccacaccagctcacttccagactgatcttttgcacccagtttcaagtgatgttcctactagtcctgactgcttagacaaagtcatagattatgttccaggcattttccaagaaaacagttttacaatccaatacattctggacaccagtgataagctgagtactgagctctttcaggacaaaagtgaagaggcttcccttgacctcgtgtttgagctggtgaaccagttgcagtaccacactcaccaagagaacggaattgaaatttgcatggactttctgcaaggcacttgtatttatggcagggattgtttgaagcaccacactgtcttgccatatcattggcagatcaaaaggacaactactcaaaagtggcagagtgtattcaatgattctcaggagcacttggaaagattttactgtaacccagaaaatgatagaatgagaatgaagtatggaggacaagaattttgggcagatttgaatgccatgaacgtgtatgaaacaactgaatttgaccaactacgaaggctgtccacaccaccctctagcaatgtcaactctatttaccacacagtctggaaattcttctgtagggaccactttggatggagagagtatcccgagtctgtcattcgattgattgaagaagccaactctcggggtctgaaagaggttcgatttatgatgtggaataaccactacatcctccacaattcattcttcaggagagagataaaaaggagacccctcttccgctcctgttttatactgcttccatatttacagacacttggtggggttcccacacaagctcctccacctcttgaagcaacttcatcatcacaaattatctgcccagatggggtcacttcagcaaacttttaccctgaaacttgggtttatatgcatccatctcaggacttcatccaagtccctgtttctgcagaggataaaagttatcggatcatttacaatctttttcataagactgtgcctgagtttaaatacagaattttgcagatattgagagtccaaaaccagtttctttgggagaaatataaaaggaaaaaggaatatatgaacaggaaaatgtttggccgtgacaggataataaatgagagacatttatttcatggaacatcccaggatgtggtagatggaatctgcaaacacaactttgaccctcgagtctgtggaaagcatgctacaatgtttggacaaggcagttattttgcaaagaaggcaagctactctcataacttttctaagaagtcctccaaaggagtccacttcatgtttctggccaaagtgctgacgggcagatacacaatgggcagtcatggcatgagaaggcccccgccagtcaatcctggcagtgtcaccagtgacctttatgactcttgtgtggataatttctttgagcctcagatttttgtcatttttaatgatgaccagagttacccttattttgttatccaatatgaagaagtcagtaacactgtttccatttgaaaaatcttggtactgctaaattatttgatatgaactcaatccagcatttgtagcaggttttgaatgggtgggactgggtggggaacagcattggacattaatagggcacttttcagacccattttttaaagtgctagaaaatgctttttttaaaaaaaaaatacaagttttaaaatgaccacttactctttaattatttactaattgctagtgtactcagtgtggaaaagactacagattacacactcttttcattcacacttgtacatatagacagcaatgttattaggagcattaaattaaaaaactgaacagcctaatttaaatgtggcttgggcctggtagaagtttgaccaaatggaatggaggctgtgagcaatgtgaggattctatttatttatttacgtttgataaaacttactggaactagtactaccatgcgtattccctgtccaaagcatcactgctttggtatagtataagttcatgaaattctggtgggtagaaagaaatttttatttctatcagcagtactaaaatgtatcagccaaccagagaacatcagtgactttaacttctgcagagtttgccccagaattcagagttctatttagaggaagttaaaacaacaacaaaaaacaaccatttgaaaaatttttgtcaccagcaaaacttttcactaattagtgatatgaaatgtgatttttgtgttgttaaacttcagctttggaaaactcagtctctttcattatcatccattccaatttgaaggagttgggcagctaatttggttaaaggcagtcttgagggttagaagtattacttccttttcgggttccagacctagcttgtgactgaaagttttagaaaaaggaagtacatctatagccaaattgataaggttattactgtgttttgcacaaagtatattagcaaaagtatttgctggaattattggtagatggcagtcccactcctacacctgctttgtcagatacagctgggttccctggctgactctgtaccttacttacactacttacttaatagaaacacaaacttggaaattgtgccagtggtccagctggagcacaacgtttggtgaatatgctgtttcctcagttcagagaggtagcaactaggtaaactccttataaaaagcaaatacctggatttacaaaagtgaaagtagttgttcacaaaagaattcgccatggaattctttcagttaccaagctctcctggtaatgtttgtggttatatcatttacacaaaacttttcaggaacttctgtgttgtttaagcaagatgtatctgtactgatgtctcagtgaatcagtctgtttattaagcacttatcagggcttccacacacttatttattttgccctagttaatcctgttgtttgctgccattggcatgaaatggccaactgtggctgttacagttctttcattcaattataacttgtaaaccagtgactcctaatctttttcaagttaagacaccttaccattgcttatttggttttatgagacttgttcctttttttctccctaaggaaaaagaaagctttatgacatatttatttttttaataaaactaagcaaaaataaaacttatggtaattctttaaaa

SEQ ID NO: 21540 - DNA, 4181 bp, Homo sapiens
  misc_feature 1..4181: note = ENST00000461166
  source 1..4181: mol_type = unassigned DNA; mol_type = unassigned DNA
agtgcgagcgccggcctcgcggctccggccccggccccggccccgcgccggcagtgtgcggggctctcgcggatcggggtgattgattttgagactgccctttgtaccgaattcactcgggtcccgtcagcatgaagatggaattggtttacacttcttaggcacttagagcctgtggcaggtgtatacatcagaccgaggcgccgaaggatttagttggggtcgcaggcgcctgccccttccccgttcgtcagggtgggggcgcgtctatgcggcctcccccgcgggccgaccccgggtgctctgaggcgcctaggagcccttcccagaccccgggggggagggcacggcagctacgggagccttccggctaccccgcgtttcgggctgcagcccagaagtttggaagatgttttcacattaactttgagagcgcacaagtcttcgtcttcctccccgccgccgcgggaagcgctcgccgcctttcccccgcgcttcgcggctcagttctgcgagcccccaagacccgttggacgctcctcgggaggatttttagactctgaggagcagttggagctaatccacattatggaaatggaaaccaccgaacctgagccagactgtgtagtgcagcctccctctcctcctgatgacttttcatgccaaatgagactctctgagaagatcactccattgaagacttgttttaagaaaaaggatcagaaaagattgggaactggaaccctgaggtctttgaggccaatattaaacactcttctagaatctggctcacttgatggggtttttagatctaggaaccagagtacagatgagaacagcttacatgaacctatgatgaagaaagccatggaaatcaattcatcatgcccaccagcagaaaataatatgtctgttctgattcctgataggacaaatgttggggaccagataccggaagcccatccttccactgaagctccagaacgagtggttccaatccaagatcacagctttccatcagaaaccctcagtgggacggtggcagattccacaccagctcacttccagactgatcttttgcacccagtttcaagtgatgttcctactagtcctgactgcttagacaaagtcatagattatgttccaggcattttccaagaaaacagttttacaatccaatacattctggacaccagtgataagctgagtactgagctctttcaggacaaaagtgaagaggcttcccttgacctcgtgtttgagctggtgaaccagttgcagtaccacactcaccaagagaacggaattgaaatttgcatggactttctgcaaggcacttgtatttatggcagggattgtttgaagcaccacactgtcttgccatatcattggcagatcaaaaggacaactactcaaaagtggcagagtgtattcaatgattctcaggagcacttggaaagattttactgtaacccagaaaatgatagaatgagaatgaagtatggaggacaagaattttgggcagatttgaatgccatgaacgtgtatgaaacaactgaatttgaccaactacgaaggctgtccacaccaccctctagcaatgtcaactctatttaccacacagtctggaaattcttctgtagggaccactttggatggagagagtatcccgagtctgtcattcgattgattgaagaagccaactctcggggtctgaaagaggttcgatttatgatgtggaataaccactacatcctccacaattcattcttcaggagagagataaaaaggagacccctcttccgctcctgttttatactgcttccatatttacagacacttggtggggttcccacacaagctcctccacctcttgaagcaacttcatcatcacaaattatctgcccagatggggtcacttcagcaaacttttaccctgaaacttgggtttatatgcatccatctcaggacttcatccaagtccctgtttctgcagaggataaaagttatcggatcatttacaatctttttcataagactgtgcctgagtttaaatacagaattttgcagatattgagagtccaaaaccagtttctttgggagaaatataaaaggaaaaaggaatatatgaacaggaaaatgtttggccgtgacaggataataaatgagagacatttatttcatggaacatcccaggatgtggtagatggaatctgcaaacacaactttgaccctcgagtctgtggaaagcatgctacaatgtttggacaaggcagttattttgcaaagaaggcaagctactctcataacttttctaagaagtcctccaaaggagtccacttcatgtttctggccaaagtgctgacgggcagatacacaatgggcagtcatggcatgagaaggcccccgccagtcaatcctggcagtgtcaccagtgacctttatgactcttgtgtggataatttctttgagcctcagatttttgtcatttttaatgatgaccagagttacccttattttgttatccaatatgaagaagtcagtaacactgtttccatttgaaaaatcttggtactgctaaattatttgatatgaactcaatccagcatttgtagcaggttttgaatgggtgggactgggtggggaacagcattggacattaatagggcacttttcagacccattttttaaagtgctagaaaatgctttttttaaaaaaaaaatacaagttttaaaatgaccacttactctttaattatttactaattgctagtgtactcagtgtggaaaagactacagattacacactcttttcattcacacttgtacatatagacagcaatgttattaggagcattaaattaaaaaactgaacagcctaatttaaatgtggcttgggcctggtagaagtttgaccaaatggaatggaggctgtgagcaatgtgaggattctatttatttatttacgtttgataaaacttactggaactagtactaccatgcgtattccctgtccaaagcatcactgctttggtatagtataagttcatgaaattctggtgggtagaaagaaatttttatttctatcagcagtactaaaatgtatcagccaaccagagaacatcagtgactttaacttctgcagagtttgccccagaattcagagttctatttagaggaagttaaaacaacaacaaaaaacaaccatttgaaaaatttttgtcaccagcaaaacttttcactaattagtgatatgaaatgtgatttttgtgttgttaaacttcagctttggaaaactcagtctctttcattatcatccattccaatttgaaggagttgggcagctaatttggttaaaggcagtcttgagggttagaagtattacttccttttcgggttccagacctagcttgtgactgaaagttttagaaaaaggaagtacatctatagccaaattgataaggttattactgtgttttgcacaaagtatattagcaaaagtatttgctggaattattggtagatggcagtcccactcctacacctgctttgtcagatacagctgggttccctggctgactctgtaccttacttacactacttacttaatagaaacacaaacttggaaattgtgccagtggtccagctggagcacaacgtttggtgaatatgctgtttcctcagttcagagaggtagcaactaggtaaactccttataaaaagcaaatacctggatttacaaaagtgaaagtagttgttcacaaaagaattcgccatggaattctttcagttaccaagctctcctggtaatgtttgtggttatatcatttacacaaaacttttcaggaacttctgtgttgtttaagcaagatgtatctgtactgatgtctcagtgaatcagtctgtttattaagcacttatcagggcttccacacacttatttattttgccctagttaatcctgttgtttgctgccattggcatgaaatggccaactgtggctgttacagttctttcattcaattataacttgtaaaccagtgactcctaatctttttcaagttaagacaccttaccattgcttatttggttttatgagacttgttcctttttttctccctaaggaaaaagaaagctttatgacatatttatttttttaataaaactaagcaaaaataaaa

SEQ ID NO: 21541 - DNA, 1770 bp, Homo sapiens
  misc_feature 1..1770: note = ENST00000473702
  source 1..1770: mol_type = unassigned DNA; mol_type = unassigned DNA
agagccgggcggcgcctcagctgcactgcgcggagttggcgcggcccgggaccaggagctgagcaaaccgccgcggccaacaggaggcgtcactcggacccgggctcggcgccggggtgtcgcgcggcggcgggcgggcaggctttggagcggcagttttttcggaaagtgcttttggccgggagtgccgcagaaccccagcgtcacgaggatttttagactctgaggagcagttggagctaatccacattatggaaatggaaaccaccgaacctgagccagactgtgtagtgcagcctccctctcctcctgatgacttttcatgccaaatgagactctctgagaagatcactccattgaagacttgttttaagaaaaaggatcagaaaagattgggaactggaaccctgaggtctttgaggccaatattaaacactcttctagaatctggctcacttgatggggtttttagatctaggaaccagagtacagatgagaacagcttacatgaacctatgatgaagaaagccatggaaatcaattcatcatgcccaccagcagaaaataatatgtctgttctgattcctgataggacaaatgttggggaccagataccggaagcccatccttccactgaagctccagaacgagtggttccaatccaagatcacagctttccatcagaaaccctcagtgggacggtggcagattccacaccagctcacttccagactgatcttttgcacccagtttcaagtgatgttcctactagtcctgactgcttagacaaagtcatagattatgttccaggcattttccaagaaaacagttttacaatccaatacattctggacaccagtgataagctgagtactgagctctttcaggacaaaagtgaagaggcttcccttgacctcgtgtttgagctggtgaaccagttgcagtaccacactcaccaagagaacggaattgaaatttgcatggactttctgcaaggcacttgtatttatggcagggattgtttgaagcaccacactgtcttgccatatcattggcagatcaaaaggacaactactcaaaagtggcagagtgtattcaatgattctcaggagcacttggaaagattttactgtaacccagaaaatgatagaatgagaatgaagtatggaggacaagaattttgggcagatttgaatgccatgaacgtgtatgaaacaactgaatttgaccaactacgaaggctgtccacaccaccctctagcaatgtcaactctatttaccacacagtctggaaattcttctgtagggaccactttggatggagagagtatcccgagtctgtcattcgattgattgaagaagccaactctcggggtctgaaagaggttcgatttatgatgtggaataaccactacatcctccacaattcattcttcaggagagagataaaaaggagacccctcttccgctcctgttttatactgcttccatatttacagacacttggtggggttcccacacaagctcctccacctcttgaagcaacttcatcatcacaaattatctgcccagatggggtcacttcagcaaacttttaccctgaaacttgggtttatatgcatccatctcaggacttcatccaagtccctgtttctgcagaggataaaagttatcggatcatttacaatctttttcataagactgtgcctgagtttaaatacagaattttgcagatattgagagtccaaaaccagtttctttgggagaaat

SEQ ID NO: 21542 - DNA, 2035 bp, Homo sapiens
  misc_feature 1..2035: note = ENST00000481853
  source 1..2035: mol_type = unassigned DNA; mol_type = unassigned DNA
caccattcctttctcacctggcacaatctcagatttttagactctgaggagcagttggagctaatccacattatggaaatggaaaccaccgaacctgagccagactgtgtagtgcagcctccctctcctcctgatgacttttcatgccaaatgagactctctgagaagatcactccattgaagacttgttttaagaaaaaggatcagaaaagattgggaactggaaccctgaggtctttgaggccaatattaaacactcttctagaatctggctcacttgatggggtttttagatctaggaaccagagtacagatgagaacagcttacatgaacctatgatgaagaaagccatggaaatcaattcatcatgcccaccagcagaaaataatatgtctgttctgattcctgataggacaaatgttggggaccagataccggaagcccatccttccactgaagctccagaacgagtggttccaatccaagatcacagctttccatcagaaaccctcagtgggacggtggcagattccacaccagctcacttccagactgatcttttgcacccagtttcaagtgatgttcctactagtcctgactgcttagacaaagtcatagattatgttccaggcattttccaagaaaacagttttacaatccaatacattctggacaccagtgataagctgagtactgagctctttcaggacaaaagtgaagaggcttcccttgacctcgtgtttgagctggtgaaccagttgcagtaccacactcaccaagagaacggaattgaaatttgcatggactttctgcaaggcacttgtatttatggcagggattgtttgaagcaccacactgtcttgccatatcattggcagatcaaaaggacaactactcaaaagtggcagagtgtattcaatgattctcaggagcacttggaaagattttactgtaacccagaaaatgatagaatgagaatgaagtatggaggacaagaattttgggcagatttgaatgccatgaacgtgtatgaaacaactgaatttgaccaactacgaaggctgtccacaccaccctctagcaatgtcaactctatttaccacacagtctggaaattcttctgtagggaccactttggatggagagagtatcccgagtctgtcattcgattgattgaagaagccaactctcggggtctgaaagaggttcgatttatgatgtggaataaccactacatcctccacaattcattcttcaggagagagataaaaaggagacccctcttccgctcctgttttatactgcttccatatttacagacacttggtggggttcccacacaagctcctccacctcttgaagcaacttcatcatcacaaattatctgcccagatggggtcacttcagcaaacttttaccctgaaacttgggtttatatgcatccatctcaggacttcatccaagtccctgtttctgcagaggataaaagttatcggatcatttacaatctttttcataagactgtgcctgagtttaaatacagaattttgcagatattgagagtccaaaaccagtttctttgggagaaatataaaaggaaaaaggaatatatgaacaggaaaatgtttggccgtgacaggataataaatgagagacatttatttcatggaacatcccaggatgtggtagatggaatctgcaaacacaactttgaccctcgagtctgtggaaagcatgctacaatgtttggacaaggcagttattttgcaaagaaggcaagctactctcataacttttctaagaagtcctccaaaggagtccacttcatgtttctggccaaagtgctgacgggcagatacacaatgggcagtcatggcatgagaaggcccccgccagtcaatcctggcagtgtcaccagtgacctttatgactcttgtgtggataatttctttgagcctcagatttttgtcatttttaatgatgaccagagttacccttattttgttatccaatatgaagaagtcagtaacactg

SEQ ID NO: 21543 - DNA, 2700 bp, Homo sapiens
  misc_feature 1..2700: note = ENST00000495891
  source 1..2700: mol_type = unassigned DNA; mol_type = unassigned DNA
cacaaacaagctggagcagcccagaggacaagaattttgggcagatttgaatgccatgaacgtgtatgaaacaactgaatttgaccaactacgaaggctgtccacaccaccctctagcaatgtcaactctatttaccacacagtctggaaattcttctgtagggaccactttggatggagagagtatcccgagtctgtcattcgattgattgaagaagccaactctcggggtctgaaagaggttcgatttatgatgtggaataaccactacatcctccacaattcattcttcaggagagagataaaaaggagacccctcttccgctcctgttttatactgcttccatatttacagacacttggtggggttcccacacaagctcctccacctcttgaagcaacttcatcatcacaaattatctgcccagatggggtcacttcagcaaacttttaccctgaaacttgggtttatatgcatccatctcaggacttcatccaagtccctgtttctgcagaggataaaagttatcggatcatttacaatctttttcataagactgtgcctgagtttaaatacagaattttgcagatattgagagtccaaaaccagtttctttgggagaaatataaaaggaaaaaggaatatatgaacaggaaaatgtttggccgtgacaggataataaatgagagacatttatttcatggaacatcccaggatgtggtagatggaatctgcaaacacaactttgaccctcgagtctgtggaaagcatgctacaatgtttggacaaggcagttattttgcaaagaaggcaagctactctcataacttttctaagaagtcctccaaaggagtccacttcatgtttctggccaaagtgctgacgggcagatacacaatgggcagtcatggcatgagaaggcccccgccagtcaatcctggcagtgtcaccagtgacctttatgactcttgtgtggataatttctttgagcctcagatttttgtcatttttaatgatgaccagagttacccttattttgttatccaatatgaagaagtcagtaacactgtttccatttgaaaaatcttggtactgctaaattatttgatatgaactcaatccagcatttgtagcaggttttgaatgggtgggactgggtggggaacagcattggacattaatagggcacttttcagacccattttttaaagtgctagaaaatgctttttttaaaaaaaaaatacaagttttaaaatgaccacttactctttaattatttactaattgctagtgtactcagtgtggaaaagactacagattacacactcttttcattcacacttgtacatatagacagcaatgttattaggagcattaaattaaaaaactgaacagcctaatttaaatgtggcttgggcctggtagaagtttgaccaaatggaatggaggctgtgagcaatgtgaggattctatttatttatttacgtttgataaaacttactggaactagtactaccatgcgtattccctgtccaaagcatcactgctttggtatagtataagttcatgaaattctggtgggtagaaagaaatttttatttctatcagcagtactaaaatgtatcagccaaccagagaacatcagtgactttaacttctgcagagtttgccccagaattcagagttctatttagaggaagttaaaacaacaacaaaaaacaaccatttgaaaaatttttgtcaccagcaaaacttttcactaattagtgatatgaaatgtgatttttgtgttgttaaacttcagctttggaaaactcagtctctttcattatcatccattccaatttgaaggagttgggcagctaatttggttaaaggcagtcttgagggttagaagtattacttccttttcgggttccagacctagcttgtgactgaaagttttagaaaaaggaagtacatctatagccaaattgataaggttattactgtgttttgcacaaagtatattagcaaaagtatttgctggaattattggtagatggcagtcccactcctacacctgctttgtcagatacagctgggttccctggctgactctgtaccttacttacactacttacttaatagaaacacaaacttggaaattgtgccagtggtccagctggagcacaacgtttggtgaatatgctgtttcctcagttcagagaggtagcaactaggtaaactccttataaaaagcaaatacctggatttacaaaagtgaaagtagttgttcacaaaagaattcgccatggaattctttcagttaccaagctctcctggtaatgtttgtggttatatcatttacacaaaacttttcaggaacttctgtgttgtttaagcaagatgtatctgtactgatgtctcagtgaatcagtctgtttattaagcacttatcagggcttccacacacttatttattttgccctagttaatcctgttgtttgctgccattggcatgaaatggccaactgtggctgttacagttctttcattcaattataacttgtaaaccagtgactcctaatctttttcaagttaagacaccttaccattgcttatttggttttatgagacttgttcctttttttctccctaaggaaaaagaaagctttatgacatatttatttttttaataaaactaagcaaaaataaaa

SEQ ID NO: 21544 - DNA, 3681 bp, Homo sapiens
  misc_feature 1..3681: note = ENST00000542783
  source 1..3681: mol_type = unassigned DNA; mol_type = unassigned DNA
caccattcctttctcacctggcacaatctcagatttttagactctgaggagcagttggagctaatccacattatggaaatggaaaccaccgaacctgagccagactgtgtagtgcagcctccctctcctcctgatgacttttcatgccaaatgagactctctgagaagatcactccattgaagacttgttttaagaaaaaggatcagaaaagattgggaactggaaccctgaggtctttgaggccaatattaaacactcttctagaatctggctcacttgatggggtttttagatctaggaaccagagtacagatgagaacagcttacatgaacctatgatgaagaaagccatggaaatcaattcatcatgcccaccagcagaaaataatatgtctgttctgattcctgataggacaaatgttggggaccagataccggaagcccatccttccactgaagctccagaacgagtggttccaatccaagatcacagctttccatcagaaaccctcagtgggacggtggcagattccacaccagctcacttccagactgatcttttgcacccagtttcaagtgatgttcctactagtcctgactgcttagacaaagtcatagattatgttccaggcattttccaagaaaacagttttacaatccaatacattctggacaccagtgataagctgagtactgagctctttcaggacaaaagtgaagaggcttcccttgacctcgtgtttgagctggtgaaccagttgcagtaccacactcaccaagagaacggaattgaaatttgcatggactttctgcaaggcacttgtatttatggcagggattgtttgaagcaccacactgtcttgccatatcattggcagatcaaaaggacaactactcaaaagtggcagagtgtattcaatgattctcaggagcacttggaaagattttactgtaacccagaaaatgatagaatgagaatgaagtatggaggacaagaattttgggcagatttgaatgccatgaacgtgtatgaaacaactgaatttgaccaactacgaaggctgtccacaccaccctctagcaatgtcaactctatttaccacacagtctggaaattcttctgtagggaccactttggatggagagagtatcccgagtctgtcattcgattgattgaagaagccaactctcggggtctgaaagaggttcgatttatgatgtggaataaccactacatcctccacaattcattcttcaggagagagataaaaaggagacccctcttccgctcctgttttatactgcttccatatttacagacacttggtggggttcccacacaagctcctccacctcttgaagcaacttcatcatcacaaattatctgcccagatggggtcacttcagcaaacttttaccctgaaacttgggtttatatgcatccatctcaggacttcatccaagtccctgtttctgcagaggataaaagttatcggatcatttacaatctttttcataagactgtgcctgagtttaaatacagaattttgcagatattgagagtccaaaaccagtttctttgggagaaatataaaaggaaaaaggaatatatgaacaggaaaatgtttggccgtgacaggataataaatgagagacatttatttcatggaacatcccaggatgtggtagatggaatctgcaaacacaactttgaccctcgagtctgtggaaagcatgctacaatgtttggacaaggcagttattttgcaaagaaggcaagctactctcataacttttctaagaagtcctccaaaggagtccacttcatgtttctggccaaagtgctgacgggcagatacacaatgggcagtcatggcatgagaaggcccccgccagtcaatcctggcagtgtcaccagtgacctttatgactcttgtgtggataatttctttgagcctcagatttttgtcatttttaatgatgaccagagttacccttattttgttatccaatatgaagaagtcagtaacactgtttccatttgaaaaatcttggtactgctaaattatttgatatgaactcaatccagcatttgtagcaggttttgaatgggtgggactgggtggggaacagcattggacattaatagggcacttttcagacccattttttaaagtgctagaaaatgctttttttaaaaaaaaaatacaagttttaaaatgaccacttactctttaattatttactaattgctagtgtactcagtgtggaaaagactacagattacacactcttttcattcacacttgtacatatagacagcaatgttattaggagcattaaattaaaaaactgaacagcctaatttaaatgtggcttgggcctggtagaagtttgaccaaatggaatggaggctgtgagcaatgtgaggattctatttatttatttacgtttgataaaacttactggaactagtactaccatgcgtattccctgtccaaagcatcactgctttggtatagtataagttcatgaaattctggtgggtagaaagaaatttttatttctatcagcagtactaaaatgtatcagccaaccagagaacatcagtgactttaacttctgcagagtttgccccagaattcagagttctatttagaggaagttaaaacaacaacaaaaaacaaccatttgaaaaatttttgtcaccagcaaaacttttcactaattagtgatatgaaatgtgatttttgtgttgttaaacttcagctttggaaaactcagtctctttcattatcatccattccaatttgaaggagttgggcagctaatttggttaaaggcagtcttgagggttagaagtattacttccttttcgggttccagacctagcttgtgactgaaagttttagaaaaaggaagtacatctatagccaaattgataaggttattactgtgttttgcacaaagtatattagcaaaagtatttgctggaattattggtagatggcagtcccactcctacacctgctttgtcagatacagctgggttccctggctgactctgtaccttacttacactacttacttaatagaaacacaaacttggaaattgtgccagtggtccagctggagcacaacgtttggtgaatatgctgtttcctcagttcagagaggtagcaactaggtaaactccttataaaaagcaaatacctggatttacaaaagtgaaagtagttgttcacaaaagaattcgccatggaattctttcagttaccaagctctcctggtaatgtttgtggttatatcatttacacaaaacttttcaggaacttctgtgttgtttaagcaagatgtatctgtactgatgtctcagtgaatcagtctgtttattaagcacttatcagggcttccacacacttatttattttgccctagttaatcctgttgtttgctgccattggcatgaaatggccaactgtggctgttacagttctttcattcaattataacttgtaaaccagtgactcctaatctttttcaagttaagacaccttaccattgcttatttggttttatgagacttgttcctttttttctccctaaggaaaaagaaagctttatgacatatttatttttttaataaaactaagcaaaaataaaacttatggtaattcttt

SEQ ID NO: 21545 - DNA, 1017 bp, Homo sapiens
  misc_feature 1..1017: note = ENST00000292090
  source 1..1017: mol_type = unassigned DNA; mol_type = unassigned DNA
ggctggcggccggcgggagaggcggccggcctggactggcccgagagggatcccggttcccagaacagacctaggaggcggcctcgagggcggacggcagggagggccagcatgccccgactgctgcaccccgccctgccgctgctcctgggcgccacgctgaccttccgggcgctccggcgcgcgctctgtcgcctgcccctacccgtgcacgtgcgcgccgaccccctgcgcacctggcgctggcacaacctgctcgtctccttcgctcactccattgtgtcggggatctgggcactgctgtgtgtatggcagactcctgacatgttagtggagattgagacggcgtggtcactttctggctatttgctcgtttgcttctctgcggggtatttcatccacgatacggtggacatcgtggctagcggacagacgcgagcctcttgggaataccttgtccatcacgtcatggccatgggtgccttcttctccggcatcttttggagcagctttgtcggtgggggtgtcttaacactactggtggaagtcagcaacatcttcctcaccattcgcatgatgatgaaaatcagtaatgcccaggatcatctcctctaccgggttaacaagtatgtgaacctggtcatgtactttctcttccgcctggcccctcaggcctacctcacccatttcttcttgcgttatgtgaaccagaggaccctgggcaccttcctgctgggtatcctgctcatgctggacgtgatgatcataatctacttttcccgcctcctccgctctgacttctgccctgagcatgtccccaagaagcaacacaaagacaagttcttgactgagtgaggggcacagagcctgggacaacaaaaacggacaaggccagaaacagcttcatatggacactgggacttagccccaagcctgggtgtcctctgaggccagcctctccaccttctgagcctgcgcccacactattgaaaacactaatgaaagtactcctctgaa

SEQ ID NO: 21546 - DNA, 408 bp, Homo sapiens
  misc_feature 1..408: note = ENST00000581236
  source 1..408: mol_type = unassigned DNA; mol_type = unassigned DNA
tcggtgggggtgtcttaacactactggtggaagtcagcaacatcttcctcaccattcgcatgatgatgaaaatcagtaatgcccaggatcatctcctctaccgggttaacaaaggaccctgggcaccttcctgctgggtatcctgctcatgctggacgtgatgatcataatctacttttcccgcctcctccgctctgacttctgccctgagcatgtccccaagaagcaacacaaagacaagttcttgactgagtgaggggcacagagcctgggacaacaaaaacggacaaggccagaaacagcttcatatggacactgggacttagccccaagcctgggtgtcctctgaggccagcctctccaccttctgagcctgcgcccacactattgaaaacactaatgaaagta

SEQ ID NO: 21547 - DNA, 784 bp, Homo sapiens
  misc_feature 1..784: note = ENST00000394933
  source 1..784: mol_type = unassigned DNA; mol_type = unassigned DNA
ggcaaatcggaggtcttgcttgcccagcctccggggagccgggccgagggccgggactgtctgagggaggactgtgacagccgcccggccccaggagtttaagagccggcgggaagaggtggcgatgggttactcagcagttcccaagtgcccacctcgcgggcgcgggagggacagtgtatggcagactcctgacatgttagtggagattgagacggcgtggtcactttctggctatttgctcgtttgcttctctgcggggtatttcatccacgatacggtggacatcgtggctagcggacagacgcgagcctcttgggaataccttgtccatcacgtcatggccatgggtgccttcttctccggcatcttttggagcagctttgtcggtgggggtgtcttaacactactggtggaagtcagcaacatcttcctcaccattcgcatgatgatgaaaatcagtaatgcccaggatcatctcctctaccgggttaacaagtatgtgaacctggtcatgtactttctcttccgcctggcccctcaggcctacctcacccatttcttcttgcgttatgtgaaccagaggaccctgggcaccttcctgctgggtatcctgctcatgctggacgtgatgatcataatctacttttcccgcctcctccgctctgacttctgccctgagcatgtccccaagaagcaacacaaagacaagttcttgactgagtgaggggcacagagcctgggacaacaaaaacggacaaggccagaaacagcttcatatgga

SEQ ID NO: 21548 - DNA, 578 bp, Homo sapiens
  misc_feature 1..578: note = ENST00000580518
  source 1..578: mol_type = unassigned DNA; mol_type = unassigned DNA
aaaaactcagtattcggccaggcgcggtggctcacgcctgtaattccagcactttggggaggccgaggcgggcggatcacctgaggtcaggagtttgagaccaacctggccaacatgtgtatggcagactcctgacatgttagtggagattgagacggcgtggtcactttctggctatttgctcgtttgcttctctgcggggtatttcatccacgatacggtggacatcgtggctagcggacagacgcgagcctcttgggaataccttgtccatcacgtcatggccatgggtgccttcttctccggcatcttttggagcagctttgtcggtgggggtgtcttaacactactggtggaagtcagcaacatcttcctcaccattcgcatgatgatgaaaatcagtaatgcccaggatcatctcctctaccgggttaacaagtatgtgaacctggtcatgtactttctcttccgcctggcccctcaggcctacctcacccatttcttcttgcgttatgtgaaccagaggaccctgggcaccttcctgctgggtatcctgctcatgctggacgtgatgatca

SEQ ID NO: 21549 - DNA, 3695 bp, Homo sapiens
  misc_feature 1..3695: note = ENST00000376552
  source 1..3695: mol_type = unassigned DNA; mol_type = unassigned DNA
ggagagctcgccagagcgctcgcatggcgggccggtgattgtagtcaatctggccgtattctcaggcagggtcgcccggggcggactacatctcccgggatgctgcgcggccgccccgcggaagattgtgaatatgtatcagaatgttaatgattagctgctgctaaatttggtcaaagaagtcacctacacagagcgtgttgttagagctgtgctgagcgggtgtttgggttgttggctgctttcttccccctttctcacacacttgtatattattttgaggtggtgttcgcagagtttgaaaggagagagaattaaaaaaaaaagccgcaagcgtttcactcttttatttttataatccccttcaatttggggttaaaaaaaagacaagaaaacaggaaggaagagaaataaggaaatgagatgtggtaaaagaagctaaaaggtgccttttaaaagatcgttgctgtgaagtgaaaaaaatctccagagaaaccaaaaagcaccgccgagacctcttccgaaccaaaggagtttgtgtttgcttttagggaagaagaaagatcattcattcggaggaataacaaccaattaaaagacaaataaaaaaagtttggagtgggacgcagagcgagcgagaggagctgccggcgggcggtggggcgcggagcccgcactttcccggccgggtgagcggcggccgcggcgccgggctcggcgggtgcgcctcggcggagcgaacgtcggagcgttgccttgggagacgcgcgccggacaatgcccgcggcgggccagtgacgcccgcggggaatgcggagcggcccggcagccggcacccagccgccgccgcgcgttcctgccgcccgtgtcacgcgagacccggcgggggccgggaccgcccgagccgcccctcagaccgagccggccgcctccgctgccgcggccgcctcctcttcggggtcattaaagccaatgagccgcgcgcctctgccgagcgcagccaactaaatcggcttggatgattcgcgacctgagcaagatgtacccgcagaccagacacccagcaccgcatcagcctgctcaaccctttaaatttacaatttccgaatcctgtgatcggattaaggaagagtttcagtttttacaggctcaataccacagtctgaagctggaatgtgagaaactcgccagtgagaagacagagatgcagcggcattatgtcatgtattatgaaatgtcctatgggttgaatatagaaatgcacaagcaggcagagattgtcaagaggctgaatgctatctgtgcacaagtcattcctttcctgtcccaagagcaccagcaacaagtggtgcaggctgtggaacgggccaagcaggtgaccatggcagaactgaacgccatcattgggcaacaactccaggcccagcatttatcacatggacatggtctccccgtacctctgactccacacccttcagggctccagccccctgccattccacccatcggtagcagtgccgggcttctggccctctccagtgctctaggaggtcagtcccatcttccaattaaagatgagaagaagcaccatgacaatgatcaccaaagagacagagactccatcaagagctcttcagtatccccatcagccagtttccgaggtgctgagaagcacagaaactccgcagactactcctcagagagcaaaaagcagaaaactgaagaaaaggaaattgcagctcgttatgacagcgatggtgagaaaagtgatgacaacttggtggttgacgtttccaatgaggatccatcttcccctcgagggagcccagcacattcccccagagagaatggcctagacaagacacgcctgctcaagaaagatgccccgattagtccagcctctattgcatcttccagcagtactccctcctccaaatccaaagaacttagccttaatgaaaaatctactactcccgtctcaaagtccaatacccctactccacgaactgatgcgcccaccccaggcagtaactctactcccggattgaggcctgtacctggaaaaccaccaggagttgaccctttggcctcaagcctaaggaccccaatggcagtaccttgtccatatccaactccatttgggattgtgccccatgctggaatgaacggagagctgaccagccccggagcggcctacgctgggctccacaacatctcccctcagatgagcgcagctgctgccgccgccgctgctgctgctgcctatgggagatcaccagtggtgggatttgatccacaccatcacatgcgtgtgccagcaatacctccaaacctgacaggcattccaggaggaaaaccagcatactccttccatgttagcgcagatggtcagatgcagcctgtcccttttccacccgacgccctcatcggacctggaatcccccggcatgctcgccagatcaacaccctcaaccacggggaggtggtgtgcgcggtgaccatcagcaaccccacgagacacgtgtacacgggtgggaagggctgcgtcaaggtctgggacatcagccacccaggcaataagagtcctgtctcccagctcgactgtctgaacagggataactacatccgttcctgcagattgctccctgatggtcgcaccctaattgttggaggggaagccagtactttgtccatttgggacctggcggctccaaccccacgcatcaaggcagagctgacatcctcggcccccgcctgctatgccctggccatcagccccgattccaaggtctgcttctcatgctgcagcgacggcaacatcgctgtgtgggatctgcacaaccagaccttggtgaggcaattccagggccacacagatggagccagctgtattgacatttctaatgatggcaccaagctctggacaggtggtttggacaacacggtcaggtcctgggacctgcgcgaggggcggcagctgcagcagcacgacttcacctcccagatcttttctctgggctactgcccaactggagagtggcttgcagtggggatggagaacagcaatgtggaagttttgcatgtcaccaagccagacaaataccaactacatcttcatgagagctgtgtgctgtcgctcaagtttgcccattgtggcaaatggtttgtaagcactggaaaggacaaccttctgaatgcctggagaacaccttatggggccagtatattccagtccaaagaatcctcatcggtgcttagctgtgacatctccgtggacgacaaatacattgtcactggctctggggataagaaggccacagtttatgaagttatttattaaagacaaatcttcatgcagactggacttctcctcctggtagcactttgctctgtcatcctttttgttcacccccatccccgcatctaaaaccaaggatttcagatactcattgcagttgtggagtttaatcccctttcttaacctcacttcccacttgctattgaattgtgaatagtcattaaaaacctgtgataccaaatcttcagctgtctacttggaagaacatggaataagcatacttaacagtgaaaagaatctttaattatgtattatatctgtaatatatttattttgtttaaagaaggctttctaacaatgactgactaaataaagctgtctgctcctgcattgataa

SEQ ID NO: 21550 - DNA, 1536 bp, Homo sapiens
  misc_feature 1..1536: note = ENST00000461758
  source 1..1536: mol_type = unassigned DNA; mol_type = unassigned DNA
tttggtcaaagaagtcacctacacagagcgtgttgttagagctgtgctgagcgggtgtttgggttgttggctgctttcttccccctttctcacacacttgtatattattttgaggtggtgttcgcagagtttgaaaggagagagaattaaaaaaaaaagccgcaagcgtttcactcttttatttttataatccccttcaatttggggttaaaaaaaagacaagaaaacaggaaggaagagaaataaggaaatgagatgtggtaaaagaagctaaaaggtgccttttaaaagatcgttgctgtgaagtgaaaaaaatctccagagaaaccaaaaagcaccgccgagacctcttccgaaccaaaggagtttgtgtttgcttttagggaagaagaaagatcattcattcggaggaataacaaccaattaaaagacaaataaaaaaagtttggagtgggacgcagagcgagcgagaggagctgccggcgggcggtggggcgcggagcccgcactttcccggccgggtgagcggcggccgcggcgccgggctcggcgggtgcgcctcggcggagcgaacgtcggagcgttgccttgggagacgcgcgccggacaatgcccgcggcgggccagtgacgcccgcggggaatgcggagcggcccggcagccggcacccagccgccgccgcgcgttcctgccgcccgtgtcacgcgagacccggcgggggccgggaccgcccgagccgcccctcagaccgagccggccgcctccgctgccgcggccgcctcctcttcggggtcattaaagccaatgagccgcgcgcctctgccgagcgcagccaactaaatcggcttggatgattcgcgacctgagcaagatgtacccgcagaccagacacccagcaccgcatcagcctgctcaaccctttaaatttacaatttccgaatcctgtgatcggattaaggaagagtttcagtttttacaggctcaataccacagtctgaagctggaatgtgagaaactcgccagtgagaagacagagatgcagcggcattatgtcatgtattatgaaatgtcctatgggttgaatatagaaatgcacaagcaggtaagttatttctttataaccattttaaatgacagtaatactgggacactatgaaaagaaaattgtatgttttgcagttttattctgcaagccgttgtggctacctttgctttatgtattttgggcattgcaaacttgtcttgtgaaagagcttttcttggaaaatattaaacagtaaaattaaattgtgtggcgccttcgttggcttgatgtgaaagaatggatagagggtgagctgggaggatgaaaatgaaatctgtggagctacaaaagaaattgatgtaaaatccttgtactggtcccctgaggctacttagttgggtcttaccaagaactataaccgttacttccaaaatttgtacagagtaaatgagcctgataggaggatgtgataaggttcaacattgggtcttgaaatctagcaattagttcag

SEQ ID NO: 21551 - DNA, 2832 bp, Homo sapiens
  misc_feature 1..2832: note = ENST00000470872
  source 1..2832: mol_type = unassigned DNA; mol_type = unassigned DNA
cgcggggaatgcggagcggcccggcagccggcacccagccgccgccgcgcgttcctgccgcccgtgtcacgcgagacccggcgggggccgggaccgcccgagccgcccctcagaccgagccggccgcctccgctgccgcggccgcctcctcttcggggtcattaaagccaatgagccgcgcgcctctgccgagcgcagccaactaaatcggcttggatgattcgcgacctgagcaagatgtacccgcagaccagacacccagcaccgcatcagcctgctcaaccctttaaatttacaatttccgaatcctgtgatcggattaaggaagagtttcagtttttacaggctcaataccacagtctgaagctggaatgtgagaaactcgccagtgagaagacagagatgcagcggcattatgtcatgtattatgaaatgtcctatgggttgaatatagaaatgcacaagcagagactgtttttcacaaattgaaggctgtagcaaccctgaatggagctgttcttccaatagcctgtgctcacttcgtgtctctgtgtcacattttggcagagattgtcaagaggctgaatgctatctgtgcacaagtcattcctttcctgtcccaagagcaccagcaacaagtggtgcaggctgtggaacgggccaagcaggtgaccatggcagaactgaacgccatcattgggcaacaactccaggcccagcatttatcacatggacatggtctccccgtacctctgactccacacccttcagggctccagccccctgccattccacccatcggtagcagtgccgggcttctggccctctccagtgctctaggaggtcagtcccatcttccaattaaagatgagaagaagcaccatgacaatgatcaccaaagagacagagactccatcaagagctcttcagtatccccatcagccagtttccgaggtgctgagaagcacagaaactccgcagactactcctcagagagcaaaaagcagaaaactgaagaaaaggaaattgcagctcgttatgacagcgatggtgagaaaagtgatgacaacttggtggttgacgtttccaatgaggatccatcttcccctcgagggagcccagcacattcccccagagagaatggcctagacaagacacgcctgctcaagaaagatgccccgattagtccagcctctattgcatcttccagcagtactccctcctccaaatccaaagaacttagccttaatgaaaaatctactactcccgtctcaaagtccaatacccctactccacgaactgatgcgcccaccccaggcagtaactctactcccggattgaggcctgtacctggaaaaccaccaggagttgaccctttggcctcaagcctaaggaccccaatggcagtaccttgtccatatccaactccatttgggattgtgccccatgctggaatgaacggagagctgaccagccccggagcggcctacgctgggctccacaacatctcccctcagatgagcgcagctgctgccgccgccgctgctgctgctgcctatgggagatcaccagtggtgggatttgatccacaccatcacatgcgtgtgccagcaatacctccaaacctgacaggcattccaggaggaaaaccagcatactccttccatgttagcgcagatggtcagatgcagcctgtcccttttccacccgacgccctcatcggacctggaatcccccggcatgctcgccagatcaacaccctcaaccacggggaggtggtgtgcgcggtgaccatcagcaaccccacgagacacgtgtacacgggtgggaagggctgcgtcaaggtctgggacatcagccacccaggcaataagagtcctgtctcccagctcgactgtctgaacagggataactacatccgttcctgcagattgctccctgatggtcgcaccctaattgttggaggggaagccagtactttgtccatttgggacctggcggctccaaccccacgcatcaaggcagagctgacatcctcggcccccgcctgctatgccctggccatcagccccgattccaaggtctgcttctcatgctgcagcgacggcaacatcgctgtgtgggatctgcacaaccagaccttggtgaggcaattccagggccacacagatggagccagctgtattgacatttctaatgatggcaccaagctctggacaggtggtttggacaacacggtcaggtcctgggacctgcgcgaggggcggcagctgcagcagcacgacttcacctcccagatcttttctctgggctactgcccaactggagagtggcttgcagtggggatggagaacagcaatgtggaagttttgcatgtcaccaagccagacaaataccaactacatcttcatgagagctgtgtgctgtcgctcaagtttgcccattgtggcaaatggtttgtaagcactggaaaggacaaccttctgaatgcctggagaacaccttatggggccagtatattccagtccaaagaatcctcatcggtgcttagctgtgacatctccgtggacgacaaatacattgtcactggctctggggataagaaggccacagtttatgaagttatttattaaagacaaatcttcatgcagactggacttctcctcctggtagcactttgctctgtcatcctttttgttcacccccatccccgcatctaaaaccaaggatttcagatactcattgcagttgtggagtttaatcccctttcttaacctcacttcccacttgctattgaattgtgaatagtcattaaaaacctgtgataccaaa

SEQ ID NO: 21552 - DNA, 873 bp, Homo sapiens
  misc_feature 1..873: note = ENST00000435650
  source 1..873: mol_type = unassigned DNA; mol_type = unassigned DNA
ggcccggcagccggcacccagccgccgccgcgcgttcctgccgcccgtgtcacgcgagacccggcgggggccgggaccgcccgagccgcccctcagaccgagccggccgcctccgctgccgcggccgcctcctcttcggggtcattaaagccaatgagccgcgcgcctctgccgagcgcagccaactaaatcggcttggatgattcgcgacctgagcaagatgtacccgcagaccagacacccagcaccgcatcagcctgctcaaccctttaaatttacaatttccgaatcctgtgatcggattaaggaagagtttcagtttttacaggctcaataccacagtctgaagctggaatgtgagaaactcgccagtgagaagacagagatgcagcggcattatgtcatgtattatgaaatgtcctatgggttgaatatagaaatgcacaagcaggcagagattgtcaagaggctgaatgctatctgtgcacaagtcattcctttcctgtcccaagagcaccagcaacaagtggtgcaggctgtggaacgggccaagcaggtgaccatggcagaactgaacgccatcattggggagaaaaagaataaaagtgacacacctggatcattaaagcagcaacaactccaggcccagcatttatcacatggacatggtctccccgtacctctgactccacacccttcagggctccagccccctgccattccacccatcggtagcagtgccgggcttctggccctctccagtgctctaggaggtcagtcccatcttccaattaaagatgagaagaagcaccatgacaatgatcaccaaagaggtgaacagagactccatcaagagctcttcagtatccccat

SEQ ID NO: 21553 - DNA, 565 bp, Homo sapiens
  misc_feature 1..565: note = ENST00000414465
  source 1..565: mol_type = unassigned DNA; mol_type = unassigned DNA
agccgccgccgcgcgttcctgccgcccgtgtcacgcgagacccggcgggggccgggaccgcccgagccgcccctcagaccgagccggccgcctccgctgccgcggccgcctcctcttcggggtcattaaagccaatgagccgcgcgcctctgccgagcgcagccaactaaatcggcttggatgattcgcgacctgagcaagatgtacccgcagaccagacacccagcaccgcatcagcctgctcaaccctttaaatttacaatttccgaatcctgtgatcggattaaggaagagtttcagtttttacaggctcaataccacagtctgaagctggaatgtgagaaactcgccagtgagaagacagagatgcagcggcattatgtcatggcagagattgtcaagaggctgaatgctatctgtgcacaagtcattcctttcctgtcccaagagcaccagcaacaagtggtgcaggctgtggaacgggccaagcaggtgaccatggcagaactgaacgccatcattgggcagcaacaactccaggcccagcatttatcacatggacatg

SEQ ID NO: 21554 - DNA, 2793 bp, Homo sapiens
  misc_feature 1..2793: note = ENST00000376537
  source 1..2793: mol_type = unassigned DNA; mol_type = unassigned DNA
gccgccgcgcgttcctgccgcccgtgtcacgcgagacccggcgggggccgggaccgcccgagccgcccctcagaccgagccggccgcctccgctgccgcggccgcctcctcttcggggtcattaaagccaatgagccgcgcgcctctgccgagcgcagccaactaaatcggcttggatgattcgcgacctgagcaagatgtacccgcagaccagacacccagcaccgcatcagcctgctcaaccctttaaatttacaatttccgaatcctgtgatcggattaaggaagagtttcagtttttacaggctcaataccacagtctgaagctggaatgtgagaaactcgccagtgagaagacagagatgcagcggcattatgtcatgtattatgaaatgtcctatgggttgaatatagaaatgcacaagcaggcagagattgtcaagaggctgaatgctatctgtgcacaagtcattcctttcctgtcccaagagcaccagcaacaagtggtgcaggctgtggaacgggccaagcaggtgaccatggcagaactgaacgccatcattgggcaacaactccaggcccagcatttatcacatggacatggtctccccgtacctctgactccacacccttcagggctccagccccctgccattccacccatcggtagcagtgccgggcttctggccctctccagtgctctaggaggtcagtcccatcttccaattaaagatgagaagaagcaccatgacaatgatcaccaaagagacagagactccatcaagagctcttcagtatccccatcagccagtttccgaggtgctgagaagcacagaaactccgcagactactcctcagagagcaaaaagcagaaaactgaagaaaaggaaattgcagctcgttatgacagcgatggtgagaaaagtgatgacaacttggtggttgacgtttccaatgaggatccatcttcccctcgagggagcccagcacattcccccagagagaatggcctagacaagacacgcctgctcaagaaagatgccccgattagtccagcctctattgcatcttccagcagtactccctcctccaaatccaaagaacttagccttaagagggatatggggaaattgagtgaaacacgtcttagcgaagatgaacaatgcacattggggttacagagatggttttgtcgcctgtggtttatgaatgaaaaatctactactcccgtctcaaagtccaatacccctactccacgaactgatgcgcccaccccaggcagtaactctactcccggattgaggcctgtacctggaaaaccaccaggagttgaccctttggcctcaagcctaaggaccccaatggcagtaccttgtccatatccaactccatttgggattgtgccccatgctggaatgaacggagagctgaccagccccggagcggcctacgctgggctccacaacatctcccctcagatgagcgcagctgctgccgccgccgctgctgctgctgcctatgggagatcaccagtggtgggatttgatccacaccatcacatgcgtgtgccagcaatacctccaaacctgacaggcattccaggaggaaaaccagcatactccttccatgttagcgcagatggtcagatgcagcctgtcccttttccacccgacgccctcatcggacctggaatcccccggcatgctcgccagatcaacaccctcaaccacggggaggtggtgtgcgcggtgaccatcagcaaccccacgagacacgtgtacacgggtgggaagggctgcgtcaaggtctgggacatcagccacccaggcaataagagtcctgtctcccagctcgactgtctgaacagggataactacatccgttcctgcagattgctccctgatggtcgcaccctaattgttggaggggaagccagtactttgtccatttgggacctggcggctccaaccccacgcatcaaggcagagctgacatcctcggcccccgcctgctatgccctggccatcagccccgattccaaggtctgcttctcatgctgcagcgacggcaacatcgctgtgtgggatctgcacaaccagaccttggtgaggcaattccagggccacacagatggagccagctgtattgacatttctaatgatggcaccaagctctggacaggtggtttggacaacacggtcaggtcctgggacctgcgcgaggggcggcagctgcagcagcacgacttcacctcccagatcttttctctgggctactgcccaactggagagtggcttgcagtggggatggagaacagcaatgtggaagttttgcatgtcaccaagccagacaaataccaactacatcttcatgagagctgtgtgctgtcgctcaagtttgcccattgtggcaaatggtttgtaagcactggaaaggacaaccttctgaatgcctggagaacaccttatggggccagtatattccagtccaaagaatcctcatcggtgcttagctgtgacatctccgtggacgacaaatacattgtcactggctctggggataagaaggccacagtttatgaagttatttattaaagacaaatcttcatgcagactggacttctcctcctggtagcactttgctctgtcatcctttttgttcacccccatccccgcatctaaaaccaaggatttcagatactcattgcagttgtggagtttaatcccctttcttaacctcacttcccacttgctattgaattgtgaatagtcattaaaaacctgtgataccaaa

SEQ ID NO: 21555 - DNA, 2814 bp, Homo sapiens
  misc_feature 1..2814: note = ENST00000462803
  source 1..2814: mol_type = unassigned DNA; mol_type = unassigned DNA
gttcctgccgcccgtgtcacgcgagacccggcgggggccgggaccgcccgagccgcccctcagaccgagccggccgcctccgctgccgcggccgcctcctcttcggggtcattaaagccaatgagccgcgcgcctctgccgagcgcagccaactaaatcggcttggatgattcgcgacctgagcaagatgtacccgcagaccagacacccagcaccgcatcagcctgctcaaccctttaaatttacaatttccgaatcctgtgatcggattaaggaagagtttcagtttttacaggctcaataccacagtctgaagctggaatgtgagaaactcgccagtgagaagacagagatgcagcggcattatgtcatgtattatgaaatgtcctatgggttgaatatagaaatgcacaagcaggcagagattgtcaagaggctgaatgctatctgtgcacaagtcattcctttcctgtcccaagagcaccagcaacaagtggtgcaggctgtggaacgggccaagcaggtgaccatggcagaactgaacgccatcattgggcaacaactccaggcccagcatttatcacatggacatggtctccccgtacctctgactccacacccttcagggctccagccccctgccattccacccatcggtagcagtgccgggcttctggccctctccagtgctctaggaggtcagtcccatcttccaattaaagatgagaagaagcaccatgacaatgatcaccaaagagacagagactccatcaagcaaaactacttgctgctcataatggatgaaattggagaccaaagaggaagaaccttctgggttcctgtcagtctaaatcctgattttaaaagacattcacctgccatgctagtgttgtgtgcttctactgagctcttcagtatccccatcagccagtttccgaggtgctgagaagcacagaaactccgcagactactcctcagagagcaaaaagcagaaaactgaagaaaaggaaattgcagctcgttatgacagcgatggtgagaaaagtgatgacaacttggtggttgacgtttccaatgaggatccatcttcccctcgagggagcccagcacattcccccagagagaatggcctagacaagacacgcctgctcaagaaagatgccccgattagtccagcctctattgcatcttccagcagtactccctcctccaaatccaaagaacttagccttaatgaaaaatctactactcccgtctcaaagtccaatacccctactccacgaactgatgcgcccaccccaggcagtaactctactcccggattgaggcctgtacctggaaaaccaccaggagttgaccctttggcctcaagcctaaggaccccaatggcagtaccttgtccatatccaactccatttgggattgtgccccatgctggaatgaacggagagctgaccagccccggagcggcctacgctgggctccacaacatctcccctcagatgagcgcagctgctgccgccgccgctgctgctgctgcctatgggagatcaccagtggtgggatttgatccacaccatcacatgcgtgtgccagcaatacctccaaacctgacaggcattccaggaggaaaaccagcatactccttccatgttagcgcagatggtcagatgcagcctgtcccttttccacccgacgccctcatcggacctggaatcccccggcatgctcgccagatcaacaccctcaaccacggggaggtggtgtgcgcggtgaccatcagcaaccccacgagacacgtgtacacgggtgggaagggctgcgtcaaggtctgggacatcagccacccaggcaataagagtcctgtctcccagctcgactgtctgaacagggataactacatccgttcctgcagattgctccctgatggtcgcaccctaattgttggaggggaagccagtactttgtccatttgggacctggcggctccaaccccacgcatcaaggcagagctgacatcctcggcccccgcctgctatgccctggccatcagccccgattccaaggtctgcttctcatgctgcagcgacggcaacatcgctgtgtgggatctgcacaaccagaccttggtgaggcaattccagggccacacagatggagccagctgtattgacatttctaatgatggcaccaagctctggacaggtggtttggacaacacggtcaggtcctgggacctgcgcgaggggcggcagctgcagcagcacgacttcacctcccagatcttttctctgggctactgcccaactggagagtggcttgcagtggggatggagaacagcaatgtggaagttttgcatgtcaccaagccagacaaataccaactacatcttcatgagagctgtgtgctgtcgctcaagtttgcccattgtggcaaatggtttgtaagcactggaaaggacaaccttctgaatgcctggagaacaccttatggggccagtatattccagtccaaagaatcctcatcggtgcttagctgtgacatctccgtggacgacaaatacattgtcactggctctggggataagaaggccacagtttatgaagttatttattaaagacaaatcttcatgcagactggacttctcctcctggtagcactttgctctgtcatcctttttgttcacccccatccccgcatctaaaaccaaggatttcagatactcattgcagttgtggagtttaatcccctttcttaacctcacttcccacttgctattgaattgtgaatagtcattaaaaacctgtgatacc

SEQ ID NO: 21556 - DNA, 468 bp, Homo sapiens
  misc_feature 1..468: note = ENST00000376524
  source 1..468: mol_type = unassigned DNA; mol_type = unassigned DNA
gcccgtgtcacgcgagacccggcgggggccgggaccgcccgagccgcccctcagaccgagccggccgcctccgctgccgcggccgcctcctcttcggggtcattaaagccaatgagccgcgcgcctctgccgagcgcagccaactaaatcggcttggatgattcgcgacctgagcaagatgtacccgcagaccagacacccagcaccgcatcagcctgctcaaccctttaaatttacaatttccgaatcctgtgatcggattaaggaagagtttcagtttttacaggctcaataccacagtctgaagctggaatgtgagaaactcgccagtgagaagacagagatgcagcggcattatgtcatgtattatgaaatgtcctatgggttgaatatagaaatgcacaagcagtattgcaggttgttaagaagaaattgacttgaagaggccgactgctgcccatcatggag

SEQ ID NO: 21557 - DNA, 486 bp, Homo sapiens
  misc_feature 1..486: note = ENST00000476523
  source 1..486: mol_type = unassigned DNA; mol_type = unassigned DNA
gtgtcacgcgagacccggcgggggccgggaccgcccgagccgcccctcagaccgagccggccgcctccgctgccgcggccgcctcctcttcggggtcattaaagccaatgagccgcgcgcctctgccgagcgcagccaactaaatcggcttggatgattcgcgacctgagcaagatgtacccgcagaccagacacccagcaccgcatcagcctgctcaaccctttaaatttacaatttccgaatcctgtgatcggattaaggaagagtttcagtttttacaggctcaataccacagtctgaagctggaatgtgagaaactcgccagtgagaagacagagatgcagcggcattatgtcatgtattgcaggttgttaagaagaaattgacttgaagaggccgactgctgcccatcatggagcaaataaagcaaaactgccgaagcatggtggagcagcgagacgggccctcagcaatttgttgctatt

SEQ ID NO: 21558 - DNA, 379 bp, Homo sapiens
  misc_feature 1..379: note = ENST00000376525
  source 1..379: mol_type = unassigned DNA; mol_type = unassigned DNA
gcggccgcctcctcttcggggtcattaaagccaatgagccgcgcgcctctgccgagcgcagccaactaaatcggcttggatgattcgcgacctgagcaagatgtacccgcagaccagacacccagcaccgcatcagcctgctcaaccctttaaatttacaatttccgaatcctgtgatcggattaaggaagagtttcagtttttacaggctcaataccacagtctgaagctggaatgtgagaaactcgccagtgagaagacagagatgcagcggcattatgtcatggtaagaaaaccatgtcacagattcaaagtgcctattagtttggaataccaaaaacaagaatatgtttaaattgctgggggctgcaagatagat

SEQ ID NO: 21559 - DNA, 2382 bp, Homo sapiens
  misc_feature 1..2382: note = ENST00000265284
  source 1..2382: mol_type = unassigned DNA; mol_type = unassigned DNA
atgagccgcgcgcctctgccgagcgcagccaactaaatcggcttggatgattcgcgacctgagcaagatgtacccgcagaccagacacccagcaccgcatcagcctgctcaaccctttaaatttacaatttccgaatcctgtgatcggattaaggaagagtttcagtttttacaggctcaataccacagtctgaagctggaatgtgagaaactcgccagtgagaagacagagatgcagcggcattatgtcatgtattatgaaatgtcctatgggttgaatatagaaatgcacaagcaggcagagattgtcaagaggctgaatgctatctgtgcacaagtcattcctttcctgtcccaagagcaacaactccaggcccagcatttatcacatggacatggtctccccgtacctctgactccacacccttcagggctccagccccctgccattccacccatcggtagcagtgccgggcttctggccctctccagtgctctaggaggtcagtcccatcttccaattaaagatgagaagaagcaccatgacaatgatcaccaaagagacagagactccatcaagagctcttcagtatccccatcagccagtttccgaggtgctgagaagcacagaaactccgcagactactcctcagagagcaaaaagcagaaaactgaagaaaaggaaattgcagctcgttatgacagcgatggtgagaaaagtgatgacaacttggtggttgacgtttccaatgaggatccatcttcccctcgagggagcccagcacattcccccagagagaatggcctagacaagacacgcctgctcaagaaagatgccccgattagtccagcctctattgcatcttccagcagtactccctcctccaaatccaaagaacttagccttaatgaaaaatctactactcccgtctcaaagtccaatacccctactccacgaactgatgcgcccaccccaggcagtaactctactcccggattgaggcctgtacctggaaaaccaccaggagttgaccctttggcctcaagcctaaggaccccaatggcagtaccttgtccatatccaactccatttgggattgtgccccatgctggaatgaacggagagctgaccagccccggagcggcctacgctgggctccacaacatctcccctcagatgagcgcagctgctgccgccgccgctgctgctgctgcctatgggagatcaccagtggtgggatttgatccacaccatcacatgcgtgtgccagcaatacctccaaacctgacaggcattccaggaggaaaaccagcatactccttccatgttagcgcagatggtcagatgcagcctgtcccttttccacccgacgccctcatcggacctggaatcccccggcatgctcgccagatcaacaccctcaaccacggggaggtggtgtgcgcggtgaccatcagcaaccccacgagacacgtgtacacgggtgggaagggctgcgtcaaggtctgggacatcagccacccaggcaataagagtcctgtctcccagctcgactgtctgaacagggataactacatccgttcctgcagattgctccctgatggtcgcaccctaattgttggaggggaagccagtactttgtccatttgggacctggcggctccaaccccacgcatcaaggcagagctgacatcctcggcccccgcctgctatgccctggccatcagccccgattccaaggtctgcttctcatgctgcagcgacggcaacatcgctgtgtgggatctgcacaaccagaccttggtgaggcaattccagggccacacagatggagccagctgtattgacatttctaatgatggcaccaagctctggacaggtggtttggacaacacggtcaggtcctgggacctgcgcgaggggcggcagctgcagcagcacgacttcacctcccagatcttttctctgggctactgcccaactggagagtggcttgcagtggggatggagaacagcaatgtggaagttttgcatgtcaccaagccagacaaataccaactacatcttcatgagagctgtgtgctgtcgctcaagtttgcccattgtggcaaatggtttgtaagcactggaaaggacaaccttctgaatgcctggagaacaccttatggggccagtatattccagtccaaagaatcctcatcggtgcttagctgtgacatctccgtggacgacaaatacattgtcactggctctggggataagaaggccacagtttatgaagttatttattaaagacaaatcttcatgcagactggacttctcctcctggtagcactttgctctgtcatcctttttgttcacccccatccccgcatctaaaa

SEQ ID NO: 21560 - DNA, 656 bp, Homo sapiens
  misc_feature 1..656: note = ENST00000425506
  source 1..656: mol_type = unassigned DNA
gggcgaacgaacgagccgagagggtggcggccgcctccctcctcccccggcctgaccgcagcccgacgccatggcgcgggtccccccgacgggccagtttcgattccgggcaccgcatcagcctgctcaaccctttaaatttacaatttccgaatcctgtgatcggattaaggaagagtttcagtttttacaggctcaataccacagtctgaagctggaatgtgagaaactcgccagtgagaagacagagatgcagcggcattatgtcatgtattatgaaatgtcctatgggttgaatatagaaatgcacaagcaggcagagattgtcaagaggctgaatgctatctgtgcacaagtcattcctttcctgtcccaagagcaccagcaacaagtggtgcaggctgtggaacgggccaagcaggtgaccatggcagaactgaacgccatcattgggcaacaactccaggcccagcatttatcacatggacatggtctccccgtacctctgactccacacccttcagggctccagccccctgccattccacccatcggtagcagtgccgggcttctggccctctccagtgctctaggaggtcagtcccatcttccaattaaagatgagaagaagcaccatgacaatgatcaccaaagag

SEQ ID NO: 21561 - DNA, 723 bp, Homo sapiens
  misc_feature 1..723: note = ENST00000485159
  source 1..723: mol_type = unassigned DNA
tccctcctcccccggcctgaccgcagcccgacgccatggcgcgggtccccccgacgggccagtttcgattccgggcaccgcatcagcctgctcaaccctttaaatttacaatttccgaatcctgtgatcggattaaggaagagtttcagtttttacaggctcaataccacagtctgaagctggaatgtgagaaactcgccagtgagaagacagagatgcagcggcattatgtcatgtattatgaaatgtcctatgggttgaatatagaaatgcacaagcaggcagagattgtcaagaggctgaatgctatctgtgcacaagtcattcctttcctgtcccaagagcaccagcaacaagtggtgcaggctgtggaacgggccaagcaggtgaccatggcagaactgaacgccatcattggggtacgtggcctttccattttagctctgatcttagtgtttgtcatcagctctctcgctctctctttttacattttgttccgccaaaggggcaaaaagcaatagatgactacaaaatgaaattaagcactttgccttcaatctcctgtgaaatttgatggctgccttagaaactttggatcacattctcaccaatttaagtggatgtgttcatgaaaactctcctctaaggagactggatagctctttttcatatttctttgctttgcaatcagcttgtgttgctaacctaggccaaaaaaaaaaa

SEQ ID NO: 21562 - DNA, 531 bp, Homo sapiens
  misc_feature 1..531: note = ENST00000466428
  source 1..531: mol_type = unassigned DNA; mol_type = unassigned DNA
acctcgaaaccagcctctgcctgggctgttgggcgcgaggagggttgcgggaggagagttttaatctctctttgcttgcgtgcgcgatgaccctcaccccccgctaacgccgcatagtaggttttctccgtctccctgcttcgcctgtgatgtgggctaattaaatattttattgttgttcttcaggcaccgcatcagcctgctcaaccctttaaatttacaatttccgaatcctgtgatcggattaaggaagagtttcagtttttacaggctcaataccacagtctgaagctggaatgtgagaaactcgccagtgagaagacagagatgcagcggcattatgtcatgtattatgaaatgtcctatgggttgaatatagaaatgcacaagcaggcagagattgtcaagaggctgaatgctatctgtgcacaagtcattcctttcctgtcccaagagcaccagcaacaagtggtgcaggctgtggaacgggccaagcaggtgaccatggcagaactgaacgccatcattggg

SEQ ID NO: 21563 - DNA, 967 bp, Homo sapiens
  misc_feature 1..967: note = ENST00000428713
  source 1..967: mol_type = unassigned DNA
gcaccgcatcagcctgctcaaccctttaaatttacaatttccgaatcctgtgatcggattaaggaagagtttcagtttttacaggctcaataccacagtctgaagctggaatgtgagaaactcgccagtgagaagacagagatgcagcggcattatgtcatgtattatgaaatgtcctatgggttgaatatagaaatgcacaagcaggcagagattgtcaagaggctgaatgctatctgtgcacaagtcattcctttcctgtcccaagagcaccagcaacaagtggtgcaggctgtggaacgggccaagcaggtgaccatggcagaactgaacgccatcattgggcaacaactccaggcccagcatttatcacatggacatggtctccccgtacctctgactccacacccttcagggctccagccccctgccattccacccatcggtagcagtgccgggcttctggccctctccagtgctctaggaggtcagtcccatcttccaattaaagatgagaagaagcaccatgacaatgatcaccaaagagacagagactccatcaagagctcttcagtatccccatcagccagtttccgaggtgctgagaagcacagaaactccgcagactactcctcagagagcaaaaagcagaaaactgaagaaaaggaaattgcagctcgttatgacagcgatggtgagaaaagtgatgacaacttggtggttgacgtttccaatgagaagagggatatggggaaattgagtgaaacacgtcttagcgaagatgaacaatgcacattggggttacagagatggttttgtcgcctgtggtttatgaatgaaaaatctactactcccgtctcaaagtccaatacccctactccacgaactgatgcgcccaccccaggcagtaactctactcccggattgaggcctgtacctggaaaaccaccaggagttgaccctttgg

SEQ ID NO: 21564 - DNA, 718 bp, Homo sapiens
  misc_feature 1..718: note = ENST00000455913
  source 1..718: mol_type = unassigned DNA
aaggcctccttccttaggcaggtgtaaataaattaaacatttcttctaccgtaaataaaaagaaggcagaacaatcgaaactggggagacttggaaaacgctgaggccaaactttcgatattgatttattggggccgggagaatgaaaggttgggaagattctggggccttttgacatccttggttctttattactccggacttgattccttctcacttttttctgccattccactgaagagctgagagcccagggaagtcggatctgaagctggaatgtgagaaactcgccagtgagaagacagagatgcagcggcattatgtcatgtattatgaaatgtcctatgggttgaatatagaaatgcacaagcaggcagagattgtcaagaggctgaatgctatctgtgcacaagtcattcctttcctgtcccaagagcaccagcaacaagtggtgcaggctgtggaacgggccaagcaggtgaccatggcagaactgaacgccatcattgggcaacaactccaggcccagcatttatcacatggacatggtctccccgtacctctgactccacacccttcagggctccagccccctgccattccacccatcggtagcagtgccgggcttctggccctctccagtgctctaggaggtcagtcccatcttccaattaaagatgagaagaagcaccatgacaatgatcaccaaagaggtgag

SEQ ID NO: 21565 - DNA, 535 bp, Homo sapiens
  misc_feature 1..535: note = ENST00000496853
  source 1..535: mol_type = unassigned DNA
attctttgctgttaacttgcctgctgtgcttaggaattaagagtccgtaggataccaaattttcatcagacttttttgatgcatctgcttgggatgtataaagaaactggagatgttaagaatgctgtgtttgaatttaatttttcttagttttgtgtgttttctcttagaatttgtgtcttaaggtggttaaagatagtgatgggctcttgatttattggcataggttatatgaagatactggtttaggcagagattgtcaagaggctgaatgctatctgtgcacaagtcattcctttcctgtcccaagagcaccagcaacaagtggtgcaggctgtggaacgggccaagcaggtgaccatggcagaactgaacgccatcattgggcagcaacaactccaggcccagcatttatcacatggacatggtctccccgtacctctgactccacacccttcagggctccagccccctgccattccacccatcggtagcagtgccgggcttctggccctctccagtgctctaggaggtc

SEQ ID NO: 21566 - DNA, 470 bp, Homo sapiens
  misc_feature 1..470: note = ENST00000474519
  source 1..470: mol_type = unassigned DNA
ttctttgctgttaacttgcctgctgtgcttaggaattaagagtccgtaggataccaaattttcatcagacttttttgatgcatctgcttgggatgtataaagaaactggagatgttaagaatgctgtgtttgaatttaatttttcttagttttgtgtgttttctcttagaatttgtgtcttaaggtggttaaagatagtgatgggctcttgatttattggcataggttatatgaagatactggtttagtattatgaaatgtcctatgggttgaatatagaaatgcacaagcaggcagagattgtcaagaggctgaatgctatctgtgcacaagtcattcctttcctgtcccaagagcagcaacaactccaggcccagcatttatcacatggacatggtctccccgtacctctgactccacacccttcagggctccagccccctgccattccacccatcggtagcagtgcc

SEQ ID NO: 21567 - DNA, 465 bp, Homo sapiens
  misc_feature 1..465: note = ENST00000483597
  source 1..465: mol_type = unassigned DNA
atctgctggagaaaatgctgtccagggcagataaaaggctcggcatggtacagagaatagactggattggccaaaagcaggctgcagttaatgtgtaaataagtgaaatcaaggccactgttgcagaggaagctgttgttaattagcaccagcaacaagtggtgcaggctgtggaacgggccaagcaggtgaccatggcagaactgaacgccatcattgggatgggcagttcatcttaaacaaaatgttggacaaaatcagtgatgaaacaactgaggatgaaggagagttggagagttgaaggagcagtgaaaaagaatggaagaaaacatgatgtgcaggtggagaggctggcctttgaaaggaaaaggacccttctctaagattagcatacaagaggaagagaagaagctcattttagaactgttctgagatagaataaaaccaaacaaggacctcaggaag

SEQ ID NO: 21568 - DNA, 717 bp, Homo sapiens
  misc_feature 1..717: note = ENST00000490347
  source 1..717: mol_type = unassigned DNA
caacaactccaggcccagcatttatcacatggacatggtctccccgtacctctgactccacacccttcagggctccagccccctgccattccacccatcggtagcagtgccgggcttctggccctctccagtgctctaggaggtcagtcccatcttccaattaaagatgagaagaagcaccatgacaatgatcaccaaagagacagagactccatcaagagctcttcagtatccccatcagccagtttccgaggtgctgagaagcacagaaactccgcagactactcctcagagagcaaaaagcagaaaactgaagaaaaggaaattgcagctcgttatgacagcgatggtgagaaaagtgatgacaacttggtggttgacgtttccaatgagaatgaaaaatctactactcccgtctcaaagtccaatacccctactccacgaactgatgcgcccaccccaggcagtaactctactcccggattgaggcctgtacctggaaaaccaccaggagttgaccctttggcctcaagcctaaggaccccaatggcagtaccttgtccatatccaactccatttgggattgtgccccatgctggaatgaacggagagctgaccagccccggagcggcctacgctgggctccacaacatctcccctcagatgagcgcagctgctgccgccgccgctgctgctgctgcctatgggagatcacca

SEQ ID NO: 21569 - DNA, 475 bp, Homo sapiens
  misc_feature 1..475: note = ENST00000493163
  source 1..475: mol_type = unassigned DNA; mol_type = unassigned DNA
cccatcggtagcagtgccgggcttctggccctctccagtgctctaggaggtcagtcccatcttccaattaaagatgagaagaagcaccatgacaatgatcaccaaagagacagagactccatcaagcaaaactacttgctgctcataatggatgaaattggagaccaaagaggaagaaccttctgggttcctgtcagtctaaatcctgattttaaaagacattcacctgccatgctagtgttgtgtgcttctactggtaggaaaagctaataactaccctgacgagctcaacgagtggcccgaggactgtgatctcacagtttaccgtttttgcagagagcctcttttattttcgtgtcagattatctgtaaaatggacttctccctccagtgttgtaaaccataacaattctggcattcctctaattgtgtggggagagggagtatacccaacagatgcttgtcgagcaggaga

SEQ ID NO: 21570 - DNA, 526 bp, Homo sapiens
  misc_feature 1..526: note = ENST00000463431
  source 1..526: mol_type = unassigned DNA; mol_type = unassigned DNA
atacagaaccttcccactgctgcagagagttctattggatgatgctgcgtctctgacagactctgatgaggcttgctggttctgacattccttctggctaaaactgactcctgatactcaaaagcaaggttcccctggtttcatagaaaacaagagctcttcagtatccccatcagccagtttccgaggtgctgagaagcacagaaactccgcagactactcctcagagagcaaaaagcagaaaactgaagaaaaggaaattgcagctcgttatgacagcgatggtgagaaaagtgatgacaacttggtggttgacgtttccaatgaggatccatcttcccctcgagggagcccagcacattcccccagagagaatggcctagacaagacacgcctgctcaagaaagatgccccgattagtccagcctctattgcatcttccagcagtactccctcctccaaatccaaagaacttagccttaatgaaaaatctactactcccgtctcaaagtccaatacccctact

SEQ ID NO: 21571 - DNA, 574 bp, Homo sapiens
  misc_feature 1..574: note = ENST00000495170
  source 1..574: mol_type = unassigned DNA; mol_type = unassigned DNA
tttctcctatctcctcttaacagctttgcaagtatatgctaaagaataaaaagaaaagaaagtctcaagtgacttaaaaatcactcggctaaatagatgataatttctcaaccatgcttcctctccttctaattccagagctcttcagtatccccatcagccagtttccgaggtgctgagaagcacagaaactccgcagactactcctcagagagcaaaaagcagaaaactgaagaaaaggaaattgcagctcgttatgacagcgatggtgagaaaagtgatgacaacttggtggttgacgtttccaatgaggatccatcttcccctcgagggagcccagcacattcccccagagagaatggcctagacaagacacgcctgctcaagaaagatgccccgattagtccagcctctattgcatcttccagcagtactccctcctccaaatccaaagaacttagccttaatgaaaaatctactactcccgtctcaaagtccaatacccctactccacgaactgatgcgcccaccccaggcagtaactctactcccggattgaggcctgtacctggaa

SEQ ID NO: 21572 - DNA, 497 bp, Homo sapiens
  misc_feature 1..497: note = ENST00000467142
  source 1..497: mol_type = unassigned DNA; mol_type = unassigned DNA
agctcttcagtatccccatcagccagtttccgaggtgctgagaagcacagaaactccgcagactactcctcagagagcaaaaagcagaaaactgaagaaaaggaaattgcagctcgttataatgaaaaatctactactcccgtctcaaagtccaatacccctactccacgaactgatgcgcccaccccaggcagtaactctactcccggattgaggcctgtacctggaaaaccaccaggagttgaccctttggcctcaagcctaaggaccccaatggcagtaccttgtccatatccaactccatttgggattgtgccccatgctggaatgaacggagagctgaccagccccggagcggcctacgctgggctccacaacatctcccctcagatgagcgcagctgctgccgccgccgctgctgctgctgcctatgggagatcaccagtggtgggatttgatccacaccatcacatgcgtgtgccagcaatacctccaaa

SEQ ID NO: 21573 - DNA, 1028 bp, Homo sapiens
  misc_feature 1..1028: note = ENST00000496114
  source 1..1028: mol_type = unassigned DNA; mol_type = unassigned DNA
agccagtttccgaggtgctgagaagcacagaaactccgcagactactcctcagagagcaaaaagcagaaaactgaagaaaaggaaattgcagctcgttatgacagcgatggtgagaaaagtgatgacaacttggtggttgacgtttccaatgaggatccatcttcccctcgagggagcccagcacattcccccagagagaatggcctagacaagacacgcctgctcaagaaagatgccccgattagtccagcctctattgcatcttccagcagtactccctcctccaaatccaaagaacttagccttaatgaaaaatctactactcccgtctcaaagtccaatacccctactccacgaactgatgcgcccaccccaggcagtaactctactcccggattgaggcctgtacctggaaaaccaccaggagttgaccctttggcctcaagcctaaggaccccaatggcagtaccttgtccatatccaactccatttgggattgtgccccatgctggaatgaacggagagctgaccagccccggagcggcctacgctgggctccacaacatctcccctcagatgagcgcagctgctgccgccgccgctgctgctgctgcctatgggagatcaccagtggtgggatttgatccacaccatcacatgcgtgtgccagcaatacctccaaacctgacaggcattccaggaggaaaaccgaccaaatgcttttaccacctgagggctttccctggaaatgaactggagatggaactgccaagagatactcacagagcatactccttccatgttagcgcagatggtcagatgcagcctgtcccttttccacccgacgccctcatcggacctggaatcccccggcatgctcgccagatcaacaccctcaaccacggggaggtggtgtgcgcggtgaccatcagcaaccccacgagacacgtgtacacgggtgggaagggctgcgtcaaggtctgggacatcagccacccaggcaataagagtcctgtctcccagctcg

SEQ ID NO: 21574 - DNA, 632 bp, Homo sapiens
  misc_feature 1..632: note = ENST00000417836
  source 1..632: mol_type = unassigned DNA; mol_type = unassigned DNA
ggagcccagcacattcccccagagagaatggcctagacaagacacgcctgctcaagaaagatgccccgattagtccagcctctattgcatcttccagcagtactccctcctccaaatccaaagaacttagccttaagagggatatggggaaattgagtgaaacacgtcttagcgaagatgaacaatgcacattggggttacagagatggttttgtcgcctgtggtttatgaatgaaaaatctactactcccgtctcaaagtccaatacccctactccacgaactgatgcgcccaccccaggcagtaactctactcccggattgaggcctgtacctggaaaaccaccaggagttgaccctttggcctcaagcctaaggaccccaatggcagtaccttgtccatatccaactccatttgggattgtgccccatgctggaatgaacggagagctgaccagccccggagcggcctacgctgggctccacaacatctcccctcagatgagcgcagctgctgccgccgccgctgctgctgctgcctatgggagatcaccagtggtgggatttgatccacaccatcacatgcgtgtgccagcaatacctccaaacctgacaggcattccaggaggaaaa

SEQ ID NO: 21575 - DNA, 672 bp, Homo sapiens
  misc_feature 1..672: note = ENST00000478290
  source 1..672: mol_type = unassigned DNA; mol_type = unassigned DNA
cctcaagcctaaggaccccaatggcagtaccttgtccatatccaactccatttgggattgtgccccatgctggaatgaacggagagctgaccagccccggagcggcctacgctgggctccacaacatctcccctcagatgagcgcagctgctgccgccgccgctgctgctgctgcctatgggagatcaccagtggtgggatttgatccacaccatcacatgcgtgtgccagcaatacctccaaacctgacaggcattccaggaggaaaaccagcatactccttccatgttagcgcagatggtcagatgcagcctgtcccttttccacccgacgccctcatcggacctggaatcccccggcatgctcgccagatcaacaccctcaaccacggggaggtggtgtgcgcggtgaccatcagcaaccccacgagacacgtgtacacgggtgggaagggctgcgtcaaggtctgggacatcagccacccaggcaataagagtcctgtctcccagctcgactgtctgatcttttctctgggctactgcccaactggagagtggcttgcagtggggatggagaacagcaatgtggaagttttgcatgtcaccaagccagacaaataccaactacatcttcatgagagctgtgtgctgtcgctcaagtttgcccattgtg

SEQ ID NO: 21576 - DNA, 4871 bp, Homo sapiens
  misc_feature 1..4871: note = ENST00000376544
  source 1..4871: mol_type = unassigned DNA; mol_type = unassigned DNA
ggagagctcgccagagcgctcgcatggcgggccggtgattgtagtcaatctggccgtattctcaggcagggtcgcccggggcggactacatctcccgggatgctgcgcggccgccccgcggaagattgtgaatatgtatcagaatgttaatgattagctgctgctaaatttggtcaaagaagtcacctacacagagcgtgttgttagagctgtgctgagcgggtgtttgggttgttggctgctttcttccccctttctcacacacttgtatattattttgaggtggtgttcgcagagtttgaaaggagagagaattaaaaaaaaaagccgcaagcgtttcactcttttatttttataatccccttcaatttggggttaaaaaaaagacaagaaaacaggaaggaagagaaataaggaaatgagatgtggtaaaagaagctaaaaggtgccttttaaaagatcgttgctgtgaagtgaaaaaaatctccagagaaaccaaaaagcaccgccgagacctcttccgaaccaaaggagtttgtgtttgcttttagggaagaagaaagatcattcattcggaggaataacaaccaattaaaagacaaataaaaaaagtttggagtgggacgcagagcgagcgagaggagctgccggcgggcggtggggcgcggagcccgcactttcccggccgggtgagcggcggccgcggcgccgggctcggcgggtgcgcctcggcggagcgaacgtcggagcgttgccttgggagacgcgcgccggacaatgcccgcggcgggccagtgacgcccgcggggaatgcggagcggcccggcagccggcacccagccgccgccgcgcgttcctgccgcccgtgtcacgcgagacccggcgggggccgggaccgcccgagccgcccctcagaccgagccggccgcctccgctgccgcggccgcctcctcttcggggtcattaaagccaatgagccgcgcgcctctgccgagcgcagccaactaaatcggcttggatgattcgcgacctgagcaagatgtacccgcagaccagacacccagcaccgcatcagcctgctcaaccctttaaatttacaatttccgaatcctgtgatcggattaaggaagagtttcagtttttacaggctcaataccacagtctgaagctggaatgtgagaaactcgccagtgagaagacagagatgcagcggcattatgtcatgtattatgaaatgtcctatgggttgaatatagaaatgcacaagcaggcagagattgtcaagaggctgaatgctatctgtgcacaagtcattcctttcctgtcccaagagcaccagcaacaagtggtgcaggctgtggaacgggccaagcaggtgaccatggcagaactgaacgccatcattgggcaacaactccaggcccagcatttatcacatggacatggtctccccgtacctctgactccacacccttcagggctccagccccctgccattccacccatcggtagcagtgccgggcttctggccctctccagtgctctaggaggtcagtcccatcttccaattaaagatgagaagaagcaccatgacaatgatcaccaaagagacagagactccatcaagagctcttcagtatccccatcagccagtttccgaggtgctgagaagcacagaaactccgcagactactcctcagagagcaaaaagcagaaaactgaagaaaaggaaattgcagctcgttataatgaaaaatctactactcccgtctcaaagtccaatacccctactccacgaactgatgcgcccaccccaggcagtaactctactcccggattgaggcctgtacctggaaaaccaccaggagttgaccctttggcctcaagcctaaggaccccaatggcagtaccttgtccatatccaactccatttgggattgtgccccatgctggaatgaacggagagctgaccagccccggagcggcctacgctgggctccacaacatctcccctcagatgagcgcagctgctgccgccgccgctgctgctgctgcctatgggagatcaccagtggtgggatttgatccacaccatcacatgcgtgtgccagcaatacctccaaacctgacaggcattccaggaggaaaaccagcatactccttccatgttagcgcagatggtcagatgcagcctgtcccttttccacccgacgccctcatcggacctggaatcccccggcatgctcgccagatcaacaccctcaaccacggggaggtggtgtgcgcggtgaccatcagcaaccccacgagacacgtgtacacgggtgggaagggctgcgtcaaggtctgggacatcagccacccaggcaataagagtcctgtctcccagctcgactgtctgaacagggataactacatccgttcctgcagattgctccctgatggtcgcaccctaattgttggaggggaagccagtactttgtccatttgggacctggcggctccaaccccacgcatcaaggcagagctgacatcctcggcccccgcctgctatgccctggccatcagccccgattccaaggtctgcttctcatgctgcagcgacggcaacatcgctgtgtgggatctgcacaaccagaccttggtgaggcaattccagggccacacagatggagccagctgtattgacatttctaatgatggcaccaagctctggacaggtggtttggacaacacggtcaggtcctgggacctgcgcgaggggcggcagctgcagcagcacgacttcacctcccagatcttttctctgggctactgcccaactggagagtggcttgcagtggggatggagaacagcaatgtggaagttttgcatgtcaccaagccagacaaataccaactacatcttcatgagagctgtgtgctgtcgctcaagtttgcccattgtggcaaatggtttgtaagcactggaaaggacaaccttctgaatgcctggagaacaccttatggggccagtatattccagtccaaagaatcctcatcggtgcttagctgtgacatctccgtggacgacaaatacattgtcactggctctggggataagaaggccacagtttatgaagttatttattaaagacaaatcttcatgcagactggacttctcctcctggtagcactttgctctgtcatcctttttgttcacccccatccccgcatctaaaaccaaggatttcagatactcattgcagttgtggagtttaatcccctttcttaacctcacttcccacttgctattgaattgtgaatagtcattaaaaacctgtgataccaaatcttcagctgtctacttggaagaacatggaataagcatacttaacagtgaaaagaatctttaattatgtattatatctgtaatatatttattttgtttaaagaaggctttctaacaatgactgactaaataaagctgtctgctcctgcattgataatgaaggtgcgttgtatttgatacccctccccccctttttttggcaaaggaggggaaaggaaggtttaaaataattgatttaaaatgtcactaagtgtagactgatgactgtatagagatgtgaaatgtataattacacatggaagcaatatgttgctgtgttgttattaggttttttttgtttttgttttctacatcttttaaagacttttggaaatttggctgaacaattagaacacaacaggccaactcatactcatttggatctatttagacaacgttaaccaatatatctatagctttagattatattcgataaaagtaattggactttttttctttttttgactcgttgacaagtgtctttgtaatatgtttttagttccctttttttgttgtattataggcagatgaacaaattaaatttggcctcaaagagagaacttactcccttctggatatttttgccacatttctttgcaaaaggagatatatatatctttagtcagttttgttgttatgagaaattatgggttattttgtggcatgctctttgggagctgcacagttatggggaggactcccactgctgtgcaagttaagtcttttacaaaacaaggacagcagaggagggtttgcagagacctccctctgaaaaacacaaagaatggactctctcctgggatgaggacttgctttctttacctccggttctttccatgtcttagttggatgtccctgaaatggacacaggctgtgccattgtgccagaaacattgtgttatcttttatgttgttgttgttgctgttaaactataatatgtgacttctttttttattattttttgtttgaatgctttaaaaatcttttaagtctgtggatctgctgatgtacagtgcctttgctgctatggatcaaaatcaaaagaaccgtgtagatatactttattgtataagtagaaaattacttaatttcatactagaaatggatggatgctgcaagttgaaatggactgtccattgacgttcctaatgtggtagcagaaaaaaaaaaatggtgtcttaagtgcttagtgtttgatgtcattaacagtttcgtaaaactctacagtgtagaaagattttgatactaaactgtgcgttgtacatagttctaatgcattgtattgaccaccagtacttctataatggtagattgtttgtgaattcagacttttaagcattaaacataaataacttctagtatgcttatttttctaattctttgtcttgatgacattagtttattttttatctttggctgtgccactcctatatattaaaaatgcctagttttttcaagggagattgttgttaaagtaaagtggttttttttgttgttaaa

SEQ ID NO: 21577 - DNA, 2100 bp, Homo sapiens
  misc_feature 1..2100: note = ENST00000246112
  source 1..2100: mol_type = unassigned DNA; mol_type = unassigned DNA
attgatctgcttcgcggtccaggtggcggctgggtggggcctgggcgggacggggcggggacaaggcgggacgaggcggggcccgatgggtcaaatggcccccggtgggggaaggaggagtttcctcttggcctgaacttggctgacctccgcagcttccgcccgactctggctaaagtcttggaggctactgccttgaagatgacctctagggaccagcccagacccaagggccccccgaaaagcacttcgccttgtcctgggatctcgaactctgagagctctccgacgctgaattatcagggcattctaaatcggctcaagcagttccccaggttttctcctcattttgctgcggagttggagagcatttactactcgctgcacaagatccagcaggatgtggcagaacatcacaagcagataggaaacgtcttacagattgtggagagctgcagccaactccagggtttccagtctgaggaggtctcacctgctgaaccagccagccctgggacgccccagcaggtgaaggacaagaccctgcaggagtcgagctttgaggacatcatggccaccaggtcctccgactggctccggcggcctttgggggaggacaatcagccggagacccagctgttctgggacaaggagccttggttttggcacgacactctgaccgagcaactctggcggatttttgccggcgtccacgatgagaaggcaaagcccagagacagacagcaggcaccaggcctggggcaggaaagcaaggcaccaggatcctgtgacccaggaacagacccatgtcctgaagatgcctccacccccaggccacctgaggcctcctccagtccccctgagggttcccaagacaggaacacaagttggggtgtggtccaggagcctcctggaagagcctctcggtttctacagtccatatcctgggaccctgaggactttgaagatgcatggaagaggccagatgccttgcccgggcagtcaaagagactcgccgtcccgtgcaaactggaaaagatgcggatcttggcacacggggagctcgtgctcgccacggccatcagcagcttcacgcggcacgtgttcacctgtggcagaagaggcatcaaggtgtggagcctgactggacaggtggctgaggacaggttccctgagagccacctgcctatacagacccctggggccttcctgcgcacctgcctgctgtcctcaaacagcaggagcctgctcaccggtggctacaacctggccagcgtgagcgtgtgggacctggcggcgccctccctgcatgtgaaggagcagttgccctgtgcaggtctcaactgccaggccctggatgccaacctggatgccaacctggccttcgccagcttcaccagtggtgtggtcaggatctgggacctgcgggatcagagtgtggtcagggacctcaagggttatcctgatggagtcaagagtatcgtggtcaagggctacaacatctggactgggggtccggatgcctgtctgcggtgctgggaccagaggaccatcatgaaacctctggagtaccaattcaagtctcagataatgagcctgtcccacagcccccaggaggactgggtgctgctgggcatggccaatggccagcagtggctgcaaagcaccagcgggagccagcggcacatggtggggcaaaaagacagcgtcatcctgagcgtcaagttctccccctttggccagtggtgggcaagcgttggaatggacgacttccttggcgtctacagcatgccggcggggacaaaagtgttcgaggtgcctgagatgtctccagtcacgtgctgtgacgtctcttccaacaaccgcctcgttgtcacaggctccggggagcacgcctccgtgtaccagatcacctactgaggggcctcgctgctgtcatcccactccggctcctcttttcatccccccccttccccccccccaacaagggggacatggtggagggaagcgggaaggctcttctgtggcatcgcacgatctagtctgtggtgtagactggtcgccatcacgtgtaataaagcacccgggaaaggcagagtg

SEQ ID NO: 21578 - DNA, 582 bp, Homo sapiens
  misc_feature 1..582: note = ENST00000453329
  source 1..582: mol_type = unassigned DNA; mol_type = unassigned DNA
aaatggcccccggtgggggaaggaggagtttcctcttggcctgaacttggctgacctccgcagcttccgcccggtgagggacactctggctaaagtcttggaggctactgccttgaagatgacctctagggaccagcccagacccaagggccccccgaaaagcacttcgccttgtcctgggatctcgaactctgagagctctccgacgctgaattatcagggcattctaaatcggctcaagcagttccccaggttttctcctcattttgctgcggagttggagagcatttactactcgctgcacaagatccagcaggatgtggcagaacatcacaagcagataggaaacgtcttacagattgtggagagctgcagccaactccagggtttccagtctgaggaggtctcacctgctgaaccagccagccctgggacgccccagcaggtgaaggacaagaccctgcaggagtcgagctttgaggacatcatggccaccaggtcctccgactggctccggcggcctttgggggaggacaatcagccggagacccagctgttctgggacaaggagccttggttttg

SEQ ID NO: 21579 - DNA, 456 bp, Homo sapiens
  misc_feature 1..456: note = ENST00000482627
  source 1..456: mol_type = unassigned DNA; mol_type = unassigned DNA
gtgggggaaggaggagtttcctcttggcctgaacttggctgacctccgcagcttccgcccgactctggctaaagtcttggaggctactgccttgaagatgacctctagggaccagcccagacccaagggccccccgaaaagcacttcgccttgtcctgggatctcgaactctgagagctctccgacgctgaattatcagggcattctaaatcggctcaagcagttccccaggtgagagcaattccaggggccggaggtctcacgctgggaaggagccccacctggcctctctcccgggggtcctagtgagtggtctagaggctgctggcccaagagccaggctcaggaacaggaagccatgcagatacccagcatggagaacccggcaatacccatcccagcttttgattaaacaaaattaccaacaaatattaaaattttgattttcctgttcga

SEQ ID NO: 21580 - DNA, 785 bp, Homo sapiens
  misc_feature 1..785: note = ENST00000468176
  source 1..785: mol_type = unassigned DNA; mol_type = unassigned DNA
agtttcctcttggcctgaacttggctgacctccgcagcttccgcccgactctggctaaagtcttggaggctactgccttgaagatgacctctagggaccagcccagacccaagggccccccgaaaagcacttcgccttgtcctgggatctcgaactctgagagctctccgacgctgaattatcagggcattctaaatcggctcaagcagttccccaggttttctcctcattttgctgcggagttggagagcatttactactcgctgcacaagatccagcaggatgtggcagaacatcacaagcagataggaaacgtcttacagattgtggagagctgcagccaactccagggtttccagtctgaggaggtctcacctgctgaaccagccagccctgggacgccccagcaggtgaaggacaagaccctgcaggagtcgagctttgaggacatcatggccaccaggtcctccgactggctccggcggcctttgggggaggacaatcagccggagacccagctgttctgggacaaggagccttggttttggcacgacactctgaccgagcaactctggcggatttttgccggcgtccacgatgagaaggcaaagcccagagacagacagcaggcaccaggcctggggcaggaaagcaaggcaccaggatcctgtgacccaggaacagacccatgtcctgaagatgcctccacccccaggccacctgaggcctcctccagtccccctgagggttcccaagacaggaacacaagttggggtgtggtccag

SEQ ID NO: 21581 - DNA, 1883 bp, Homo sapiens
  misc_feature 1..1883: note = ENST00000452088
  source 1..1883: mol_type = unassigned DNA; mol_type = unassigned DNA
gaacttggctgacctccgcagcttccgcccggtgagggacccttgtcctgggatctcgaactctgagagctctccgacgctgaattatcagggcattctaaatcggctcaagcagttccccaggttttctcctcattttgctgcggagttggagagcatttactactcgctgcacaagatccagcaggatgtggcagaacatcacaagcagataggaaacgtcttacagattgtggagagctgcagccaactccagggtttccagtctgaggaggtctcacctgctgaaccagccagccctgggacgccccagcaggtgaaggacaagaccctgcaggagtcgagctttgaggacatcatggccaccaggtcctccgactggctccggcggcctttgggggaggacaatcagccggagacccagctgttctgggacaaggagccttggttttggcacgacactctgaccgagcaactctggcggatttttgccggcgtccacgatgagaaggcaaagcccagagacagacagcaggcaccaggcctggggcaggaaagcaaggcaccaggatcctgtgacccaggaacagacccatgtcctgaagatgcctccacccccaggccacctgaggcctcctccagtccccctgagggttcccaagacaggaacacaagttggggtgtggtccaggagcctcctggaagagcctctcggtttctacagtccatatcctgggaccctgaggactttgaagatgcatggaagaggccagatgccttgcccgggcagtcaaagagactcgccgtcccgtgcaaactggaaaagatgcggatcttggcacacggggagctcgtgctcgccacggccatcagcagcttcacgcggcacgtgttcacctgtggcagaagaggcatcaaggtgtggagcctgactggacaggtggctgaggacaggttccctgagagccacctgcctatacagacccctggggccttcctgcgcacctgcctgctgtcctcaaacagcaggagcctgctcaccggtggctacaacctggccagcgtgagcgtgtgggacctggcggcgccctccctgcatgtgaaggagcagttgccctgtgcaggtctcaactgccaggccctggatgccaacctggatgccaacctggccttcgccagcttcaccagtggtgtggtcaggatctgggacctgcgggatcagagtgtggtcagggacctcaagggttatcctgatggagtcaagagtatcgtggtcaagggctacaacatctggactgggggtccggatgcctgtctgcggtgctgggaccagaggaccatcatgaaacctctggagtaccaattcaagtctcagataatgagcctgtcccacagcccccaggaggactgggtgctgctgggcatggccaatggccagcagtggctgcaaagcaccagcgggagccagcggcacatggtggggcaaaaagacagcgtcatcctgagcgtcaagttctccccctttggccagtggtgggcaagcgttggaatggacgacttccttggcgtctacagcatgccggcggggacaaaagtgttcgaggtgcctgagatgtctccagtcacgtgctgtgacgtctcttccaacaaccgcctcgttgtcacaggctccggggagcacgcctccgtgtaccagatcacctactgaggggcctcgctgctgtcatcccactccggctcctcttttcatccccccccttccccccccccaacaagggggacatggtggagggaagcgggaaggctcttctgtggcatcgcacgatctagtctgtggtgtagactggtcgccatcacgtgtaataaagcacccgggaaaggca

SEQ ID NO: 21582 - DNA, 582 bp, Homo sapiens
  misc_feature 1..582: note = ENST00000591953
  source 1..582: mol_type = unassigned DNA; mol_type = unassigned DNA
atacgcagggggtgagggctccagagcaaaggagccacttcggttgcagccagacccaggagggtccctgcccagcccccactgcagggggccccaggatccctggcagcccagcctggcctgtggtcctgggcagtccgcttcccccacccgctgcttccagttccgggctttcccagccgcctcgctgtgctttcaaaatcgccatcagcacagccccctcctccgacagcccgcctgccactctcccccgggagggctgctagcaggcacaagggagccacacttttcatgctgagcgcattaaagtgccgataggaaacgtcttacagattgtggagagctgcagccaactccagggtttccagtctgaggaggtctcacctgctgaaccagccagccctgggacgccccagcaggtgaaggacaagaccctgcaggagtcgagctttgaggacatcatggccaccaggtcctccgactggctccggcggcctttgggggaggacaatcagccggagacccagctgttctgggacaaggagccttggttttggcacgacactctgaccgagcaactct

SEQ ID NO: 21583 - DNA, 1270 bp, Homo sapiens
  misc_feature 1..1270: note = ENST00000478073
  source 1..1270: mol_type = unassigned DNA; mol_type = unassigned DNA
actctcccccgggagggctgctagcaggcacaagggagccacacttttcatgctgagcgcattaaagtgccggtaaattgcgcattaacgaggcggggtgaattggagagggctcccctgggatttgctgctgctgggcgggctcagctgggaaatccatcactggctgccccaggaggcatcagcctggagtccccccccccccgcggggctccgatggagggtctcccctcccggcccctccctccgccgtcctgctaaggaaacagacagataggaaacgtcttacagattgtggagagctgcagccaactccagggtttccagtctgaggaggtctcacctgctgaaccagccagccctgggacgccccagcaggtgaaggacaagaccctgcaggagtcgagctttgaggacatcatggccaccaggtcctccgactggctccggcggcctttgggggaggacaatcagccggagacccagctgttctgggacaaggagccttggttttggcacgacactctgaccgagcaactctggcggatttttgccggcgtccacgatgagaaggcaaagcccagagacagacagcaggcaccaggcctggggcaggaaagcaaggcaccaggatcctgtgacccaggaacagacccatgtcctgaagatgcctccacccccaggccacctgaggcctcctccagtccccctgagggttcccaagacaggaacacaagttggggtgtggtccaggagcctcctggaagagcctctcggtttctacagtccatatcctgggaccctgaggactttgaagatgcatggaagaggccagatgccttgcccgggcagtcaaagagactcgccgtcccgtgcaaactggaaaagatgcggatcttggcacacggggagctcgtgctcgccacggccatcagcagcttcacgcggcacgtgttcacctgtggcagaagaggcatcaaggtgtggagcctgactggacaggtggctgaggacaggttccctgagagccacctgcctatacagacccctggggccttcctgcgcacctgcctgctgtcctcaaacagcaggagcctgctcaccggtggctacaacctggccagcgtgagcgtgtgggacctggcggcgccctccctgcatgtgaaggagcagttgccctgtgcaggtctcaactgccaggccctggatgccaacctggatgccaacctggccttcgccagcttcaccagtggtgtggtcaggatctggg

SEQ ID NO: 21584 - DNA, 1188 bp, Homo sapiens
  misc_feature 1..1188: note = ENST00000474207
  source 1..1188: mol_type = unassigned DNA; mol_type = unassigned DNA
acaagggagccacacttttcatgctgagcgcattaaagtgccgataggaaacgtcttacagattgtggagagctgcagccaactccagggtttccagtctgaggaggtctcacctgctgaaccagccagccctgggacgccccagcaggtgaaggacaagaccctgcaggagtcgagctttgaggacatcatggccaccaggtcctccgactggctccggcggcctttgggggaggacaatcagccggagacccagctgttctgggacaaggagccttggttttggcacgacactctgaccgagcaactctggcggatttttgccggcgtccacgatgagaaggcaaagcccagagacagacgtgagtgtccctgagggtgagggggaaggggcagccacaggctgcgtctcaggggctgtgcagtgaaccctgctgttctctctgtccccctcctcctctccgttgtcatggtgacagagcaggcaccaggcctggtgagtaaacaacctcagctctatccagaggggtgggcttccgggcaggcggttgggctcccccaggtcagggcactggggttcctgtgggatttgtcttccttccatcctgcccctcgggtcccccgggggggacttgggtgatccaggaggctatactggagtagcccaggacccacagcccagggcttccaggaccctataccctgactctctctctgcaactctgcctggacccgcagacaggaccccaggcagctgacaagccctgtgcaagctgcccaggaatccgaggtcttctggtcctaacaggcaggtcagcaggcctgatgagacttttccattttccaggggcaggaaagcaaggcaccaggatcctgtgacccaggaacagacccatgtcctgaagatgcctccagtaatcccagcgggcaggggccgaccgactccaggcgggatggggtgggggcatcctgtgctgaggagccaatgcaagccgcttagcccctcttgtctccccactagcccccaggccacctgaggcctcctccagtccccctgagggttcccaagacaggaacacaagttggggtgtggtccaggtgagacccaggcccgagctggtagcccagcgtgaaggctgcccagggtggggtagaggaggtgggcacagatgtgcggggaggctgggg

SEQ ID NO: 21585 - DNA, 1559 bp, Homo sapiens
  misc_feature 1..1559: note = ENST00000497878
  source 1..1559: mol_type = unassigned DNA; mol_type = unassigned DNA
ttccgggcaggcggttgggctcccccaggggcaggaaagcaaggcaccaggatcctgtgacccaggaacagacccatgtcctgaagatgcctccagtaatcccagcgggcaggggccgaccgactccaggcgggatggggtgggggcatcctgtgctgaggagccaatgcaagccgcttagcccctcttgtctccccactagcccccaggccacctgaggcctcctccagtccccctgagggttcccaagacaggaacacaagttggggtgtggtccaggtgagacccaggcccgagctggtagcccagcgtgaaggctgcccagggtggggtagaggaggtgggcacagatgtgcggggaggctgggggcagctgtgatctcccccgcctgcaggagcctcctggaagagcctctcggtttctacagtccatatcctgggaccctgaggactttgaagatgcatggaagaggccagatgccttgcccgggcagtcaaagagactcgccgtcccgtgcaaactggaaaagatgcggatcttggcacacggggagctcgtgctcgccacggccatcagcagcttcacgcggcacgtgttcacctgtggcagaagaggcatcaaggtgtggagcctgactggacaggtggctgaggacaggttccctgagagccacctgcctatacagacccctggggccttcctgcgcacctgcctgctgtcctcaaacagcaggagcctgctcaccggtggctacaacctggccagcgtgagcgtgtgggacctggcggcgccctccctgcatgtgaaggagcagttgccctgtgcaggtctcaactgccaggccctggatgccaacctggatgccaacctggccttcgccagcttcaccagtggtgtggtcaggatctgggacctgcgggatcagagtgtggtcagggacctcaagggttatcctgatggagtcaagagtatcgtggtcaagggctacaacatctggactgggggtccggatgcctgtctgcggtgctgggaccagaggaccatcatgaaacctctggagtaccaattcaagtctcagataatgagcctgtcccacagcccccaggaggactgggtgctgctgggcatggccaatggccagcagtggctgcaaagcaccagcgggagccagcggcacatggtggggcaaaaagacagcgtcatcctgagcgtcaagttctccccctttggccagtggtgggcaagcgttggaatggacgacttccttggcgtctacagcatgccggcggggacaaaagtgttcgaggtgcctgagatgtctccagtcacgtgctgtgacgtctcttccaacaaccgcctcgttgtcacaggctccggggagcacgcctccgtgtaccagatcacctactgaggggcctcgctgctgtcatcccactccggctcctcttttcatccccccccttccccccccccaacaagggggacatggtggagggaagcgggaaggctcttctgtggcatcgcacgatctagtctgtggtgtagactggtcgccatc

SEQ ID NO: 21586 - DNA, 713 bp, Homo sapiens
  misc_feature 1..713: note = ENST00000469572
  source 1..713: mol_type = unassigned DNA; mol_type = unassigned DNA
gagagggaccccaaaatctgaaaaagaagcccctctaggccttgatgtgtggctcccactgggcaaaggggctcacaagcaggtcagttaccccaaggcctcccctcccaagatcctgggaccctgaggactttgaagatgcatggaagaggccagatgccttgcccgggcagtcaaagagactcgccgtcccgtgcaaactggaaaagatgcggatcttggcacacggggagctcgtgctcgccacggccatcagcagcttcacgcggcacgtgttcacctgtggcagaagaggcatcaaggtgtggagcctgactggacaggtggctgaggacaggttccctgagagccacctgcctatacagacccctggggccttcctgcgcacctgcctgctgtcctcaaacagcaggagcctgctcaccggtggctacaacctggccagcgtgagcgtgtgggacctggcggcgccctccctgcatgtgaaggagcagttgccctgtgcaggtctcaactgccaggccctggatgccaacctggatgccaacctggccttcgccagcttcaccagtggtgtggtcaggatctgggacctgcgggatcagagtgtggtcagggacctcaagggttatcctgatggagtcaagagtatcgtggtcaagggctacaacatctggactgggggtccggatgcctgtctgcggtgctgggac

SEQ ID NO: 21587 - DNA, 6708 bp, Homo sapiens
  misc_feature 1..6708: note = ENST00000061240
  source 1..6708: mol_type = unassigned DNA; mol_type = unassigned DNA
ctcacacttttgctctcttgcagtcagttgctttgctggcttctgcaggcttttaaggtctcgcggcgtagaaatgcctggcccccacccccttcctcggtctcccctttcaattcagatgtgctgatgtgcagaccggattcatcttctcggagctgcggcggcggctttgggctcaggcggcggcggctcgcgctcggccgcggagtcctggcagcagcggggacgcggcgcgggagtccgagctctggtggcagctgagcccgcggggcgccgctcgccgagccgcggccgcgggaagttcggcagccagaaggacgacctggcaggctgcgagcgccagcgccgccagagccgagtttgcctgcgccctccccgcctccgagtgcagagttccttacctgccctccgcccacccgtgggcccctagccaacttctccctgcgactgggggtaacaggcagtgcttgccctctctactgtcccggcggcatccacatgtttccggacacctgagcaccccggtcccgccgaggagcctccgggtggggagaagagcaccggtgcccctagccccgcacatcagcgcggaccgcggctgcctaacctctgggtcccgtcccctccttttcctccgggggaggaggatggggttgggaacgctttccccgaggatgctcgtgtggctggtggcctcggggattgttttctacggggagctatgggtctgcgctggcctcgattatgattacacttttgatgggaacgaagaggataaaacagagactatagattacaaggacccgtgtaaagccgctgtattttggggcgatattgccttagatgatgaagacttaaatatctttcaaatagataggacaattgaccttacgcagaacccctttggaaaccttggacataccacaggtggacttggagaccatgctatgtcaaagaagcgaggggccctctaccaacttatagacaggataagaagaattggctttggcttggagcaaaacaacacagttaagggaaaagtacctctacaattctcagggcaaaatgagaaaaatcgagttcccagagccgctacatcaagaacggaaagaatatggcctggaggcgttattccttatgttataggaggaaacttcactggcagccagagagccatgttcaagcaggccatgaggcactgggaaaagcacacatgtgtgactttcatagaaagaagtgatgaagagagttacattgtattcacctataggccttgtggatgctgctcctatgtaggtcggcgaggaaatggacctcaggcaatctctatcggcaagaactgtgataaatttgggattgttgttcatgaattgggtcatgtgataggcttttggcatgaacacacaagaccagatcgagataaccacgtaactatcataagagaaaacatccagccaggtcaagagtacaattttctgaagatggagcctggagaagtaaactcacttggagaaagatatgatttcgacagtatcatgcactatgccaggaacaccttctcaagggggatgtttctggataccattctcccctcccgtgatgataatggcatacgtcctgcaattggtcagcgaacccgtctaagcaaaggagatatcgcacaggcaagaaagctgtatagatgtccagcatgtggagaaactctacaagaatccaatggcaacctttcctctccaggatttcccaatggctacccttcttacacacactgcatctggagagtttctgtgaccccaggggagaagattgttttaaattttacaacgatggatctatacaagagtagtttgtgctggtatgactatattgaagtaagagacgggtactggagaaaatcacctctccttggtagattctgtggggacaaattgcctgaagttcttacttctacagacagcagaatgtggattgagtttcgtagcagcagtaattgggtaggaaaaggctttgcagctgtctatgaagcgatctgtggaggtgagatacgtaaaaatgaaggacagattcagtctcccaattatcctgatgactatcgcccgatgaaagaatgtgtgtggaaaataacagtgtctgagagctaccacgtcgggctgacctttcagtcctttgagattgaaagacatgacaattgtgcttatgactacctggaagttagagatggaaccagtgaaaatagccctttgatagggcgtttctgtggttatgacaaacctgaagacataagatctacctccaatactttgtggatgaagtttgtttctgacggaactgtgaacaaagcagggtttgctgctaacttttttaaagaggaagatgagtgtgccaaacctgaccgtggaggctgtgagcagcgatgtctgaacactctgggcagttaccagtgtgcctgtgagcctggctatgagctgggcccagacagaaggagctgtgaagctgcttgtggtggacttcttaccaaacttaacggcaccataaccacccctggctggcccaaggagtaccctcctaataagaactgtgtgtggcaagtggttgcaccaacccagtacagaatttctgtgaagtttgagttttttgaattggaaggcaatgaagtttgcaaatatgattatgtggagatctggagtggtctttcctctgagtctaaactgcatggcaaattctgtggcgctgaagtgcctgaagtgatcacatcccagttcaacaatatgagaattgaattcaaatctgacaatactgtatccaagaagggcttcaaagcacattttttctcagacaaagatgaatgctctaaggataatggtggatgtcagcacgaatgtgtcaacacgatggggagctacatgtgtcaatgccgtaatggatttgtgctacatgacaataaacatgattgcaaggaagctgagtgtgaacagaagatccacagtccaagtggcctcatcaccagtcccaactggccagacaagtacccaagcaggaaagaatgcacttgggaaatcagcgccactcctggccaccgaatcaaattagcctttagtgaatttgagattgagcagcatcaagaatgtgcttatgaccacttagaagtatttgatggagaaacagaaaagtcaccgattcttggacgactgtgtggcaacaagataccagatccccttgtggctactggaaataaaatgtttgttcggtttgtttctgatgcatctgttcaaagaaaaggctttcaagctacacattctacagagtgtggcggacgattgaaagcagaatcaaaaccaagagatctgtactcacatgctcagtttggtgataacaactacccaggacaggttgactgtgaatggctattagtatcagaacggggctctcgacttgaattatccttccagacatttgaagtggaggaagaagcagactgtggctatgactatgtggagctctttgatggtcttgattcaacagctgtggggcttggtcgattctgtggatccgggccaccagaagagatttattcaattggagattcagttttaattcatttccacactgatgacacaatcaacaagaagggatttcatataagatacaaaagcataagatatccagataccacacataccaaaaaataacaccaaaacctctgtcagaacacaaaggaatgtgcataatggagagaagacatattttttttaaaactgaagatattggcacaaatgttttatacaaagagtttgaacaaaaaatccctgtaagaccagaattatctttgtactaaaagagaagtttccagcaaaaccctcatcagcattacaaggatatttgaactccatgcttgatggtattaataaagctggtgaaagggcatcatatacttcaaggaagactctacaagcttttgttcacagcttgaaatagatgcctcacaattcagacagtttaattcaggaactgtgaccctgcagtgttctttttgacaatttgtcaagatttagggacataaaatgatcttgcaggtcgtaaactggaaaacagtattttggttgtcttaggataattgctgactttgtatcttggatacagtgtaaaccagatccatataaggtgaatgtgaaatgggagtcttctgagggtgatttgtactttccatgtgtatgtgtgtgtctggtgtttggaaactgggatatttcagcttcattatttccacttgcaggccagcttaacctctgaaacacaaatgatcttgagaccactttagtgtacttacatttagatgagtttgaaatctcaatggtgtctaattattgcagttaaattctagacatcagttctttaagtctcagaaaacgcccagtgaattggtaaacttagttcttttttttggaagtgctgccttttcacaccaaatccaagaagcctgtgatgtcttatgaaccttatgagaaaactccgaagaggtgtgagcaggattcttctgaatgactgtctggatggttcattactcaagttactgctgctgctattgtctttcctttgttgtcgatctgttattgttgtattattattgttgatgttgtcatggttaatctattttttaaaattgaaatgaagcagaagtaggccttgtgagaactgaaaggtctctttcatttttctcttcctgggattcattttttcaaaacacaatgctggaaaaaaaagatttgtttctgaaagacttcttatggtgctattccataaactttttttcaaacaagtttttgacctttgagccaacccacccgtagactacgaatgtctccctatggctggtagcatttgaagactaaagacttgtcaaatatatcaagagtatatcattgcaagggcagcacttgtcctgtggaacaactacttataatgccttagaattcctgcacatgatcaaacagatcctcctaaaacacaccttttgaaatgttgaacataatagtgtatgttaattaacagctctatgaagaaaatccatttccatgactgaagcattggatataaatatggtgtcctgctttttttgtagaaaatgtaatttgaggatgaattttctgctttaaaggcatgtgtgtttttaaaattaatgaatgtagatgtgtgattgtctgagtgagtgaaactacaagaggtaaaaaataatgggtggttgaaaagttaaaatgtatgtgccaagttctactagaattccatttgaaatagcaccttccttaggtttcatggacaaataatgggaacttctaattttgatcaatcccattaaaaaaaggctctttcctttagagaaactctattttgatgtcaatatagattactgtatgaagtagctttgtgtctgttacctgtccatgagcatacaacattgaatacaattgggtgtattctttcagttttacacaattaaagtatacacacagatgtagcttatctgtttttttcttaaattgttgccctgaaaaaatttcttgcatatgaattgtaaaatgtaaatacatttttataaccaatgttttgatcttattgaatgttactttgaaaatgtataactattgcctgcaatgtagatgagccttttagtagagctgatttattccagtaacttcttccatattttctcactaatctcccgttagccaaaatatgccagaaatgggaaagagaggagaaaaagtcattaacattaacacctatactgttctatactactcctacccgtgtgctaggaatgtgcactagctctttttaaattccatgctacactttgaggactgtcatcatgttctcgttttgtagttcagaaagtgaggctcaaagaatttatgtaaccttcccagagtcacagtgtaaagttagatgttgaaacccagtttatcttatacaaatgagcctctgcttgttctacaaaggtagtagaatcaatctcgacctatataaatagtagattttttatggtgaaactttcccacataaagtaaattttaggggtgaattagagtaaaacttacaggataagcattttgctctttttaagaacagcatgaaatttagaataccaatgatagctatctttaagaatcagaattagtactagaaatttaaaaaaccctatagtttggagttagtatgagccttttgtgaaaataaatatattaaattattttgcctgatgtggtaggggaaatgtattgctctatattaagaaatattctggatattctgattgacatcttattaggccatagtgagctatgctctgcacaactgagaaattaggtatttagaaggcatatagagatgttgtcataactaggtcttcaacgtgaaaattaatttttattgtatcatgtcaagtatcagtttaccacatattatttttatattaattcaacatttgccttaagtgtgttgttaaatgaaagtacagacagcttcattgttgtattgttaataattgttacttactgctccaggcattttattaaattaattttttaaattattttccaccctacatcagtatattggttgtgctttatatttgccaaagtcctaactgactatacatagaaaaaaaaaaaaacactgttctcacttgattttattaaattatttttaaaagtc

SEQ ID NO: 21588 - DNA, 4787 bp, Homo sapiens
  misc_feature 1..4787: note = ENST00000509505
  source 1..4787: mol_type = unassigned DNA; mol_type = unassigned DNA
ccttcctcggtctcccctttcaattcagatgtgctgatgtgcagaccggattcatcttctcggagctgcggcggcggctttgggctcaggcggcggcggctcgcgctcggccgcggagtcctggcagcagcggggacgcggcgcgggagtccgagctctggtggcagctgagcccgcggggcgccgctcgccgagccgcggccgcgggaagttcggcagccagaaggacgacctggcaggctgcgagcgccagcgccgccagagccgagtttgcctgcgccctccccgcctccgagtgcagagttccttacctgccctccgcccacccgtgggcccctagccaacttctccctgcgactgggggtaacaggcagtgcttgccctctctactgtcccggcggcatccacatgtttccggacacctgagcaccccggtcccgccgaggagcctccgggtggggagaagagcaccggtgcccctagccccgcacatcagcgcggaccgcggctgcctaacctctgggtcccgtcccctccttttcctccgggggaggaggatggggttgggaacgctttccccgaggatgctcgtgtggctggtggcctcggggattgttttctacggggagctatgggtctgcgctggcctcgattatgattacacttttgatgggaacgaagaggataaaacagagactatagattacaaggacccgtgtaaagccgctgtattttggggcgatattgccttagatgatgaagacttaaatatctttcaaatagataggacaattgaccttacgcagaacccctttggaaaccttggacataccacaggtggacttggagaccatgctatgtcaaagaagcgaggggccctctaccaacttatagacaggataagaagaattggctttggtatatcaatgtttaaagttgcagacgcttgacttgatgcttggagcaaaacaacacagttaagggaaaagtacctctacaattctcagggcaaaatgagaaaaatcgagttcccagagccgctacatcaagaacggaaagaatatggcctggaggcgttattccttatgttataggaggaaacttcactggcagccagagagccatgttcaagcaggccatgaggcactgggaaaagcacacatgtgtgactttcatagaaagaagtgatgaagagagttacattgtattcacctataggccttgtggatgctgctcctatgtaggtcggcgaggaaatggacctcaggcaatctctatcggcaagaactgtgataaatttgggattgttgttcatgaattgggtcatgtgataggcttttggcatgaacacacaagaccagatcgagataaccacgtaactatcataagagaaaacatccagccaggtcaagagtacaattttctgaagatggagcctggagaagtaaactcacttggagaaagatatgatttcgacagtatcatgcactatgccaggaacaccttctcaagggggatgtttctggataccattctcccctcccgtgatgataatggcatacgtcctgcaattggtcagcgaacccgtctaagcaaaggagatatcgcacaggcaagaaagctgtatagatgtccagcatgtggagaaactctacaagaatccaatggcaacctttcctctccaggatttcccaatggctacccttcttacacacactgcatctggagagtttctgtgaccccaggggagaagattgttttaaattttacaacgatggatctatacaagagtagtttgtgctggtatgactatattgaagtaagagacgggtactggagaaaatcacctctccttggtagattctgtggggacaaattgcctgaagttcttacttctacagacagcagaatgtggattgagtttcgtagcagcagtaattgggtaggaaaaggctttgcagctgtctatgaagcgatctgtggaggtgagatacgtaaaaatgaaggacagattcagtctcccaattatcctgatgactatcgcccgatgaaagaatgtgtgtggaaaataacagtgtctgagagctaccacgtcgggctgacctttcagtcctttgagattgaaagacatgacaattgtgcttatgactacctggaagttagagatggaaccagtgaaaatagccctttgatagggcgtttctgtggttatgacaaacctgaagacataagatctacctccaatactttgtggatgaagtttgtttctgacggaactgtgaacaaagcagggtttgctgctaacttttttaaagaggaagatgagtgtgccaaacctgaccgtggaggctgtgagcagcgatgtctgaacactctgggcagttaccagtgtgcctgtgagcctggctatgagctgggcccagacagaaggagctgtgaagctgcttgtggtggacttcttaccaaacttaacggcaccataaccacccctggctggcccaaggagtaccctcctaataagaactgtgtgtggcaagtggttgcaccaacccagtacagaatttctgtgaagtttgagttttttgaattggaaggcaatgaagtttgcaaatatgattatgtggagatctggagtggtctttcctctgagtctaaactgcatggcaaattctgtggcgctgaagtgcctgaagtgatcacatcccagttcaacaatatgagaattgaattcaaatctgacaatactgtatccaagaagggcttcaaagcacattttttctcagacaaagatgaatgctctaaggataatggtggatgtcagcacgaatgtgtcaacacgatggggagctacatgtgtcaatgccgtaatggatttgtgctacatgacaataaacatgattgcaaggaagctgagtgtgaacagaagatccacagtccaagtggcctcatcaccagtcccaactggccagacaagtacccaagcaggaaagaatgcacttgggaaatcagcgccactcctggccaccgaatcaaattagcctttagtgaatttgagattgagcagcatcaagaatgtgcttatgaccacttagaagtatttgatggagaaacagaaaagtcaccgattcttggacgactgtgtggcaacaagataccagatccccttgtggctactggaaataaaatgtttgttcggtttgtttctgatgcatctgttcaaagaaaaggctttcaagctacacattctacagagtgtggcggacgattgaaagcagaatcaaaaccaagagatctgtactcacatgctcagtttggtgataacaactacccaggacaggttgactgtgaatggctattagtatcagaacggggctctcgacttgaattatccttccagacatttgaagtggaggaagaagcagactgtggctatgactatgtggagctctttgatggtcttgattcaacagctgtggggcttggtcgattctgtggatccgggccaccagaagagatttattcaattggagattcagttttaattcatttccacactgatgacacaatcaacaagaagggatttcatataagatacaaaagcataagatatccagataccacacataccaaaaaataacaccaaaacctctgtcagaacacaaaggaatgtgcataatggagagaagacatattttttttaaaactgaagatattggcacaaatgttttatacaaagagtttgaacaaaaaatccctgtaagaccagaattatctttgtactaaaagagaagtttccagcaaaaccctcatcagcattacaaggatatttgaactccatgcttgatggtattaataaagctggtgaaagggcatcatatacttcaaggaagactctacaagcttttgttcacagcttgaaatagatgcctcacaattcagacagtttaattcaggaactgtgaccctgcagtgttctttttgacaatttgtcaagatttagggacataaaatgatcttgcaggtcgtaaactggaaaacagtattttggttgtcttaggataattgctgactttgtatcttggatacagtgtaaaccagatccatataaggtgaatgtgaaatgggagtcttctgagggtgatttgtactttccatgtgtatgtgtgtgtctggtgtttggaaactgggatatttcagcttcattatttccacttgcaggccagcttaacctctgaaacacaaatgatcttgagaccactttagtgtacttacatttagatgagtttgaaatctcaatggtgtctaattattgcagttaaattctagacatcagttctttaagtctcagaaaacgcccagtgaattggtaaacttagttcttttttttggaagtgctgccttttcacaccaaatccaagaagcctgtgatgtcttatgaaccttatgagaaaactccgaagaggtgtgagcaggattcttctgaatgactgtctggatggttcattactcaagttactgctgctgctattgtctttcctttgttgtcgatctgttattgttgtattattattgttgatgttgtcatggttaatctattttttaaaattgaaatgaagcagaagtaggccttgtgagaactgaaaggtctctttcatttttctcttcctgggattcattttttcaaaacacaatgctggaaaaaaaagatttgtttctgaaagacttcttatggtgctattccataaactttttttcaaacaagtttttgacctttgagccaacccacc

SEQ ID NO: 21589 - DNA, 4818 bp, Homo sapiens
  misc_feature 1..4818: note = ENST00000507499
  source 1..4818: mol_type = unassigned DNA; mol_type = unassigned DNA
ccttcctcggtctcccctttcaattcagatgtgctgatgtgcagaccggattcatcttctcggagctgcggcggcggctttgggctcaggcggcggcggctcgcgctcggccgcggagtcctggcagcagcggggacgcggcgcgggagtccgagctctggtggcagctgagcccgcggggcgccgctcgccgagccgcggccgcgggaagttcggcagccagaaggacgacctggcaggctgcgagcgccagcgccgccagagccgagtttgcctgcgccctccccgcctccgagtgcagagttccttacctgccctccgcccacccgtgggcccctagccaacttctccctgcgactgggggtaacaggcagtgcttgccctctctactgtcccggcggcatccacatgtttccggacacctgagcaccccggtcccgccgaggagcctccgggtggggagaagagcaccggtgcccctagccccgcacatcagcgcggaccgcggctgcctaacctctgggtcccgtcccctccttttcctccgggggaggaggatggggttgggaacgctttccccgaggatgctcgtgtggctggtggcctcggggattgttttctacggggagctatgggtctgcgctggcctcgattatgattacacttttgatgggaacgaagaggataaaacagagactatagattacaaggacccgtgtaaagccgctgtattttggggcgatattgccttagatgatgaagacttaaatatctttcaaatagataggacaattgaccttacgcagaacccctttggaaaccttggacataccacaggtggacttggagaccatgctatgtcaaagaagcgaggggccctctaccaacttatagacaggataagaagaattggctttggcttggagcaaaacaacacagttaagggaaaagtacctctacaattctcagggcaaaatgagaaaaatcgagttcccagagccgctacatcaagaacggaaagaatatggcctggaggcgttattccttatgttataggaggaaacttcactggcagccagagagccatgttcaagcaggccatgaggcactgggaaaagcacacatgtgtgactttcatagaaagaagtgatgaagagagttacattgtattcacctataggccttgtggatgctgctcctatgtaggtcggcgaggaaatggacctcaggcaatctctatcggcaagaactgtgataaatttgggattgttgttcatgaattgggtcatgtgataggcttttggcatgaacacacaagaccagatcgagataaccacgtaactatcataagagaaaacatccagccaggtcaagagtacaattttctgaagatggagcctggagaagtaaactcacttggagaaagatatgatttcgacagtatcatgcactatgccaggaacaccttctcaagggggatgtttctggataccattctcccctcccgtgatgataatggcatacgtcctgcaattggtcagcgaacccgtctaagcaaaggagatatcgcacaggcaagaaagctgtatagatgtccagcatgtggagaaactctacaagaatccaatggcaacctttcctctccaggatttcccaatggctacccttcttacacacactgcatctggagagtttctgtgaccccaggggagaagattgttttaaattttacaacgatggatctatacaagagtagtttgtgctggtatgactatattgaagtaagagacgggtactggagaaaatcacctctccttggtagattctgtggggacaaattgcctgaagttcttacttctacagacagcagaatgtggattgagtttcgtagcagcagtaattgggtaggaaaaggctttgcagctgtctatgaagcgatctgtggaggtgagatacgtaaaaatgaaggacagattcagtctcccaattatcctgatgactatcgcccgatgaaagaatgtgtgtggaaaataacagtgtctgagagctaccacgtcgggctgacctttcagtcctttgagcaggagcaccaggagaatccagggattgccagtaaagccagagaatctctcatcctcatctggaagcctattgaaagacatgacaattgtgcttatgactacctggaagttagagatggaaccagtgaaaatagccctttgatagggcgtttctgtggttatgacaaacctgaagacataagatctacctccaatactttgtggatgaagtttgtttctgacggaactgtgaacaaagcagggtttgctgctaacttttttaaagaggaagatgagtgtgccaaacctgaccgtggaggctgtgagcagcgatgtctgaacactctgggcagttaccagtgtgcctgtgagcctggctatgagctgggcccagacagaaggagctgtgaagctgcttgtggtggacttcttaccaaacttaacggcaccataaccacccctggctggcccaaggagtaccctcctaataagaactgtgtgtggcaagtggttgcaccaacccagtacagaatttctgtgaagtttgagttttttgaattggaaggcaatgaagtttgcaaatatgattatgtggagatctggagtggtctttcctctgagtctaaactgcatggcaaattctgtggcgctgaagtgcctgaagtgatcacatcccagttcaacaatatgagaattgaattcaaatctgacaatactgtatccaagaagggcttcaaagcacattttttctcagacaaagatgaatgctctaaggataatggtggatgtcagcacgaatgtgtcaacacgatggggagctacatgtgtcaatgccgtaatggatttgtgctacatgacaataaacatgattgcaaggaagctgagtgtgaacagaagatccacagtccaagtggcctcatcaccagtcccaactggccagacaagtacccaagcaggaaagaatgcacttgggaaatcagcgccactcctggccaccgaatcaaattagcctttagtgaatttgagattgagcagcatcaagaatgtgcttatgaccacttagaagtatttgatggagaaacagaaaagtcaccgattcttggacgactgtgtggcaacaagataccagatccccttgtggctactggaaataaaatgtttgttcggtttgtttctgatgcatctgttcaaagaaaaggctttcaagctacacattctacagagtgtggcggacgattgaaagcagaatcaaaaccaagagatctgtactcacatgctcagtttggtgataacaactacccaggacaggttgactgtgaatggctattagtatcagaacggggctctcgacttgaattatccttccagacatttgaagtggaggaagaagcagactgtggctatgactatgtggagctctttgatggtcttgattcaacagctgtggggcttggtcgattctgtggatccgggccaccagaagagatttattcaattggagattcagttttaattcatttccacactgatgacacaatcaacaagaagggatttcatataagatacaaaagcataagatatccagataccacacataccaaaaaataacaccaaaacctctgtcagaacacaaaggaatgtgcataatggagagaagacatattttttttaaaactgaagatattggcacaaatgttttatacaaagagtttgaacaaaaaatccctgtaagaccagaattatctttgtactaaaagagaagtttccagcaaaaccctcatcagcattacaaggatatttgaactccatgcttgatggtattaataaagctggtgaaagggcatcatatacttcaaggaagactctacaagcttttgttcacagcttgaaatagatgcctcacaattcagacagtttaattcaggaactgtgaccctgcagtgttctttttgacaatttgtcaagatttagggacataaaatgatcttgcaggtcgtaaactggaaaacagtattttggttgtcttaggataattgctgactttgtatcttggatacagtgtaaaccagatccatataaggtgaatgtgaaatgggagtcttctgagggtgatttgtactttccatgtgtatgtgtgtgtctggtgtttggaaactgggatatttcagcttcattatttccacttgcaggccagcttaacctctgaaacacaaatgatcttgagaccactttagtgtacttacatttagatgagtttgaaatctcaatggtgtctaattattgcagttaaattctagacatcagttctttaagtctcagaaaacgcccagtgaattggtaaacttagttcttttttttggaagtgctgccttttcacaccaaatccaagaagcctgtgatgtcttatgaaccttatgagaaaactccgaagaggtgtgagcaggattcttctgaatgactgtctggatggttcattactcaagttactgctgctgctattgtctttcctttgttgtcgatctgttattgttgtattattattgttgatgttgtcatggttaatctattttttaaaattgaaatgaagcagaagtaggccttgtgagaactgaaaggtctctttcatttttctcttcctgggattcattttttcaaaacacaatgctggaaaaaaaagatttgtttctgaaagacttcttatggtgctattccataaactttttttcaaacaagtttttgacctttgagccaacccacc

SEQ ID NO: 21590 - DNA, 686 bp, Homo sapiens
  misc_feature 1..686: note = ENST00000504560
  source 1..686: mol_type = unassigned DNA; mol_type = unassigned DNA
agccaacttctccctgcgactgggggtaacaggcagtgcttgccctctctactgtcccggcggcatccacatgtttccggacacctgagcaccccggtcccgccgaggagcctccgggtggggagaagagcaccggtgcccctagccccgcacatcagcgcggaccgcggctgcctaacctctgggtcccgtcccctccttttcctccgggggaggaggatggggttgggaacgctttccccgaggatgctcgtgtggctggtggcctcggggattgttttctacggggagctatgggtctgcgctggcctcgattatgattacacttttgatgggaacgaagaggataaaacagagactatagattacaaggacccgtgtaaagccgactgaccactgctctaagcagtgttggggcaatgcctgggctgcccgagcccttgaagttcaagaagaagcacctggacttctcatgaggggaggtcagagtcaatctgtattttggggcgatattgccttagatgatgaagacttaaatatctttcaaatagataggacaattgaccttacgcagaacccctttggaaaccttggacataccacaggtggacttggagaccatgctatgtcaaagaagcgaggggccctctaccaacttatagacaggataagaagaattggctttg

SEQ ID NO: 21591 - DNA, 1829 bp, Homo sapiens
  misc_feature 1..1829: note = ENST00000513213
  source 1..1829: mol_type = unassigned DNA; mol_type = unassigned DNA
tcccggcggcatccacatgtttccggacacctgagcaccccggtcccgccgaggagcctccgggtggggagaagagcaccggtgcccctagccccgcacatcagcgcggaccgcggctgcctaacctctgggtcccgtcccctccttttcctccgggggaggaggatggggttgggaacgctttccccgaggatgctcgtgtggctggtggcctcggggattgttttctacggggagctatgggtctgcgctggcctcgattatgattacacttttgatgggaacgaagaggataaaacagagactatagattacaaggacccgtgtaaagccgctgtattttggggcgatattgccttagatgatgaagacttaaatatctttcaaatagataggacaattgaccttacgcagaacccctttggaaaccttggacataccacaggtggacttggagaccatgctatgtcaaagaagcgaggggccctctaccaacttatagacaggataagaagaattggctttggcttggagcaaaacaacacagttaagggaaaagtacctctacaattctcagggcaaaatgagaaaaatcgagttcccagagccgctacatcaagaacggaaagaatatggcctggaggcgttattccttatgttataggaggaaacttcactggcagccagagagccatgttcaagcaggccatgaggcactgggaaaagcacacatgtgtgactttcatagaaagaagtgatgaagagagttacattgtattcacctataggccttgtggatgctgctcctatgtaggtcggcgaggaaatggacctcaggcaatctctatcggcaagaactgtgataaatttgggattgttgttcatgaattgggtcatgtgataggcttttggcatgaacacacaagaccagatcgagataaccacgtaactatcataagagaaaacatccagccaggtcaagagtacaattttctgaagatggagcctggagaagtaaactcacttggagaaagatatgatttcgacagtatcatgcactatgccaggaacaccttctcaagggggatgtttctggataccattctcccctcccgtgatgataatggcatacgtcctgcaattggtcagcgaacccgtctaagcaaaggagatatcgcacaggcaagaaagctgtatagatgtccagcatgtggagaaactctacaagaatccaatggcaacctttcctctccaggatttcccaatggctacccttcttacacacactgcatctggagagtttctgtgaccccaggggagaaggttgtattttcactctgttgattgtgtcttctgatgaacacaaattataaagtttgatgtcataccacttgtctacttttagttttattgcctgtgcttttggtgtcatagccaagaaatcatggccatatgtaatgacatgaagtttttaccctgtgttttcttctatgagttctatagttttacagtcttatatgtaggtttttaatcaatattgtgttaatagaaaccattcttgtacatgtggatatccagtttcttcaacaccatttgttaaagatttactaaatgtttttattcagcattcctgctcatgtttctgacttctattatggcttattttggtcctgcctatagcttacattatagattattttttaaattagcgtttttgtttttttctgtttgaaaatgtggattttttacatgaatttataaaactatagtttcactggatatagttggctgcacatttaactttgttttaaataaaagcttgcaaaaat

SEQ ID NO: 21592 - DNA, 558 bp, Homo sapiens
  misc_feature 1..558: note = ENST00000506144
  source 1..558: mol_type = unassigned DNA; mol_type = unassigned DNA
actggccgcggctcgtgtccgggcttcgggagctcctggttccttgctctattgggctgtggctgaggtgatccgcgctcagtgtggacgcacaactgtattttggggcgatattgccttagatgatgaagacttaaatatctttcaaatagataggacaattgaccttacgcagaacccctttggaaaccttggacataccacaggtggacttggagaccatgctatgtcaaagaagcgaggggccctctaccaacttatagacaggataagaagaattggctttggcttggagcaaaacaacacagttaagggaaaagtacctctacaattctcagggcaaaatgagaaaaatcgagttcccagagccgctacatcaagaacggaaagaatatggcctggaggcgttattccttatgttataggaggaaacttcactggcagccagagagccatgttcaagcaggccatgaggcactgggaaaagcacacatgtgtgactttcatagaaagaagtgatgaagagagttacattgtattcacctataggccttgtgg

SEQ ID NO: 21593 - DNA, 6015 bp, Homo sapiens
  misc_feature 1..6015: note = ENST00000296795
  source 1..6015: mol_type = unassigned DNA; mol_type = unassigned DNA
tttcactttcgagagtgccgtctatttgccacacacttccctgatgaaatgtctggatttggactaaagaaaaaaggaaaggctagcagtcatccaacagaatcatgagacagactttgccttgtatctacttttgggggggccttttgccctttgggatgctgtgtgcatcctccaccaccaagtgcactgttagccatgaagttgctgactgcagccacctgaagttgactcaggtacccgatgatctacccacaaacataacagtgttgaaccttacccataatcaactcagaagattaccagccgccaacttcacaaggtatagccagctaactagcttggatgtaggatttaacaccatctcaaaactggagccagaattgtgccagaaacttcccatgttaaaagttttgaacctccagcacaatgagctatctcaactttctgataaaacctttgccttctgcacgaatttgactgaactccatctcatgtccaactcaatccagaaaattaaaaataatccctttgtcaagcagaagaatttaatcacattagatctgtctcataatggcttgtcatctacaaaattaggaactcaggttcagctggaaaatctccaagagcttctattatcaaacaataaaattcaagcgctaaaaagtgaagaactggatatctttgccaattcatctttaaaaaaattagagttgtcatcgaatcaaattaaagagttttctccagggtgttttcacgcaattggaagattatttggcctctttctgaacaatgtccagctgggtcccagccttacagagaagctatgtttggaattagcaaacacaagcattcggaatctgtctctgagtaacagccagctgtccaccaccagcaatacaactttcttgggactaaagtggacaaatctcactatgctcgatctttcctacaacaacttaaatgtggttggtaacgattcctttgcttggcttccacaactagaatatttcttcctagagtataataatatacagcatttgttttctcactctttgcacgggcttttcaatgtgaggtacctgaatttgaaacggtcttttactaaacaaagtatttcccttgcctcactccccaagattgatgatttttcttttcagtggctaaaatgtttggagcaccttaacatggaagataatgatattccaggcataaaaagcaatatgttcacaggattgataaacctgaaatacttaagtctatccaactcctttacaagtttgcgaactttgacaaatgaaacatttgtatcacttgctcattctcccttacacatactcaacctaaccaagaataaaatctcaaaaatagagagtgatgctttctcttggttgggccacctagaagtacttgacctgggccttaatgaaattgggcaagaactcacaggccaggaatggagaggtctagaaaatattttcgaaatctatctttcctacaacaagtacctgcagctgactaggaactcctttgccttggtcccaagccttcaacgactgatgctccgaagggtggcccttaaaaatgtggatagctctccttcaccattccagcctcttcgtaacttgaccattctggatctaagcaacaacaacatagccaacataaatgatgacatgttggagggtcttgagaaactagaaattctcgatttgcagcataacaacttagcacggctctggaaacacgcaaaccctggtggtcccatttatttcctaaagggtctgtctcacctccacatccttaacttggagtccaacggctttgacgagatcccagttgaggtcttcaaggatttatttgaactaaagatcatcgatttaggattgaataatttaaacacacttccagcatctgtctttaataatcaggtgtctctaaagtcattgaaccttcagaagaatctcataacatccgttgagaagaaggttttcgggccagctttcaggaacctgactgagttagatatgcgctttaatccctttgattgcacgtgtgaaagtattgcctggtttgttaattggattaacgagacccataccaacatccctgagctgtcaagccactacctttgcaacactccacctcactatcatgggttcccagtgagactttttgatacatcatcttgcaaagacagtgccccctttgaactctttttcatgatcaataccagtatcctgttgatttttatctttattgtacttctcatccactttgagggctggaggatatctttttattggaatgtttcagtacatcgagttcttggtttcaaagaaatagacagacagacagaacagtttgaatatgcagcatatataattcatgcctataaagataaggattgggtctgggaacatttctcttcaatggaaaaggaagaccaatctctcaaattttgtctggaagaaagggactttgaggcgggtgtttttgaactagaagcaattgttaacagcatcaaaagaagcagaaaaattatttttgttataacacaccatctattaaaagacccattatgcaaaagattcaaggtacatcatgcagttcaacaagctattgaacaaaatctggattccattatattggttttccttgaggagattccagattataaactgaaccatgcactctgtttgcgaagaggaatgtttaaatctcactgcatcttgaactggccagttcagaaagaacggataggtgcctttcgtcataaattgcaagtagcacttggatccaaaaactctgtacattaaatttatttaaatattcaattagcaaaggagaaactttctcaatttaaaaagttctatggcaaatttaagttttccataaaggtgttataatttgtttattcatatttgtaaatgattatattctatcacaattacatctcttctaggaaaatgtgtctccttatttcaggcctatttttgacaattgacttaattttacccaaaataaaacatataagcacgtaagaacattgtctactgattaatatacaatcagccactgagcctatgacagcttaaggagtttgaaaacattcctcattttaagaaaagttagaggtatatgagggtttgtgatgatctttttgtattttggatgcacttagaatgaaagataattgtttcaatgggtataatgctatttcctttgtaaaagagtaaaatatatacccatatttttaacaagtttaattacagtattttttcaatggaaaaactttgtattttagtaagtacttgtctcagtgttgactttgttaaatgttaaatattttttaatatacatacccaagggcagaaaacatttgcaattcatttttattagttaatgagatgattatttgaatgaatattgacttgtattttcctgagattatgagtttctgctgtgggagggtggaaacaattctcttactaaaagtattgtaggcaggcttgctttctgaaggctaatcactatttggctttgtggaaacagaactttcctcccatggtcacagactcaggagatggcgttggcaaaatcacttggtcccactgggattctttgactcctgatcttgaaaattatgataataaatgcatcttagatattcctatgtaattagtgatgatgatcgctgtataatatattcaaaggaatgtattattttaccataaaataatgtgctacgcataaggtagtccttatctagaaagactatttttatttttgtttttttgtttgtttgttttttatttgtttgtttttgagacagagtctggctctgtcgcccaggctggagttcagtggtccaacctcggcccaccgcaacctccacctctgagttcaagctattctcctgcctcagccacccgagtagctgggattacaggcacatgccaccatgcctggctaatttttgtatttttagtagagatggggtttcaccatgttggccaggctggtcttgaactcctgacctcaagtgatcctctcgccttggcctcccaaagtgctaggattacaggtgtgagccaccgcgccccgcctttttattttgttttacaatacaacaaaaaatttttagttttacaataaaagagaatctgattattggaaatagacctgaatagctttttgaaatatttatagttctagtatttaaagagaaacctgaaattataaagctgagttaatttctatacctgaaatgttcatttgtctgctgaattcagggagcatttgagatgtcacattttggaactttgatttaaatagttcagtattcccaaggctgagttccatgaccctggaatgagaaatatccactgtacctctggttctgaagagtctatagtcggccaacactgtgaatgtgtggaggactaattgtcactttcatgttatttgccaccctgacagctgagacactgcttttcagcattttagttaagatttgctttttaactgtgcaataatcattttattttggcattataaaataaaaatcacaacttctgcttttcttatatgctttgtgtgttatcacacaaatattctcaaatattcataagatattttaaataaatcattgtgaattagtcaatatatcaagttgcttaatatgtcatatatcaatgctatttaatatataatatctatatttaatatattgatatgttactggtggagagtgtccaggttcttggtgctttgaacaaggaattggacaaaatgcacaaagaatgaggcgacaaaagcagaggtttattgaaaacgaaagcacaccccgcagggtgggagcggcccgagcaagcagctcaaaagccgggttacaggattttctggggtttaaatactctctagaggtttccattggttacttggtttatgccctatgtaaatgaagaggctaaagtgaaattacaaagttatttacttgttgtgcaccctacgcaaatgaatagctgtcacagctgaggtagagttacagtgatttacttggtggtagaatgttgggatttttccatttgattgagttctaggaagcctttagtttccctgcctgcagaccccattctcctgcctcagatatatcaatgacatattcaatacatcattaagttgcttaatatttaagaggttaagatgcacaggtaatgacctctaaatgaatgccaataaaaatagtaaaaggtgtaaactctgactcctatctgacctaggtaggaagtaacatccagaacttctgcaggctgtcctgtgtaattgttctccggaggaacccttgtccctggggtttgagagaaggggatcgaggaaaaggatgtttgtctgagctcttgtttgatttgcccaagtgacttgacttgtttgaatcctctcagggtgccatcatgtaatctgtccactccaacttcttcctgtttttcacattgcaaaacaaaacccaactgaatcgacactgagtttaaaataaatcttggtatttaggttgtacctaaaaatgataacttttagactgtaatcagaggtagatgctatcaatttgttagtgaggaggggaggagttttcgatgccacttagtttacaatgtctaattgttcaaatatacatctaggttgtaaaggagactcaacggtaagttatagtgaccattgaaaaatgtaaaggggcttcaaatcaagaacttagaaggaatttcttgcaatctattgagacacaaagcagatgagtggttgtctgggcctaggaacaggaatggggagtggctgcaaataggtggaagagaccttttttgggtgatgaaagtgctctataattgggttatggtaataattgtacaactatgtaaatttactgaaagtcattgagttggacacttaaaacaggtgaattttatgatatgtaaattatatattcacaaagccattaaaaattgtattttttgagca

SEQ ID NO: 21594 - DNA, 1156 bp, Homo sapiens
  misc_feature 1..1156: note = ENST00000513189
  source 1..1156: mol_type = unassigned DNA; mol_type = unassigned DNA
cactttcgagagtgccgtctatttgccacacacttccctgatgaaatgtctggatttggactaaagaaaaaaggaaaggctagcagtcatccaacagaatcatgagacagactttgccttgtatctacttttgggggggccttttgccctttgggatgctgtgtgcatcctccaccaccaagtgcactgttagccatgaagttgctgactgcagccacctgaagttgactcaggtacccgatgatctacccacaaacataacagtgttgaaccttacccataatcaactcagaagattaccagccgccaacttcacaaggtatagccagctaactagcttggatgtaggatttaacaccatctcaaaactggagccagaattgtgccagaaacttcccatgttaaaagttttgaacctccagcacaatgagctatctcaactttctgataaaacctttgccttctgcacgaatttgactgaactccatctcatgtccaactcaatccagaaaattaaaaataatccctttgtcaagcagaagaatttaatcacattagatctgtctcataatggcttgtcatctacaaaattaggaactcaggttcagctggaaaatctccaagagcttctattatcaaacaataaaattcaagcgctaaaaagtgaagaactggatatctttgccaattcatctttaaaaaaattagagttgtcatcgaatcaaattaaagagttttctccagggtgttttcacgcaattggaagattatttggcctctttctgaacaatgtccagctgggtcccagccttacagagaagctatgtttggaattagcaaacacaagcattcggaatctgtctctgagtaacagccagctgtccaccaccagcaatacaactttcttgggactaaagtggacaaatctcactatgctcgatctttcctacaacaacttaaatgtgtggctaaaatgtttggagcaccttaacatggaagataatgatattccaggcataaaaagcaatatgttcacaggattgataaacctgaaatacttaagtctatccaactcctttacaagtttgcgaactttgacaaatgaaacatttgtatcacttgctcattctcccttacacatactcaacctaaccaa

SEQ ID NO: 21595 - DNA, 2942 bp, Homo sapiens
  misc_feature 1..2942: note = ENST00000512264
  source 1..2942: mol_type = unassigned DNA; mol_type = unassigned DNA
ggcaccaagacacaaccaggaactgccccaggagtgacttcacgagcagtttattcattgcaattgttctcatggtgataaagaaaaagtaccaggagatggatcctggactggaaggtcagagaagcctccctgaaaaggtggcatctaagctgaggctgtgaatgctgagcagaagttagcccgtggccaggggaggtcagaggctggagtaagaggtgggcgctgcaggaaccgagtaaggaaggactcgtgcattacaggaagggggagaaatgctctgcccatgggatgtggtgaagggtgagcggagatggagtaaagaactgcatctggccgggtgcagcggctcaggcctataatcccagcactttgggaggctgaggcgggcggatcatgaggtcaggagttcaagaccagcctggcctacacggtgaaaccccgactctactaaaaatacaaaacttagctggacgtggtggcgcatgcctgtaatcccagctactcgggaggctgaggcaggagaattgcttgaactgaggaggtggagtttgcagtgagctgagattgcactgctgtactccagcctgggcgacagagcgagactccgtctcaaaaaaaaaaaaaaaaaaaaaaaaaaaggctttcaacagcattacagagtctgtgttcttttgattgttaacctctttttttttcctacctttagttttctccagggtgttttcacgcaattggaagattatttggcctctttctgaacaatgtccagctgggtcccagccttacagagaagctatgtttggaattagcaaacacaagcattcggaatctgtctctgagtaacagccagctgtccaccaccagcaatacaactttcttgggactaaagtggacaaatctcactatgctcgatctttcctacaacaacttaaatgtggttggtaacgattcctttgcttggcttccacaactagaatatttcttcctagagtataataatatacagcatttgttttctcactctttgcacgggcttttcaatgtgaggtacctgaatttgaaacggtcttttactaaacaaagtatttcccttgcctcactccccaagattgatgatttttcttttcagtggctaaaatgtttggagcaccttaacatggaagataatgatattccaggcataaaaagcaatatgttcacaggattgataaacctgaaatacttaagtctatccaactcctttacaagtttgcgaactttgacaaatgaaacatttgtatcacttgctcattctcccttacacatactcaacctaaccaagaataaaatctcaaaaatagagagtgatgctttctcttggttgggccacctagaagtacttgacctgggccttaatgaaattgggcaagaactcacaggccaggaatggagaggtctagaaaatattttcgaaatctatctttcctacaacaagtacctgcagctgactaggaactcctttgccttggtcccaagccttcaacgactgatgctccgaagggtggcccttaaaaatgtggatagctctccttcaccattccagcctcttcgtaacttgaccattctggatctaagcaacaacaacatagccaacataaatgatgacatgttggagggtcttgagaaactagaaattctcgatttgcagcataacaacttagcacggctctggaaacacgcaaaccctggtggtcccatttatttcctaaagggtctgtctcacctccacatccttaacttggagtccaacggctttgacgagatcccagttgaggtcttcaaggatttatttgaactaaagatcatcgatttaggattgaataatttaaacacacttccagcatctgtctttaataatcaggtgtctctaaagtcattgaaccttcagaagaatctcataacatccgttgagaagaaggttttcgggccagctttcaggaacctgactgagttagatatgcgctttaatccctttgattgcacgtgtgaaagtattgcctggtttgttaattggattaacgagacccataccaacatccctgagctgtcaagccactacctttgcaacactccacctcactatcatgggttcccagtgagactttttgatacatcatcttgcaaagacagtgccccctttgaactctttttcatgatcaataccagtatcctgttgatttttatctttattgtacttctcatccactttgagggctggaggatatctttttattggaatgtttcagtacatcgagttcttggtttcaaagaaatagacagacagacagaacagtttgaatatgcagcatatataattcatgcctataaagataaggattgggtctgggaacatttctcttcaatggaaaaggaagaccaatctctcaaattttgtctggaagaaagggactttgaggcgggtgtttttgaactagaagcaattgttaacagcatcaaaagaagcagaaaaattatttttgttataacacaccatctattaaaagacccattatgcaaaagattcaaggtacatcatgcagttcaacaagctattgaacaaaatctggattccattatattggttttccttgaggagattccagattataaactgaaccatgcactctgtttgcgaagaggaatgtttaaatctcactgcatcttgaactggccagttcagaaagaacggataggtgcctttcgtcataaattgcaagtagcacttggatccaaaaactctgtacattaaatttatttaaatattcaattagcaaaggagaaactttctcaatttaaaaagttctatggcaaatttaagttttccataaaggtgttataatttgtttattcatatttgtaaatgattatattctatcacaattacatctcttctaggaaaa

SEQ ID NO: 21596 - DNA, 2310 bp, Homo sapiens
  misc_feature 1..2310: note = ENST00000504367
  source 1..2310: mol_type = unassigned DNA
aagacacaaccaggaactgccccaggagtgacttcacgagcagtttattcattgcaattgttctcatggtgataaagaaaaagtaccaggagatggatcctggactggaaggtcagagaagcctccctgaaaaggtggcatctaagctgaggctgtgaatgctgagcagaagttagcccgtggccaggggaggtcagaggctggagtaagagttttctccagggtgttttcacgcaattggaagattatttggcctctttctgaacaatgtccagctgggtcccagccttacagagaagctatgtttggaattagcaaacacaagcattcggaatctgtctctgagtaacagccagctgtccaccaccagcaatacaactttcttgggactaaagtggacaaatctcactatgctcgatctttcctacaacaacttaaatgtggttggtaacgattcctttgcttggcttccacaactagaatatttcttcctagagtataataatatacagcatttgttttctcactctttgcacgggcttttcaatgtgaggtacctgaatttgaaacggtcttttactaaacaaagtatttcccttgcctcactccccaagattgatgatttttcttttcagtggctaaaatgtttggagcaccttaacatggaagataatgatattccaggcataaaaagcaatatgttcacaggattgataaacctgaaatacttaagtctatccaactcctttacaagtttgcgaactttgacaaatgaaacatttgtatcacttgctcattctcccttacacatactcaacctaaccaagaataaaatctcaaaaatagagagtgatgctttctcttggttgggccacctagaagtacttgacctgggccttaatgaaattgggcaagaactcacaggccaggaatggagaggtctagaaaatattttcgaaatctatctttcctacaacaagtacctgcagctgactaggaactcctttgccttggtcccaagccttcaacgactgatgctccgaagggtggcccttaaaaatgtggatagctctccttcaccattccagcctcttcgtaacttgaccattctggatctaagcaacaacaacatagccaacataaatgatgacatgttggagggtcttgagaaactagaaattctcgatttgcagcataacaacttagcacggctctggaaacacgcaaaccctggtggtcccatttatttcctaaagggtctgtctcacctccacatccttaacttggagtccaacggctttgacgagatcccagttgaggtcttcaaggatttatttgaactaaagatcatcgatttaggattgaataatttaaacacacttccagcatctgtctttaataatcaggtgtctctaaagtcattgaaccttcagaagaatctcataacatccgttgagaagaaggttttcgggccagctttcaggaacctgactgagttagatatgcgctttaatccctttgattgcacgtgtgaaagtattgcctggtttgttaattggattaacgagacccataccaacatccctgagctgtcaagccactacctttgcaacactccacctcactatcatgggttcccagtgagactttttgatacatcatcttgcaaagacagtgccccctttgaactctttttcatgatcaataccagtatcctgttgatttttatctttattgtacttctcatccactttgagggctggaggatatctttttattggaatgtttcagtacatcgagttcttggtttcaaagaaatagacagacagacagaacagtttgaatatgcagcatatataattcatgcctataaagataaggattgggtctgggaacatttctcttcaatggaaaaggaagaccaatctctcaaattttgtctggaagaaagggactttgaggcgggtgtttttgaactagaagcaattgttaacagcatcaaaagaagcagaaaaattatttttgttataacacaccatctattaaaagacccattatgcaaaagattcaaggtacatcatgcagttcaacaagctattgaacaaaatctggattccattatattggttttccttgaggagattccagattataaactgaaccatgcactctgtttgcgaagaggaatgtttaaatctcactgcatcttgaactggccagttcagaaagaacggataggtgcctttcgtcataaattgcaagtagcacttggatccaaaaactctgtacattaaatttatttaaatattc

SEQ ID NO: 21597 - DNA, 628 bp, Homo sapiens
  misc_feature 1..628: note = ENST00000508051
  source 1..628: mol_type = unassigned DNA
gacacaaccaggaactgccccaggagtgacttcacgagcagtttattcattgcaattgttctcatggtgataaagaaaaagtaccaggagatggatcctggactggaaggtcagagaagcctccctgaaaaggtggcatctaagctgaggctgtgaatgctgagcagaagttagcccgtggccaggggaggtcagaggctggagtaagaggtgggcgctgcaggaaccgattttctccagggtgttttcacgcaattggaagattatttggcctctttctgaacaatgtccagctgggtcccagccttacagagaagctatgtttggaattagcaaacacaagcattcggaatctgtctctgagtaacagccagctgtccaccaccagcaatacaactttcttgggactaaagtggacaaatctcactatgctcgatctttcctacaacaacttaaatgtggttggtaacgattcctttgcttggcttccacaactagaatatttcttcctagagtataataatatacagcatttgttttctcactctttgcacgggcttttcaatgtgaggtacctgaatttgaaacggtcttttactaaacaaagtatttcccttgcctcactccc

SEQ ID NO: 21598 - DNA, 3908 bp, Homo sapiens
  misc_feature 1..3908: note = ENST00000394487
  source 1..3908: mol_type = unassigned DNA
tttgaatacaccaattgctgtggggcggctcgaggaagagaagacaccagtgcctcagaaactgctcggtcagacggtgatagcgagccacgcattcacagggccactgctgctcacagaagcagtgaggatgatgccaggatgatgtctgcctcgcgcctggctgggactctgatcccagccatggccttcctctcctgcgtgagaccagaaagctgggagccctgcgtggagacttggccctaaaccacacagaagagctggcatgaaacccagagctttcagactccggagcctcagcccttcaccccgattccattgcttcttgctaaatgctgccgttttatcacggaggtggttcctaatattacttatcaatgcatggagctgaatttctacaaaatccccgacaacctccccttctcaaccaagaacctggacctgagctttaatcccctgaggcatttaggcagctatagcttcttcagtttcccagaactgcaggtgctggatttatccaggtgtgaaatccagacaattgaagatggggcatatcagagcctaagccacctctctaccttaatattgacaggaaaccccatccagagtttagccctgggagccttttctggactatcaagtttacagaagctggtggctgtggagacaaatctagcatctctagagaacttccccattggacatctcaaaactttgaaagaacttaatgtggctcacaatcttatccaatctttcaaattacctgagtatttttctaatctgaccaatctagagcacttggacctttccagcaacaagattcaaagtatttattgcacagacttgcgggttctacatcaaatgcccctactcaatctctctttagacctgtccctgaaccctatgaactttatccaaccaggtgcatttaaagaaattaggcttcataagctgactttaagaaataattttgatagtttaaatgtaatgaaaacttgtattcaaggtctggctggtttagaagtccatcgtttggttctgggagaatttagaaatgaaggaaacttggaaaagtttgacaaatctgctctagagggcctgtgcaatttgaccattgaagaattccgattagcatacttagactactacctcgatgatattattgacttatttaattgtttgacaaatgtttcttcattttccctggtgagtgtgactattgaaagggtaaaagacttttcttataatttcggatggcaacatttagaattagttaactgtaaatttggacagtttcccacattgaaactcaaatctctcaaaaggcttactttcacttccaacaaaggtgggaatgctttttcagaagttgatctaccaagccttgagtttctagatctcagtagaaatggcttgagtttcaaaggttgctgttctcaaagtgattttgggacaaccagcctaaagtatttagatctgagcttcaatggtgttattaccatgagttcaaacttcttgggcttagaacaactagaacatctggatttccagcattccaatttgaaacaaatgagtgagttttcagtattcctatcactcagaaacctcatttaccttgacatttctcatactcacaccagagttgctttcaatggcatcttcaatggcttgtccagtctcgaagtcttgaaaatggctggcaattctttccaggaaaacttccttccagatatcttcacagagctgagaaacttgaccttcctggacctctctcagtgtcaactggagcagttgtctccaacagcatttaactcactctccagtcttcaggtactaaatatgagccacaacaacttcttttcattggatacgtttccttataagtgtctgaactccctccaggttcttgattacagtctcaatcacataatgacttccaaaaaacaggaactacagcattttccaagtagtctagctttcttaaatcttactcagaatgactttgcttgtacttgtgaacaccagagtttcctgcaatggatcaaggaccagaggcagctcttggtggaagttgaacgaatggaatgtgcaacaccttcagataagcagggcatgcctgtgctgagtttgaatatcacctgtcagatgaataagaccatcattggtgtgtcggtcctcagtgtgcttgtagtatctgttgtagcagttctggtctataagttctattttcacctgatgcttcttgctggctgcataaagtatggtagaggtgaaaacatctatgatgcctttgttatctactcaagccaggatgaggactgggtaaggaatgagctagtaaagaatttagaagaaggggtgcctccatttcagctctgccttcactacagagactttattcccggtgtggccattgctgccaacatcatccatgaaggtttccataaaagccgaaaggtgattgttgtggtgtcccagcacttcatccagagccgctggtgtatctttgaatatgagattgctcagacctggcagtttctgagcagtcgtgctggtatcatcttcattgtcctgcagaaggtggagaagaccctgctcaggcagcaggtggagctgtaccgccttctcagcaggaacacttacctggagtgggaggacagtgtcctggggcggcacatcttctggagacgactcagaaaagccctgctggatggtaaatcatggaatccagaaggaacagtgggtacaggatgcaattggcaggaagcaacatctatctgaagaggaaaaataaaaacctcctgaggcatttcttgcccagctgggtccaacacttgttcagttaataagtattaaatgctgccacatgtcaggccttatgctaagggtgagtaattccatggtgcactagatatgcagggctgctaatctcaaggagcttccagtgcagagggaataaatgctagactaaaatacagagtcttccaggtgggcatttcaaccaactcagtcaaggaacccatgacaaagaaagtcatttcaactcttacctcatcaagttgaataaagacagagaaaacagaaagagacattgttcttttcctgagtcttttgaatggaaattgtattatgttatagccatcataaaaccattttggtagttttgactgaactgggtgttcactttttcctttttgattgaatacaatttaaattctacttgatgactgcagtcgtcaaggggctcctgatgcaagatgccccttccattttaagtctgtctccttacagaggttaaagtctagtggctaattcctaaggaaacctgattaacacatgctcacaaccatcctggtcattctcgagcatgttctattttttaactaatcacccctgatatatttttatttttatatatccagttttcatttttttacgtcttgcctataagctaatatcataaataaggttgtttaagacgtgcttcaaatatccatattaaccactatttttcaaggaagtatggaaaagtacactctgtcactttgtcactcgatgtcattccaaagttattgcctactaagtaatgactgtcatgaaagcagcattgaaataatttgtttaaagggggcactcttttaaacgggaagaaaatttccgcttcctggtcttatcatggacaatttgggctagaggcaggaaggaagtgggatgacctcaggaggtcaccttttcttgattccagaaacatatgggctgataaacccggggtgacctcatgaaatgagttgcagcagaagtttatttttttcagaacaagtgatgtttgatggacctctgaatctctttagggagacacagatggctgggatccctcccctgtacccttctcactgccaggagaacta

SEQ ID NO: 21599 - DNA, 4844 bp, Homo sapiens
  misc_feature 1..4844: note = ENST00000355622
  source 1..4844: mol_type = unassigned DNA
aagacaccagtgcctcagaaactgctcggtcagacggtgatagcgagccacgcattcacagggccactgctgctcacagaagcagtgaggatgatgccaggatgatgtctgcctcgcgcctggctgggactctgatcccagccatggccttcctctcctgcgtgagaccagaaagctgggagccctgcgtggaggtggttcctaatattacttatcaatgcatggagctgaatttctacaaaatccccgacaacctccccttctcaaccaagaacctggacctgagctttaatcccctgaggcatttaggcagctatagcttcttcagtttcccagaactgcaggtgctggatttatccaggtgtgaaatccagacaattgaagatggggcatatcagagcctaagccacctctctaccttaatattgacaggaaaccccatccagagtttagccctgggagccttttctggactatcaagtttacagaagctggtggctgtggagacaaatctagcatctctagagaacttccccattggacatctcaaaactttgaaagaacttaatgtggctcacaatcttatccaatctttcaaattacctgagtatttttctaatctgaccaatctagagcacttggacctttccagcaacaagattcaaagtatttattgcacagacttgcgggttctacatcaaatgcccctactcaatctctctttagacctgtccctgaaccctatgaactttatccaaccaggtgcatttaaagaaattaggcttcataagctgactttaagaaataattttgatagtttaaatgtaatgaaaacttgtattcaaggtctggctggtttagaagtccatcgtttggttctgggagaatttagaaatgaaggaaacttggaaaagtttgacaaatctgctctagagggcctgtgcaatttgaccattgaagaattccgattagcatacttagactactacctcgatgatattattgacttatttaattgtttgacaaatgtttcttcattttccctggtgagtgtgactattgaaagggtaaaagacttttcttataatttcggatggcaacatttagaattagttaactgtaaatttggacagtttcccacattgaaactcaaatctctcaaaaggcttactttcacttccaacaaaggtgggaatgctttttcagaagttgatctaccaagccttgagtttctagatctcagtagaaatggcttgagtttcaaaggttgctgttctcaaagtgattttgggacaaccagcctaaagtatttagatctgagcttcaatggtgttattaccatgagttcaaacttcttgggcttagaacaactagaacatctggatttccagcattccaatttgaaacaaatgagtgagttttcagtattcctatcactcagaaacctcatttaccttgacatttctcatactcacaccagagttgctttcaatggcatcttcaatggcttgtccagtctcgaagtcttgaaaatggctggcaattctttccaggaaaacttccttccagatatcttcacagagctgagaaacttgaccttcctggacctctctcagtgtcaactggagcagttgtctccaacagcatttaactcactctccagtcttcaggtactaaatatgagccacaacaacttcttttcattggatacgtttccttataagtgtctgaactccctccaggttcttgattacagtctcaatcacataatgacttccaaaaaacaggaactacagcattttccaagtagtctagctttcttaaatcttactcagaatgactttgcttgtacttgtgaacaccagagtttcctgcaatggatcaaggaccagaggcagctcttggtggaagttgaacgaatggaatgtgcaacaccttcagataagcagggcatgcctgtgctgagtttgaatatcacctgtcagatgaataagaccatcattggtgtgtcggtcctcagtgtgcttgtagtatctgttgtagcagttctggtctataagttctattttcacctgatgcttcttgctggctgcataaagtatggtagaggtgaaaacatctatgatgcctttgttatctactcaagccaggatgaggactgggtaaggaatgagctagtaaagaatttagaagaaggggtgcctccatttcagctctgccttcactacagagactttattcccggtgtggccattgctgccaacatcatccatgaaggtttccataaaagccgaaaggtgattgttgtggtgtcccagcacttcatccagagccgctggtgtatctttgaatatgagattgctcagacctggcagtttctgagcagtcgtgctggtatcatcttcattgtcctgcagaaggtggagaagaccctgctcaggcagcaggtggagctgtaccgccttctcagcaggaacacttacctggagtgggaggacagtgtcctggggcggcacatcttctggagacgactcagaaaagccctgctggatggtaaatcatggaatccagaaggaacagtgggtacaggatgcaattggcaggaagcaacatctatctgaagaggaaaaataaaaacctcctgaggcatttcttgcccagctgggtccaacacttgttcagttaataagtattaaatgctgccacatgtcaggccttatgctaagggtgagtaattccatggtgcactagatatgcagggctgctaatctcaaggagcttccagtgcagagggaataaatgctagactaaaatacagagtcttccaggtgggcatttcaaccaactcagtcaaggaacccatgacaaagaaagtcatttcaactcttacctcatcaagttgaataaagacagagaaaacagaaagagacattgttcttttcctgagtcttttgaatggaaattgtattatgttatagccatcataaaaccattttggtagttttgactgaactgggtgttcactttttcctttttgattgaatacaatttaaattctacttgatgactgcagtcgtcaaggggctcctgatgcaagatgccccttccattttaagtctgtctccttacagaggttaaagtctagtggctaattcctaaggaaacctgattaacacatgctcacaaccatcctggtcattctcgagcatgttctattttttaactaatcacccctgatatatttttatttttatatatccagttttcatttttttacgtcttgcctataagctaatatcataaataaggttgtttaagacgtgcttcaaatatccatattaaccactatttttcaaggaagtatggaaaagtacactctgtcactttgtcactcgatgtcattccaaagttattgcctactaagtaatgactgtcatgaaagcagcattgaaataatttgtttaaagggggcactcttttaaacgggaagaaaatttccgcttcctggtcttatcatggacaatttgggctagaggcaggaaggaagtgggatgacctcaggaggtcaccttttcttgattccagaaacatatgggctgataaacccggggtgacctcatgaaatgagttgcagcagaagtttatttttttcagaacaagtgatgtttgatggacctctgaatctctttagggagacacagatggctgggatccctcccctgtacccttctcactgccaggagaactacgtgtgaaggtattcaaggcagggagtatacattgctgtttcctgttgggcaatgctccttgaccacattttgggaagagtggatgttatcattgagaaaacaatgtgtctggaattaatggggttcttataaagaaggttcccagaaaagaatgttcatccagcctcctcagaaacagaacattcaagaaaaggacaatcaggatgtcatcagggaaatgaaaataaaaaccacaatgagatatcaccttataccaggtagaatggctactataaaaaaatgaagtgtcatcaaggatatagagaaattggaacccttcttcactgctggagggaatggaaaatggtgtagccgttatgaaaaacagtacggaggtttctcaaaaattaaaaatagaactgctatatgatccagcaatctcacttctgtatatatacccaaaataattgaaatcagaatttcaagaaaatatttacactcccatgttcattgtggcactcttcacaatcactgtttccaaagttatggaaacaacccaaatttccattgaaaaataaatggacaaagaaaatgtgcatatacgtacaatgggatattattcagcctaaaaaaagggggaatcctgttatttatgacaacatgaataaacccggaggccattatgctatgtaaaatgagcaagtaacagaaagacaaatactgcctgatttcatttatatgaggttctaaaatagtcaaactcatagaagcagagaatagaacagtggttcctagggaaaaggaggaagggagaaatgaggaaatagggagttgtctaattggtataaaattatagtatgcaagatgaattagctctaaagatcagctgtatagcagagttcgtataatgaacaatactgtattatgcacttaacattttgttaagagggtacctctcatgttaagtgttcttaccatatacatatacacaaggaagcttttggaggtgatggatatatttattaccttgattgtggtgatggtttgacaggtatgtgactatgtctaaactcatcaaattgtatacattaaatatatgcagttttataatatcaa

SEQ ID NO: 21600 - DNA, 2741 bp, Homo sapiens
  misc_feature 1..2741: note = ENST00000472304
  source 1..2741: mol_type = unassigned DNA
gaaactgctcggtcagacggtgatagcgagccacgcattcacagggccactgctgctcacagaagcagtgaggatgatgccaggatgatgtctgcctcgcgcctggctgggactctgatcccagccatggccttcctctcctgcgtgagaccagaaagctgggagccctgcgtggaggtgtgaaatccagacaattgaagatggggcatatcagagcctaagccacctctctaccttaatattgacaggaaaccccatccagagtttagccctgggagccttttctggactatcaagtttacagaagctggtggctgtggagacaaatctagcatctctagagaacttccccattggacatctcaaaactttgaaagaacttaatgtggctcacaatcttatccaatctttcaaattacctgagtatttttctaatctgaccaatctagagcacttggacctttccagcaacaagattcaaagtatttattgcacagacttgcgggttctacatcaaatgcccctactcaatctctctttagacctgtccctgaaccctatgaactttatccaaccaggtgcatttaaagaaattaggcttcataagctgactttaagaaataattttgatagtttaaatgtaatgaaaacttgtattcaaggtctggctggtttagaagtccatcgtttggttctgggagaatttagaaatgaaggaaacttggaaaagtttgacaaatctgctctagagggcctgtgcaatttgaccattgaagaattccgattagcatacttagactactacctcgatgatattattgacttatttaattgtttgacaaatgtttcttcattttccctggtgagtgtgactattgaaagggtaaaagacttttcttataatttcggatggcaacatttagaattagttaactgtaaatttggacagtttcccacattgaaactcaaatctctcaaaaggcttactttcacttccaacaaaggtgggaatgctttttcagaagttgatctaccaagccttgagtttctagatctcagtagaaatggcttgagtttcaaaggttgctgttctcaaagtgattttgggacaaccagcctaaagtatttagatctgagcttcaatggtgttattaccatgagttcaaacttcttgggcttagaacaactagaacatctggatttccagcattccaatttgaaacaaatgagtgagttttcagtattcctatcactcagaaacctcatttaccttgacatttctcatactcacaccagagttgctttcaatggcatcttcaatggcttgtccagtctcgaagtcttgaaaatggctggcaattctttccaggaaaacttccttccagatatcttcacagagctgagaaacttgaccttcctggacctctctcagtgtcaactggagcagttgtctccaacagcatttaactcactctccagtcttcaggtactaaatatgagccacaacaacttcttttcattggatacgtttccttataagtgtctgaactccctccaggttcttgattacagtctcaatcacataatgacttccaaaaaacaggaactacagcattttccaagtagtctagctttcttaaatcttactcagaatgactttgcttgtacttgtgaacaccagagtttcctgcaatggatcaaggaccagaggcagctcttggtggaagttgaacgaatggaatgtgcaacaccttcagataagcagggcatgcctgtgctgagtttgaatatcacctgtcagatgaataagaccatcattggtgtgtcggtcctcagtgtgcttgtagtatctgttgtagcagttctggtctataagttctattttcacctgatgcttcttgctggctgcataaagtatggtagaggtgaaaacatctatgatgcctttgttatctactcaagccaggatgaggactgggtaaggaatgagctagtaaagaatttagaagaaggggtgcctccatttcagctctgccttcactacagagactttattcccggtgtggccattgctgccaacatcatccatgaaggtttccataaaagccgaaaggtgattgttgtggtgtcccagcacttcatccagagccgctggtgtatctttgaatatgagattgctcagacctggcagtttctgagcagtcgtgctggtatcatcttcattgtcctgcagaaggtggagaagaccctgctcaggcagcaggtggagctgtaccgccttctcagcaggaacacttacctggagtgggaggacagtgtcctggggcggcacatcttctggagacgactcagaaaagccctgctggatggtaaatcatggaatccagaaggaacagtgggtacaggatgcaattggcaggaagcaacatctatctgaagaggaaaaataaaaacctcctgaggcatttcttgcccagctgggtccaacacttgttcagttaataagtattaaatgctgccacatgtcaggccttatgctaagggtgagtaattccatggtgcactagatatgcagggctgctaatctcaaggagcttccagtgcagagggaataaatgctagactaaaatacagagtcttccaggtgggcatttcaaccaactcagtcaaggaacccatgacaaagaaagtcatttcaactcttacctcatcaagttgaataaagacagagaaaacagaaa

SEQ ID NO: 21601 - DNA, 539 bp, Homo sapiens
  misc_feature 1..539: note = ENST00000490685
  source 1..539: mol_type = unassigned DNA; mol_type = unassigned DNA
agacttggccctaaaccacacagaagagctggcatgaaacccagagctttcagactccggagcctcagcccttcaccccgattccattgcttcttgctaaatgctgccgttttatcacggaggtggttcctaatattacttatcaatgcatggagctgaatttctacaaaatccccgacaacctccccttctcaaccaagaacctggacctgagctttaatcccctgaggcatttaggcagctatagcttcttcagtttcccagaactgcaggtgctggatttatccaggtaatgaatccacttttacatactgcacaaggtgaggtgttcattgtcctgtcatttcattattggactggaaagcttggtttgtggagtctcatcttcattcacttattcattcatacaacagatgtcttattaactatataaccttgagcaagctacctctattctccaggtctcagttttctaatctgtgaagtaggcagttggctgagacagcttctaagggcaattctaattttaggttttcttt

SEQ ID NO: 21602 - DNA, 3295 bp, Homo sapiens
  misc_feature 1..3295: note = ENST00000456845
  source 1..3295: mol_type = unassigned DNA; mol_type = unassigned DNA
ggggttgtggttgaggccgggtctccgctcctgtgcccgggaagatggtgctaggtggttgcccgaatcttgttgtttgcctactgaagagatgaaaccatggcagaagtagaatccttatagaaacaggaccagaaacacctcccttctccaacaaaaggttcattttggtggctgtccgtttgacctgctgtgcttcagtttaattggcttggaaaggggtcagcagggtgaaaccgaaccccagaaaacttgatgaagaaatgtcttttgcccgttttgattacgtgcatgcaaacagcgatttgcaaagaccgtatgatgatgatcatgatcttactggtgaattacagacctgatgaatttatagaatgtgaagacccagtggatcatgttggaaatgcaactgcatcccaggaacttggttatggttgtctcaagttcggcggtcaggcctacagcgacgtggaacacacttcagtccagtgccatgccttagatggaattgagtgtgccagtcctaggacctttctacgagaaaataaaccttgtataaagtataccggacactacttcataaccactttactctactccttcttcctgggatgttttggtgtggatcgattctgtttgggacacactggcactgcagtagggaagctgttgacgcttggaggacttgggatttggtggtttgttgaccttattttgctaattactggagggctgatgccaagtgatggcagcaactggtgcactgtttactaagaagagctgccatcatggcccagggaggcgggtgaaagctccgtcttctgaattcatctctacaggctcaaaactcctctttgatatcagacctgatgttattttccttcttttggagggcatttgtttggttaagaaggcttctttggactttggaatttcaacccagattttaccttgcagacggaatgacaagcaaaaagtgttgtggggaatcaaatttgttcctttcctcatgcacaaaacataaaggatagtggcgagtttacaagctgtggatgggtttccatagtcttcctttctgtacattgctatatcttcagtcctttggagcaagtggacctaacaagttgagcaaaatgaatatttggatccatgttcctcttgtgaccctgagtcttcatgcaaggagatctgaagctgaacaatgaaaatcttcagcagaaatagaaatggccgtggattgtaatacacactgaaattctgactttctgaatttaaatgtagaataaattttaccaacttggagtactgtatgagtattttcagtagggggaataaactcaaaattatatttgttttgcagaaacctagtcatttgaaatgagccatcctattaagccctcttttgtctccattatgttccagaggcagtatatgcagtgcaataattttttcattccacttatgttttgaaagccagcggcatcagatgtgtgagttgagctattcctcctggcagaattgtccaatctaaaaatcagcgtttaccagcccatgctaataaaattaagatttcatacaagtttctgtaaaactattcttcatgattagctctccctgtgggctgcagcagtcagaaagagataacagccacacctctgcattccccggtcaccaggaataaaaggaaatgttccagattgtaagtggttttaaaaactcagttctcatcgtttgcaatctaagttgaaagaactattaaatataaaatcaaaggtgggcaatgtggccaagtcaatggaagaggctttactcagaataacttacaaattctagaaacaaggtagaactcactcagtttacctaataataattgaatttaagaccaaatatcacagttgaaataacttccctggatacattctatcattttgtagctttcctaagaatttcttgctttatcattcctgattaatcactgtttttacattattaaaggtggcaattttctgtaaaaaatttaaaacagatgatcctattctgtcttgaaagttctgtaccacactgaccttaaccttgcttataacataacaattggtaaacttttaattcataatctttataccctaagatagtatttattaaatttttatgggtcatgaagaaactagaccctctccccagaaaaatctacatacacagaatttacatagaacttgggttcatctacacaatttatgcatgaaataaaattgtactggtaccctataaatttatacaaataaaagagtttaagggagttcaaggatgccatatgtatattttaaaaaaatttctaagggaagtctaaaaaacataaattataatattacccaaaataagatgctacttttcacctaaccaagtcctgcctcatttcacactttaacctcctaagtatattcataaccctaccaaaagttgttttctttaaaaaataagaaactttagggccagcgcaatggtgcaagcctgtaatccctgcactttgggaggccgaggcaggtgaatcctttaaggtcaggagttcgagaccagcctggccaacatggtgagacacactcccccacccccgcccagtctctagtaaaaatgcaaaaattagccgggcgtggtggcgtgcacctgtaatcccagctactcgggaggctgaggtaagagaatcacttgaactgaggaggcagagattgcagtgagccgagatcctgccactgcacttcagcctgggcaacagagtgagactctgaccaaaaaagaaattttgcagctccaaggcttgaagtcatttatgttgccaggggtaagagcttggttgaagggctaaaagactagaaactactgaagatgcccttcttactgtcagtaaagctgctggagacaaaagaagttgttctcgctgctagagtggtaatttgagaatcatcagtattcctatgtgacaatccaaaattactggttttcatttgacttgtaaatgacacccatcatccatctgcccacaaacctggccaaatgtgatacaacctgaaaacctgatggactaaaggagtactatttaacaattgattgcctttgcactttattcaggttgtttcttaaattttggtagacagatccatttgtatatgtgtgtgttatatctagtttatggctatagagaaggtttaaaatactacagtgtccttccctcaaggttaaattagaagctgcctgccttttagttgtttcttgcctttaataaaatgttatcagttcccccaga

SEQ ID NO: 21603 - DNA, 3263 bp, Homo sapiens
  misc_feature 1..3263: note = ENST00000456397
  source 1..3263: mol_type = unassigned DNA; mol_type = unassigned DNA
ctacgcggaaaggcctgaccacgcagttcttgggtctgtgctgctggcctggggttgtggttgaggccgggtctccgctcctgtgcccgggaagatggtgctaggtggttgcccggttagttacttacttctgtgcggccaggcggctttgctgctggggaatttacttctgctgcattgtgtgtctcggagccactcgcaaaatgcgaccgctgagcctgagctcacatccgctggcgccgcccagccggagggccccgggggtgctgcgagctgggaatatggcgacccccactctccggtcatcctctgctcttacctacctgatgaatttatagaatgtgaagacccagtggatcatgttggaaatgcaactgcatcccaggaacttggttatggttgtctcaagttcggcggtcaggcctacagcgacgtggaacacacttcagtccagtgccatgccttagatggaattgagtgtgccagtcctaggacctttctacgagaaaataaaccttgtataaagtataccggacactacttcataaccactttactctactccttcttcctgggatgttttggtgtggatcgattctgtttgggacacactggcactgcagtagggaagctgttgacgcttggaggacttgggatttggtggtttgttgaccttattttgctaattactggagggctgatgccaagtgatggcagcaactggtgcactgtttactaagaagagctgccatcatggcccagggaggcgggtgaaagctccgtcttctgaattcatctctacaggctcaaaactcctctttgatatcagacctgatgttattttccttcttttggagggcatttgtttggttaagaaggcttctttggactttggaatttcaacccagattttaccttgcagacggaatgacaagcaaaaagtgttgtggggaatcaaatttgttcctttcctcatgcacaaaacataaaggatagtggcgagtttacaagctgtggatgggtttccatagtcttcctttctgtacattgctatatcttcagtcctttggagcaagtggacctaacaagttgagcaaaatgaatatttggatccatgttcctcttgtgaccctgagtcttcatgcaaggagatctgaagctgaacaatgaaaatcttcagcagaaatagaaatggccgtggattgtaatacacactgaaattctgactttctgaatttaaatgtagaataaattttaccaacttggagtactgtatgagtattttcagtagggggaataaactcaaaattatatttgttttgcagaaacctagtcatttgaaatgagccatcctattaagccctcttttgtctccattatgttccagaggcagtatatgcagtgcaataattttttcattccacttatgttttgaaagccagcggcatcagatgtgtgagttgagctattcctcctggcagaattgtccaatctaaaaatcagcgtttaccagcccatgctaataaaattaagatttcatacaagtttctgtaaaactattcttcatgattagctctccctgtgggctgcagcagtcagaaagagataacagccacacctctgcattccccggtcaccaggaataaaaggaaatgttccagattgtaagtggttttaaaaactcagttctcatcgtttgcaatctaagttgaaagaactattaaatataaaatcaaaggtgggcaatgtggccaagtcaatggaagaggctttactcagaataacttacaaattctagaaacaaggtagaactcactcagtttacctaataataattgaatttaagaccaaatatcacagttgaaataacttccctggatacattctatcattttgtagctttcctaagaatttcttgctttatcattcctgattaatcactgtttttacattattaaaggtggcaattttctgtaaaaaatttaaaacagatgatcctattctgtcttgaaagttctgtaccacactgaccttaaccttgcttataacataacaattggtaaacttttaattcataatctttataccctaagatagtatttattaaatttttatgggtcatgaagaaactagaccctctccccagaaaaatctacatacacagaatttacatagaacttgggttcatctacacaatttatgcatgaaataaaattgtactggtaccctataaatttatacaaataaaagagtttaagggagttcaaggatgccatatgtatattttaaaaaaatttctaagggaagtctaaaaaacataaattataatattacccaaaataagatgctacttttcacctaaccaagtcctgcctcatttcacactttaacctcctaagtatattcataaccctaccaaaagttgttttctttaaaaaataagaaactttagggccagcgcaatggtgcaagcctgtaatccctgcactttgggaggccgaggcaggtgaatcctttaaggtcaggagttcgagaccagcctggccaacatggtgagacacactcccccacccccgcccagtctctagtaaaaatgcaaaaattagccgggcgtggtggcgtgcacctgtaatcccagctactcgggaggctgaggtaagagaatcacttgaactgaggaggcagagattgcagtgagccgagatcctgccactgcacttcagcctgggcaacagagtgagactctgaccaaaaaagaaattttgcagctccaaggcttgaagtcatttatgttgccaggggtaagagcttggttgaagggctaaaagactagaaactactgaagatgcccttcttactgtcagtaaagctgctggagacaaaagaagttgttctcgctgctagagtggtaatttgagaatcatcagtattcctatgtgacaatccaaaattactggttttcatttgacttgtaaatgacacccatcatccatctgcccacaaacctggccaaatgtgatacaacctgaaaacctgatggactaaaggagtactatttaacaattgattgcctttgcactttattcaggttgtttcttaaattttggtagacagatccatttgtatatgtgtgtgttatatctagtttatggctatagagaaggtttaaaatactacagtgtccttccctcaaggttaaattagaagctgcctgccttttagttgtttcttgcctttaataaaatgttatcagttcccccaga

SEQ ID NO: 21604 - DNA, 1631 bp, Homo sapiens
  misc_feature 1..1631: note = ENST00000397070
  source 1..1631: mol_type = unassigned DNA; mol_type = unassigned DNA
agttcttgggtctgtgctgctggcctggggttgtggttgaggccgggtctccgctcctgtgcccgggaagatggtgctaggtggttgcccggttagttacttacttctgtgcggccaggcggctttgctgctggggaatttacttctgctgcattgtgtgtctcggagccactcgcaaaatgcgaccgctgagcctgagctcacatccgctggcgccgcccagccggagggccccgggggtgctgcgagctgggaatatggcgacccccactctccggtcatcctctgctcttacctaatcacgccattttttaacatctctttttgatcaaacaagaaaaggcatttgggaaatgcaaagaggactgagaatactttggcttaaattttgcccccagaatcttgttgtttgcctactgaagagatgaaaccatggcagaagtagaatccttatagaaacaggaccagaaacacctcccttctccaacaaaaggttcattttggtggctgtccgtttgacctgctgtgcttcagtttaattggcttggaaaggggtcagcagggtgaaaccgaaccccagaaaacttgatgaagaaatgtcttttgcccgttttgattacgtgcatgcaaacagcgatttgcaaagaccgtatgatgatgatcatgatcttactggtgaattacagacctgatgaatttatagaatgtgaagacccagtggatcatgttggaaatgcaactgcatcccaggaacttggttatggttgtctcaagttcggcggtcaggcctacagcgacgtggaacacacttcagtccagtgccatgccttagatggaattgagtgtgccagtcctaggacctttctacgagaaaataaaccttgtataaagtataccggacactacttcataaccactttactctactccttcttcctgggatgttttggtgtggatcgattctgtttgggacacactggcactgcagtagggaagctgttgacgcttggaggacttgggatttggtggtttgttgaccttattttgctaattactggagggctgatgccaagtgatggcagcaactggtgcactgtttactaagaagagctgccatcatggcccagggaggcgggtgaaagctccgtcttctgaattcatctctacaggctcaaaactcctctttgatatcagacctgatgttattttccttcttttggagggcatttgtttggttaagaaggcttctttggactttggaatttcaacccagattttaccttgcagacggaatgacaagcaaaaagtgttgtggggaatcaaatttgttcctttcctcatgcacaaaacataaaggatagtggcgagtttacaagctgtggatgggtttccatagtcttcctttctgtacattgctatatcttcagtcctttggagcaagtggacctaacaagttgagcaaaatgaatatttggatccatgttcctcttgtgaccctgagtcttcatgcaaggagatctgaagctgaacaatgaaaatcttcagcagaaatagaaatggccgtggattgtaatacacactgaaattctgactttctgaatttaaatgtagaataaattttaccaacttgg

SEQ ID NO: 21605 - DNA, 469 bp, Homo sapiens
  misc_feature 1..469: note = ENST00000522434
  source 1..469: mol_type = unassigned DNA; mol_type = unassigned DNA
agttcttgggtctgtgctgctggcctggggttgtggttgaggccgggtctccgctcctgtgcccgggaagatggtgctaggtggttgcccgacctgatgaatttatagaatgtgaagacccagtggatcatgttggaaatgcaactgcatcccaggaacttggttatggttgtctcaagttcggcggtcaggcctacagcgacgtggaacacacttcagtccagtgccatgccttagatggaattgagtgtgccagtcctaggacctttctacgagaaaataaaccttgtataaagtataccggacactacttcataaccactttactctactccttcttcctgggatgttttggtgtggatcgattctgtttgggacacactggcactgcagtagggaagctgttgacgcttggaggacttgggatttggtggtttgttgaccttattttgctaattactggagggct

SEQ ID NO: 21606 - DNA, 885 bp, Homo sapiens
  misc_feature 1..885: note = ENST00000522142
  source 1..885: mol_type = unassigned DNA; mol_type = unassigned DNA
ggatttctaaaccggcggtggcaaccagcactagtcggcccgccagtcatatccgccccgccccgtcggctgccgggcacgcccacctaggggggtcgacggatccgattggagaacgcattcggcgcaaaagaaggaggagcatgagacccagaagaggaatcgagaagcagaagcagagggcggagtagccccgcccgtctgctcgaccttttctagttggttggcggagaatcacgccattttttaacatctctttttgatcaaacaagaaaaggcatttgggaaatgcaaagaggactgagaatactttggcttaaattttgcccccagaatcttgttgtttgcctactgaagagatgaaaccatggcagaagtagaatccttatagaaacaggaccagaaacacctcccttctccaacaaaaggttcattttggtggctgtccgtttgacctgctgtgcttcagtttaattggcttggaaaggggtcagcagggtgaaaccgaaccccagaaaacttgatgaagaaatgtcttttgcccgttttgattacgtgcatgcaaacagcgatttgcaaagaccgtatgatgatgatcatgatcttactggtgaattacagacctgatgaatttatagaatgtgaagacccagtggatcatgttggaaatgcaactgcatcccaggaacttggttatggttgtctcaagttcggcggtcaggcctacagcgacgtggaacacacttcagtccagtgccatgccttagatggaattgagtgtgccagtcctaggacctttctacgagaaaataaaccttgtataaagtataccggacactacttcataaccactttactctactccttcttcctgggatgttttgg

SEQ ID NO: 21607 - DNA, 284 bp, Homo sapiens
  misc_feature 1..284: note = ENST00000521060
  source 1..284: mol_type = unassigned DNA; mol_type = unassigned DNA
gaaacacctcccttctccaacaaaagacctgatgaatttatagaatgtgaagacccagtggatcatgttggaaatgcaactgcatcccaggaacttggttatggttgtctcaagttcggcggtcaggcctacagcgacgtggaacacacttcagtccagtgccatgccttagatggaattgagtgtgccagtcctaggacctttctacgagaaaataaaccttgtataaagtataccggacactacttcataaccactttactctactccttcttcctgggatg

SEQ ID NO: 21608 - DNA, 544 bp, Homo sapiens
  misc_feature 1..544: note = ENST00000524331
  source 1..544: mol_type = unassigned DNA; mol_type = unassigned DNA
tatgtataagcttatacatataaatatgtataagcatatacatatgcttataagtaaagataagtaaagcattgtgttcatctcttctaaatggcctttaatgacactgagtgtgtttgggggttttttttactatattattgaagaagccagtcatgaagaagaaagcaggagtttatttaagacagtgtacctttaagatggactcagaagtgtgtcactaaattccttgcccttgagcacagctgtacctcaaccttgttggaataattgtagtcctgaggccgctttcattctgttattagtgaatataaagatagatgtttgtgtcacttgctctggtgagttggttttggtcttggttgttattccacagttcggcggtcaggcctacagcgacgtggaacacacttcagtccagtgccatgccttagatggaattgagtgtgccagtcctaggacctttctacgagaaaataaaccttgtataaagtataccggacactacttcataaccactttactctactccttcttcctggga

SEQ ID NO: 21609 - DNA, 573 bp, Homo sapiens
  misc_feature 1..573: note = ENST00000519186
  source 1..573: mol_type = unassigned DNA; mol_type = unassigned DNA
ctgtgctgctggcctggggttgtggttgaggccgggtctccgctcctgtgcccgggaagatggtgctaggtggttgcccggttagttacttacttctgtgcggccaggcggctttgctgctggggaatttacttctgctgcattgtgtgtctcggagccactcgcaaaatgcgaccgctgagcctgagctcacatccgctggcgccgcccagccggagggccccgggggtgctgcgagctgggaatatggcgacccccactctccggtcatcctctgctcttacctacctgatgaatttatagaatgtgaagacccagtggatcatgttggaaatgcaactgcatcccaggaacttggttatggttgtctcaaggtgagtttttgttttgtcgtaagagcaaacccttcgataacgaaataggaatgtctgaatgctattacataaaagtataagaggtacaaagttttttgaagaatttcctcagaaagaccgttactggaaatttccagtatggccagggtcagtgactgaacaagatatttggtttccttatgaaggagcaatctctgtg

SEQ ID NO: 21610 - DNA, 570 bp, Homo sapiens
  misc_feature 1..570: note = ENST00000517872
  source 1..570: mol_type = unassigned DNA; mol_type = unassigned DNA
agttcttgggtctgtgctgctggcctggggttgtggttgaggccgggtctccgctcctgtgcccgggaagatggtgctaggtggttgcccgaatcacgccattttttaacatctctttttgatcaaacaagaaaaggcatttgggaaatgcaaagaggactgagaatactttggcttaaattttgcccccagaatcttgttgtttgcctactgaagagatgaaaccatggcagaagtagaatccttatagaaacaggaccagaaacacctcccttctccaacaaaaggttcattttggtggctgtccgtttgacctgctgtgcttcagtttaattggcttggaaaggggtcagcagggtgaaaccgaaccccagaaaacttgatgaagaaatgtcttttgcccgttttgattacgtgcatgcaaacagcgatttgcaaagaccgtatgatgatgatcatgatcttactggtgaattacagacctgatgaatttatagaatgtgaagacccagtggatcatgttggaaatgcaactgcatcccaggaacttggttatggttgtctcaaggt

SEQ ID NO: 21611 - DNA, 549 bp, Homo sapiens
  misc_feature 1..549: note = ENST00000520152
  source 1..549: mol_type = unassigned DNA; mol_type = unassigned DNA
aaaccggcggtggcaaccagcactagtcggcccgccagtcatatccgccccgccccgtcggctgccgggcacgcccacctaggggggtcgacggatccgattggagaacgcattcggcgcaaaagaaggaggagcatgagacccagaagaggaatcgagaagcagaagcagagggcggagtagccccgcccgtctgctcgaccttttctagttggttggcggagaatcttgttgtttgcctactgaagagatgaaaccatggcagaagtagaatccttatagaaacaggaccagaaacacctcccttctccaacaaaaggttcattttggtggctgtccgtttgacctgctgtgcttcagtttaattggcttggaaaggggtcagcagggtgaaaccgaaccccagaaaacttgatgaagaaatgtcttttgcccgttttgattacgtgcatgcaaacagcgatttgcaaagaccgtatgatgatgatcatgatcttactggtgaattacagacctgatgaatttatagaatgtgaagacccagtggat

SEQ ID NO: 21612 - DNA, 1771 bp, Homo sapiens
  misc_feature 1..1771: note = ENST00000305366
  source 1..1771: mol_type = unassigned DNA; mol_type = unassigned DNA
attaatcattttccctgttgcctatgactgaggctgtttctcacatcctgcccctggttttgcctgtcccaaggatttcgtctgaagggcgggacattccccctgcctcttcgcaccacagccagagcctgccattaggaccaatgaaagcaaagtacctcatcccctcagtgactaagaatcgcagtatttaagaggtagcaggaatgggctgagagtggtgtttgctttctccaccagaagggcacactttcatctaatttggggtatcactgagctgaagacaaagagaagggggagaaaacctagcagaccaccatgtgctatgggaagtgtgcacgatgcatcggacattctctggtggggctcgccctcctgtgcatcgcggctaatattttgctttactttcccaatggggaaacaaagtatgcctccgaaaaccacctcagccgcttcgtgtggttcttttctggcatcgtaggaggtggcctgctgatgctcctgccagcatttgtcttcattgggctggaacaggatgactgctgtggctgctgtggccatgaaaactgtggcaaacgatgtgcgatgctttcttctgtattggctgctctcattggaattgcaggatctggctactgtgtcattgtggcagcccttggcttagcagaaggaccactatgtcttgattccctcggccagtggaactacacctttgccagcactgagggccagtaccttctggatacctccacatggtccgagtgcactgaacccaagcacattgtggaatggaatgtatctctgttttctatcctcttggctcttggtggaattgaattcatcttgtgtcttattcaagtaataaatggagtgcttggaggcatatgtggcttttgctgctctcaccaacagcaatatgactgctaaaagaaccaacccaggacagagccacaatcttcctctatttcattgtaatttatatatttcacttgtattcatttgtaaaactttgtattagtgtaacatactccccacagtctacttttacaaacgcctgtaaagactggcatcttcacaggatgtcagtgtttaaatttagtaaacttcttttttgtttgtttatttgtttttgtttttttttaaggaatgaggaaacaaaccaccctctgggggtaatttacagactgagtgacagtactcagtatatctgagataaactctataatgttttggataaaaataacattccaatcactattgtatatatgtgcatgtattttttaaattaaagatgtctagttgctttttataagaccaagaaggagaaaatccgacaacctggaaagatttttgttttcactgcttgtatgatgtttcccattcatacacctataaatctctaacaagaggccctttgaactgccttgtgttctgtgagaaacaaatatttacttagagtggaaggactgattgagaatgttccaatccaaatgaatgcatcacaacttacaatgctgctcattgttgtgagtactatgagattcaaatttttctaacatatggaaagccttttgtcctccaaagatgagtactagggatcatgtgtttaaaaaaagaaaggctacgatgactgggcaagaagaaagatgggaaactgaataaagcagttgatcagcatcattggaacatggggacgagtgacggcaggaggaccacgaggaaataccctcaaaactaacttgtttacaacaaaataaagtattcactacca

SEQ ID NO: 21613 - DNA, 3115 bp, Homo sapiens
  misc_feature 1..3115: note = ENST00000472441
  source 1..3115: mol_type = unassigned DNA; mol_type = unassigned DNA
tgtggccatgaaaactgtggcaaacgatgtgcggtaggtcctcctgccctggtggtgaaaatgactcctaagatgtagctgtggcactctgtggctcacttcctgtgtgtctgcttttccctagatgctttcttctgtattggctgctctcattggaattgcaggatctggctactgtgtcattgtggcagcccttggcttagcagaaggaccactatgtcttgattccctcggccagtggaactacacctttgccagcactgagggccagtaccttctggatacctccacatggtccgagtgcactgaacccaagcacattgtggaatggaatgtatctctgttttctatcctcttggctcttggtggaattgaattcatcttgtgtcttattcaagtaataaatggagtgcttggaggcatatgtggcttttgctgctctcaccaacaggtaagaacctgcatgaaaatgtcgtagtctggccctggtgttaatataccattgttttcatcataaagaaaaaggcaaaaccaaacatgctcgacctaccagcatttattctgatatcatctttgtagcaacacaattatagcattcactttagctgtcagtaacaagcttcctcgagtctcacagtcacaggattgtcttagttctttgcagttggctctatgtacacaagaacatgctgcccatagacacagcgctcccttcaggatctaattcactgcctctgctctcgctgcagagacagaaaaaaaagtgatgtctgctctttgtttgctgttatattcccaactagtatacataagtaatagccaaccattcaatgcatcaggcactatgctaaacccatatgactcaaatattaagcaataggcttaagatcacctactcaggaaataacaggcttcaaaccttgagtcgctctgtgcaaaagctcctacttttaacctgtattccacacttgctgtttggttggattttctgcaattccttcctaataaggagtcataaaaatgcctaagcagtaagtatggagaatcactagcaatctttgaacagcagctcatgaaaagcctttcgttgtgaaagaaaaccaggaagcacttgtttcctggggatatgatttaggagaaaaaaatgcatttgtttgtagcagtgaaagttcttgtttctatatcctcctaaaatatatatattattgaattaatgaaagtccagctttgatcctatctttgagagggttattttatgtcttatatttttcaaaccatttactcctctggtgccagatctgttaactttcttttaaaaataagacaaaaacctaatgaaaactgaaagcccattgctaccatgaaaaactttgctgaaaataaaaggaaactttctgtaattttgggggaaggttaaaatgaaaatctagttttccttatcaggcaagtatagcaagattaataatttctttggcaaatttccaagaaaataagggaatgggaaaccttcaatatggagcttctttcaagcagtacggttggggaagggcagagaagtatcctctagggattgctgtcatgcagcttacctttagccttgaatttcatacaaggcagagttcaaagtaagtgattacttgtactaaatgtactcacttagtacgttttggggacaggcataaagagccaatgaccaaaatggctgaagtgatttggcagggaatgatactctcctctgatttggggtagtaaatacaccaggtttcccagctgagtcactgtagggatggcttcttcccagatactacagggaagatctgttacctttgtttataagacaaaagacactttcaaagggcaggtcttttcatgtagaagagtcaggtccataactcggtagcatttaatttgaaaggttacccacattgagctcataccagtgtgaaacttccatggcattatcttttaaatccctaagattaaaaccccacacaaatgcactcaaagcaacccaatatcagtatcctgcagtttctatgggccctttctgcagcctttactcatggaagacaagggatctgggtttgtttaggaaacattttgtgagcattgtccaagccctaagtatggttggcctaagctttgctgaagctaagatcagtctgtttatgtttgcttaaaataggaacttaaaggactaaaatgtcatcattatttatcctgattatagcctaatggtattttattttctctacagcaatatgactgctaaaagaaccaacccaggacagagccacaatcttcctctatttcattgtaatttatatatttcacttgtattcatttgtaaaactttgtattagtgtaacatactccccacagtctacttttacaaacgcctgtaaagactggcatcttcacaggatgtcagtgtttaaatttagtaaacttcttttttgtttgtttatttgtttttgtttttttttaaggaatgaggaaacaaaccaccctctgggggtaatttacagactgagtgacagtactcagtatatctgagataaactctataatgttttggataaaaataacattccaatcactattgtatatatgtgcatgtattttttaaattaaagatgtctagttgctttttataagaccaagaaggagaaaatccgacaacctggaaagatttttgttttcactgcttgtatgatgtttcccattcatacacctataaatctctaacaagaggccctttgaactgccttgtgttctgtgagaaacaaatatttacttagagtggaaggactgattgagaatgttccaatccaaatgaatgcatcacaacttacaatgctgctcattgttgtgagtactatgagattcaaatttttctaacatatggaaagccttttgtcctccaaagatgagtactagggatcatgtgtttaaaaaaagaaaggctacgatgactgggcaagaagaaagatgggaaactgaataaagcagttgatcagcatcattggaacatggggacgagtgacggcaggaggaccacgaggaaataccctcaaaactaacttgtttacaacaaaataaagtattcactacc

SEQ ID NO: 21614 - DNA, 976 bp, Homo sapiens
  misc_feature 1..976: note = ENST00000493348
  source 1..976: mol_type = unassigned DNA; mol_type = unassigned DNA
actaagaatcgcagtatttaagaggtagcaggaatgggctgagagtggtgtttgctttctccaccagaagggcacactttcatctaatttggggtatcactgagctgaagacaaagagaagggggagaaaacctagcagaccaccatgtgctatgggaagtgtgcacgatgcatcggacattctctggtggggctcgccctcctgtgcatcgcggctaatattttgctttactttcccaatggggaaacaaagtatgcctccgaaaaccacctcagccgcttcgtgtggttcttttctggcatcgtaggaggtggcctgctgatgctcctgccagcatttgtcttcattgggctggaacaggatgactgctgtggctgctgtggccatgaaaactgtggcaaacgatgtgcggtaccttctggatacctccacatggtccgagtgcactgaacccaagcacattgtggaatggaatgtatctctgttttctatcctcttggctcttggtggaattgaattcatcttgtgtcttattcaagtaataaatggagtgcttggaggcatatgtggcttttgctgctctcaccaacagcaatatgactgctaaaagaaccaacccaggacagagccacaatcttcctctatttcattgtaatttatatatttcacttgtattcatttgtaaaactttgtattagtgtaacatactccccacagtctacttttacaaacgcctgtaaagactggcatcttcacaggatgtcagtgtttaaatttagtaaacttcttttttgtttgtttatttgtttttgtttttttttaaggaatgaggaaacaaaccaccctctgggggtaatttacagactgagtgacagtactcagtatatctgagataaactctataatgttttggataaaaataacattccaatcactattgtatatatgtgcatgtattttttaaattaaagatgt

SEQ ID NO: 21615 - DNA, 702 bp, Homo sapiens
  misc_feature 1..702: note = ENST00000493298
  source 1..702: mol_type = unassigned DNA; mol_type = unassigned DNA
agtggtgtttgctttctccaccagaagggcacactttcatctaatttggggtatcactgagctgaagacaaagagaagggggagaaaacctagcagaccaccatgtgctatgggaagtgtgcacgatgcatcggacattctctggtggggctcgccctcctgtgcatcgcggctaatattttgctttactttcccaatggggaaacaaagtatgcctccgaaaaccacctcagccgcttcgtgtggttcttttctggcatcgtaggaggtggcctgctgatgctcctgccagcatttgtcttcattgggctggaacaggatgactgctgtggctgctgtggccatgaaaactgtggcaaacgatgtgcggtaggtcctcctgccctggtggtgaaaatgactcctaagatgtagctgtggcactctgtggctcacttcctgtgtgtctgcttttccctagatgctttcttctgtattggctgctctcattggaattgcaggatctggctactgtgtcattgtggcagcccttggcttagcagaaggaccactatgtcttgattccctcggccagtggaactacacctttgccagcactgagggccagtaccttctggatacctccacatggtccgagtgcactgaacccaagcacattgtggaatggaatgtatctctgttttctatcctcttggctcttgg

SEQ ID NO: 21616 - DNA, 3201 bp, Homo sapiens
  misc_feature 1..3201: note = ENST00000297784
  source 1..3201: mol_type = unassigned DNA; mol_type = unassigned DNA
cagaaactatgagggcagaacccagcaatctgtgctttctttcacaagccctccaggagttgctgaaatttaggaatcattgccccaaaaagtggccctcataatgatgccagatgggatcttactctgttgcccaggctggagtgcagtggtgcgatctcggctctctgcaacctccgcctcccaggttcaagtgattctcctgcctcggcctcctgagtagctgggatttcaggccatgaaagatcactgttttagtctgcgtggtgcagtggaacagatagacctcggtttgaatctcagctctactgtttactagacatgaaatggggaaatctaaaatgagatgccagaagcctcaaaaatggaaaaccccctgtgcttcacatctgaaaatctctgctgggggcagcaactttgagcctgtggggaaggaactgtccacgtggagtggtctggtgaatgcttaaggagctgcagaagggaagtccctctccaaactagccagccactgagaccttctgacaggacacccccaggatgtcacccaaaaaagtacaaatcaaagtggaggaaaaagaagacgagactgaggaaagctcaagtgaagaggaagaggaggtggaagataagctacctcgaagagagagcttgagaccaaagaggaaacggaccagagatgttatcaatgaggatgacccagaacctgaaccagaggatgaagaaacaaggaaggcaagagaaaaagagaggaggaggaggctaaagagaggagcagaagaagaagaaattgatgaagaggaattggaaagattgaaggcagagttagatgagaaaagacaaataattgctactgtcaaatgcaaaccatggaagatggagaagaaaattgaagttctcaaggaggcaaaaaaatttgtgagtgaaaatgaaggggctcttgggaaaggaaaaggaaaacggtggtttgcatttaagatgatgatggccaagaaatgggcaaaattcctccgtgattttgagaacttcaaagctgcgtgtgtcccatgggaaaataaaatcaaggctattgaaagtcagtttggctcctcagtggcctcatacttcctcttcttgagatggatgtatggagtcaatatggttctctttatcctgacatttagcctcatcatgttgccagagtacctctggggtttgccatatggcagtttacctaggaaaaccgttcccagagccgaagaggcatcggcagcaaactttggtgtgttgtacgacttcaatggtttggcacaatattccgttctcttttatggctattatgacaataaacgaacaattggatggatgaatttcaggttgccgctctcctattttctagtggggattatgtgcattggatacagctttctggttgtcctcaaagcaatgaccaaaaacattggtgatgatggaggtggagatgacaacactttcaatttcagctggaaggtctttaccagctgggactacctgatcggcaatcctgaaacagcagacaacaaatttaattctatcacaatgaactttaaggaagctatcacagaagaaaaagcagcccaagtagaagaaaacgtccacttgatcagattcctgaggtttctggctaacttcttcgtgtttctaacacttggagggagtggatacctcatcttttgggctgtgaagcgatcccaggaatttgcacagcaagatcctgacacccttgggtggtgggaaaaaaatgaaatgaacatggttatgtccctcctagggatgttctgtccaacattgtttgacttatttgctgaattagaagactaccatcctctcatcgctttgaaatggctactgggacgcatttttgctcttcttttaggcaatttatacgtatttattcttgcattaatggatgagattaacaacaagattgaagaggagaagctagtaaaggccaatattaccctttgggaagccaatatgatcaaggcctacaatgcatcattctctgaaaatagcactggaccacccttttttgttcaccctgcagatgtacctcgaggaccttgctgggaaacaatggtgggacaggagtttgtgaggctgacagtctctgatgttctgaccacctacgtcacaatcctcattggggactttctaagggcatgttttgtgaggttttgcaattattgctggtgctgggacttggagtatggatatccttcatacaccgaattcgacatcagtggcaacgtcctcgctctgatcttcaaccaaggcatgatctggatgggctccttctttgctcccagcctcccaggcatcaatatccttcgactccatacatccatgtacttccagtgctgggccgttatgtgctgcaatgttcctgaggccagggtcttcaaagcttccagatcaaataacttctacctgggcatgctactgctcatcctcttcctgtccacaatgcctgtcttgtacatgatcgtgtccctcccaccatcttttgattgtggtccattcagtggcaaaaatagaatgtttgaagtcattggagagaccctggagcacgatttcccaagctggatggcgaagatcttgagacagctttcaaaccctgggctggtcattgctgtcattttggtgatggttttggccatctattatctcaatgctactgccaagggccagaaggcagcgaatctggatctcaaaaagaagatgaaaatgcaagctttggagaacaaaatgcgaaacaagaaaatggcagctgcacgagcagctgcagctgctggtcgccagtaataagtatcctgagagcccagaaaaggtacactttgccttgctgtttaaaagtaatgcaatatgtgaacgcccagagaacaagcactgtggaactgctattttcctgttctacccttgatggattttcaaggtcatgctggccaattaaggcatcatcagtcctacctgagcaacaagaatctaaactttattccaagtcagaaactgtttctgcagagccactctctcccctgctccatttcgtgactttttttttttttttaacaaattgagtttagaagtgagtgtaatccagcaatacagtttactggtttagttggtgggttaattaaaaaaaatttgctcatatgaactttcattttatatgtttcttttgcc

SEQ ID NO: 21617 - DNA, 782 bp, Homo sapiens
  misc_feature 1..782: note = ENST00000497073
  source 1..782: mol_type = unassigned DNA; mol_type = unassigned DNA
gagttatgggtcttcacgcagccagcatgctgtgttttgggctctgcctcttgtaatttttagaaattaattagtttattctttatttatatttatttatttatttattttcagatgggatcttactctgttgcccaggctggagtgcagtggtgcgatctcggctctctgcaacctccgcctcccaggttcaagtgattctcctgcctcggcctcctgagtagctgggatttcagagtctcaagcaggccatgaaagatcactgttttagtctgcgtggtgcagtggaacagatagacctcggtttgaatctcagctctactgtttactagacatgaaatggggaaatctaaaatgagatgccagaagcctcaaaaatggaaaaccccctgtgcttcacatctgaaaatctctgctgggggcagcaactttgagcctgtggggaaggaactgtccacgtggagtggtctggtgaatgcttaaggagctgcagaagggaaggtagtgaggagacagttaaatattgagcacgttttggtgcctagcattgtactggcctttcacatgctatgtttaatcacgcaggattgtatggaatgggattgtacagaatgaggcctgggtttgctaaatcctgggggagattgtctaagctgtcacttgaagggaaaactgtagcatgtgggacttaaaaacagcttgggatggagtttgaggtagggcgagagggaaaaagatcttggcagatacattctgaacaaatacttgtgtcatcctcaact

SEQ ID NO: 21618 - DNA, 562 bp, Homo sapiens
  misc_feature 1..562: note = ENST00000492418
  source 1..562: mol_type = unassigned DNA; mol_type = unassigned DNA
agtggtctggtgaatgcttaaggagctgcagaagggaagtccctctccaaactagccagccactgagaccttctgacaggacacccccaggatgtcacccaaaaaagttgggacagaacaagtcaactggcaagtccattgctcagcttgttgaaatactctgcacagaatgcaaggaaaaactgttttcatgaggtagcccatgaagcgatgaagcaaggcaaatttatctgcctggataacctcctgtatgctgttttcactccatggagagtcaacacaacagacttctgagttgtattatcgagctccttcaacagggcattgctgtaagatcctagatcccacactccatggtgtgatgttttagccaagtctggaagtagcacaggccctaaaatctcatgattgcaggttgtcaactctgctgtaggcttgccacttcaagggcaagtggttggttggggctgggatttgggcagagccatagaaagaaagggaacattcaagggaatttgatgatgtgcatgatgtctctgtctgatacaaaaagaaaaaaaaa

SEQ ID NO: 21619 - DNA, 1528 bp, Homo sapiens
  misc_feature 1..1528: note = ENST00000486417
  source 1..1528: mol_type = unassigned DNA; mol_type = unassigned DNA
tgcattaatggatgagattaacaacaagattgaagaggagaagctagtaaaggccaatattaccctttgggaagccaatatgatcaaggcctacaatgcatcattctctgaaaatagcactggaccacccttttttgttcaccctgcagatgtacctcgaggaccttgctgggaaacaatggtgggacaggagtttgtgaggctgacagtctctgatgttctgaccacctacgtcacaatcctcattggggactttctaagggcatgttttgtgaggttttgcaattattgctggtgctgggacttggagtatggatatccttcatacaccgaattcgacatcagtggcaacgtcctcgctctgatcttcaaccaaggcatgatctgatctgtcctgaattattaaacctttgggtgctgacagacaccggacccctctgcaaatgctaaaaccgtcttgcttctgtcacacaaagacaactctccagggctccatcgtcctgccatgggatgactgttaaattcctgtgcctgactaggtgaatcaatatggaaaagatattataaaaatattgtttcctcctttgtcaggaagaaaagaattttataaggctaaagtgttacaatgatttttactgacagatgatgggatcatgcctgggatgggctccttctttgctcccagcctcccaggcatcaatatccttcgactccatacatccatgtacttccagtgctgggccgttatgtgctgcaatgttcctgaggccagggtcttcaaagcttccagatcaaataacttctacctgggcatgctactgctcatcctcttcctgtccacaatgcctgtcttgtacatgatcgtgtccctcccaccatcttttgattgtggtccattcagtggcaaaaatagaatgtttgaagtcattggagagaccctggagcacgatttcccaagctggatggcgaagatcttgagacagctttcaaaccctgggctggtcattgctgtcattttggtgatggttttggccatctattatctcaatgctactgccaagggccagaaggcagcgaatctggatctcaaaaagaagatgaaaatgcaagctttggagaacaaaatgcgaaacaagaaaatggcagctgcacgagcagctgcagctgctggtcgccagtaataagtatcctgagagcccagaaaaggtacactttgccttgctgtttaaaagtaatgcaatatgtgaacgcccagagaacaagcactgtggaactgctattttcctgttctacccttgatggattttcaaggtcatgctggccaattaaggcatcatcagtcctacctgagcaacaagaatctaaactttattccaagtcagaaactgtttctgcagagccactctctcccctgctccatttcgtgactttttttttttttttaacaaattgagtttagaagtgagtgtaatccagcaatacagtttactggtttagttggtgggttaattaaaaaaaatttgctcat

SEQ ID NO: 21620 - DNA, 679 bp, Homo sapiens
  misc_feature 1..679: note = ENST00000469455
  source 1..679: mol_type = unassigned DNA; mol_type = unassigned DNA
ctggctgtctgactttgagatggtaccttttataaggtcgtctccatcaccctcattgaaagtgcctcctcggactggccaaaagcagttaggtaatgctcttcggtgaacgacagtgaggtaatggctacagatacaggatgctcttgtgttgctttcccattctttgctatgagccttcatacaccgaattcgacatcagtggcaacgtcctcgctctgatcttcaaccaaggcatgatctggatgggctccttctttgctcccagcctcccaggcatcaatatccttcgactccatacatccatgtacttccagtgctgggccgttatgtgctgcaatgttcctgaggccagggtcttcaaagcttccagatcaaataacttctacctgggcatgctactgctcatcctcttcctgtccacaatgcctgtcttgtacatgatcgtgtccctcccaccatcttttgattgtggtccattcagtggcaaaaatagaatgtttgaagtcattggagagaccctggagcacgatttcccaagctggatggcgaagatcttgagacagctttcaaaccctgggctggtcattgctgtcattttggtgatggttttggccatctattatctcaatgctactgccaagggccagaaggcagcgaatctggatctcaaaaagaa

SEQ ID NO: 21621 - DNA, 3068 bp, Homo sapiens
  misc_feature 1..3068: note = ENST00000340019
  source 1..3068: mol_type = unassigned DNA; mol_type = unassigned DNA
ttcacaaagttggtttacagcagaactgtgctacagttatctggattcagatccaagtcccctccaaatgaatcacaaccacttctacctttataattccaggccatgaaagatcactgttttagtctgcgtggtgcagtggaacagatagacctcggtttgaatctcagctctactgtttactagacatgaaatggggaaatctaaaatgagatgccagaagcctcaaaaatggaaaaccccctgtgcttcacatctgaaaatctctgctgggggcagcaactttgagcctgtggggaaggaactgtccacgtggagtggtctggtgaatgcttaaggagctgcagaagggaagtccctctccaaactagccagccactgagaccttctgacaggacacccccaggatgtcacccaaaaaagtacaaatcaaagtggaggaaaaagaagacgagactgaggaaagctcaagtgaagaggaagaggaggtggaagataagctacctcgaagagagagcttgagaccaaagaggaaacggaccagagatgttatcaatgaggatgacccagaacctgaaccagaggatgaagaaacaaggaaggcaagagaaaaagagaggaggaggaggctaaagagaggagcagaagaagaagaaattgatgaagaggaattggaaagattgaaggcagagttagatgagaaaagacaaataattgctactgtcaaatgcaaaccatggaagatggagaagaaaattgaagttctcaaggaggcaaaaaaatttgtgagtgaaaatgaaggggctcttgggaaaggaaaaggaaaacggtggtttgcatttaagatgatgatggccaagaaatgggcaaaattcctccgtgattttgagaacttcaaagctgcgtgtgtcccatgggaaaataaaatcaaggctattgaaagtcagtttggctcctcagtggcctcatacttcctcttcttgagatggatgtatggagtcaatatggttctctttatcctgacatttagcctcatcatgttgccagagtacctctggggtttgccatatggcagtttacctaggaaaaccgttcccagagccgaagaggcatcggcagcaaactttggtgtgttgtacgacttcaatggtttggcacaatattccgttctcttttatggctattatgacaataaacgaacaattggatggatgaatttcaggttgccgctctcctattttctagtggggattatgtgcattggatacagctttctggttgtcctcaaagcaatgaccaaaaacattggtgatgatggaggtggagatgacaacactttcaatttcagctggaaggtctttaccagctgggactacctgatcggcaatcctgaaacagcagacaacaaatttaattctatcacaatgaactttaaggaagctatcacagaagaaaaagcagcccaagtagaagaaaacgtccacttgatcagattcctgaggtttctggctaacttcttcgtgtttctaacacttggagggagtggatacctcatcttttgggctgtgaagcgatcccaggaatttgcacagcaagatcctgacacccttgggtggtgggaaaaaaatgaaatgaacatggttatgtccctcctagggatgttctgtccaacattgtttgacttatttgctgaattagaagactaccatcctctcatcgctttgaaatggctactgggacgcatttttgctcttcttttaggcaatttatacgtatttattcttgcattaatggatgagattaacaacaagattgaagaggagaagctagtaaaggccaatattaccctttgggaagccaatatgatcaaggcctacaatgcatcattctctgaaaatagcactggaccacccttttttgttcaccctgcagatgtacctcgaggaccttgctgggaaacaatggtgggacaggagtttgtgaggctgacagtctctgatgttctgaccacctacgtcacaatcctcattggggactttctaagggcatgttttgtgaggttttgcaattattgctggtgctgggacttggagtatggatatccttcatacaccgaattcgacatcagtggcaacgtcctcgctctgatcttcaaccaaggcatgatctggatgggctccttctttgctcccagcctcccaggcatcaatatccttcgactccatacatccatgtacttccagtgctgggccgttatgtgctgcaatgttcctgaggccagggtcttcaaagcttccagatcaaataacttctacctgggcatgctactgctcatcctcttcctgtccacaatgcctgtcttgtacatgatcgtgtccctcccaccatcttttgattgtggtccattcagtggcaaaaatagaatgtttgaagtcattggagagaccctggagcacgatttcccaagctggatggcgaagatcttgagacagctttcaaaccctgggctggtcattgctgtcattttggtgatggttttggccatctattatctcaatgctactgccaagggccagaaggcagcgaatctggatctcaaaaagaagatgaaaatgcaagctttggagaacaaaatgcgaaacaagaaaatggcagctgcacgagcagctgcagctgctggtcgccagtaataagtatcctgagagcccagaaaaggtacactttgccttgctgtttaaaagtaatgcaatatgtgaacgcccagagaacaagcactgtggaactgctattttcctgttctacccttgatggattttcaaggtcatgctggccaattaaggcatcatcagtcctacctgagcaacaagaatctaaactttattccaagtcagaaactgtttctgcagagccactctctcccctgctccatttcgtgactttttttttttttttaacaaattgagtttagaagtgagtgtaatccagcaatacagtttactggtttagttggtgggttaattaaaaaaaatttgctcatatgaactttcattttatatgtttcttttgcc

SEQ ID NO: 21622 - DNA, 2195 bp, Homo sapiens
  misc_feature 1..2195: note = ENST00000559781
  source 1..2195: mol_type = unassigned DNA; mol_type = unassigned DNA
cttcatgtcccgctgtgggaggggctctggagcgccgggactgtgagatggccaatgacggtctgacccgttgggccgggccaggtcgcggacaacgtcgaccgtttgtttaagaagcgtggactcttgtcctgagtgcaccgaggctttcagcctgcgggacagtggtgcgatttgcattagagaaagggagatgccatgtgctggcccagcactccaacaggggcctgacctctaggaacgggacactggaggaagcctagacatctgaacaaatcaagtcatccagatccacggtcagctcctgccccgacttggccttcctcctgctgggctggcccacggacctcgggaacctgccctggctgtgggtgacctgcagcctatctcccaggactatggaagccccatgcaggaacatggttctgacactttggggattataccctaagcttaaaggactggaaaagcccctgaagtcccgagaccacaaccctccaccttctaaagataagacaagtcactgaaggtctcagaactgtggcccattcaccccttccctcaagacaagagtgtggccaagcatcaatctcacccccagagaccagacggtgtccaggtcttgggcagacgaaacctgctccttggggatggtcttcctggctgtgcttccaaagggctggcctgcaatcagctggttttcacttgatcctttcggggtttgcattatatctgactgaaggaatgaactgggagagaacagcagagccgcagcggaatgtggaaaggcccacgtccagactgttcccattctgatttaaaagcctgatgaaggaacagctgaactcagagaaacagcagaggaaaggtcctgtgagggtacagtgagaagatggccatctaccagccaggaggaaaggcctaacaagaaaccaactctgctggcaccttgatcgtgaactcccgccctctagaactgtgagaaaataaacgtctgtttaagccacctggtctgtggtattttgttatggaagcccgagcagaccaatatgcctactaagctctgtgacctagaaggctcctcttctgtctttttcctcctggaatgtgagaaaatctggcaaagtgggagccagagaggctaggccactaaaagcctgtgtgcgaaatgatctgtacacagcgaattgactccacctttcacacattactacttaaatcatgaaaggagcattgcaaggaggaagtattttaacagcagaagaaaacatgcctccaatgtcaagaaatttcagcacaattttgtgcagccaggaccagatgaagggaaaggccaagcaatatgttttgaggactgaatatctatgcttccccaaattcatatgttgaaatcctaacttccgatgtgaagatatttgtaggtggggctttaagagataattaggtcacaagggcagagcccccatgagtgggattagtgctcttagaaaagggacccaagagggctgtctctcttgccctctttccgccatatgagaatccaatgagatggcatcatctgcaaatcaggaagaggatgctcaccagacaccagatctgccagcaccttgatcttggactcctcagcctctagaactgtaagaaataacgtttgttgtttaagcaacccagtctatggcaacttgttatagcagcctgaactaagataatctataaggtaaggcaaataagaaaaaaatccaaacccaaaatgactttaagcgactcctagaggaaccctgccaacatcactaagttcagagaggtaaaatcaggcaacaagcagaattatcttcgggggtccataaaaatttccaggtctggtcgcaactgtcatatcttgacacaaaggggcacatattggatcccagaaagttctatggacttcttagggcttgcaaaagttgtataattttattgattatataagtaatacatgttcattgttgagattttggaaataataatctatcatctgacctctctgagaaaaccattattaaccttttaactttctactttctgttatttgcattcatacatgtttatccattatccatgtagcattttttatcatgcttttgaactccattttatttacatcatgatgacttgatagtgacaaaaaagattccaaaatatgattttaatgacag

SEQ ID NO: 21623 - DNA, 273 bp, Homo sapiens
  misc_feature 1..273: note = ENST00000560973
  source 1..273: mol_type = unassigned DNA; mol_type = unassigned DNA
tctgacccgttgggccgggccaggtcgcggacaacgtcgaccgtttgtttaagaagcgtggactcttgtcctgagtgcaccgaggctttcagcctgcgggacagtggtgcgatttgcattagagcctatctcccaggactatggaagccccatgcaggaacatggttctgacactttggggattataccctaagcttaaaggactggaaaagcccctgaagtcccgagaccacaaccctccaccttctaaagataagacaagtcactgaaggt

SEQ ID NO: 21624 - DNA, 1269 bp, Homo sapiens
  misc_feature 1..1269: note = ENST00000560851
  source 1..1269: mol_type = unassigned DNA; mol_type = unassigned DNA
atcgtggggagaagcaacgcaagaccccggaagcatgccaacgtgtaaaaccccaagtcaaaggtcaaacagtgcactggatctctcaagtcgcctgcttggccctctactaaaaagggagatgccatgtgctggcccagcactccaacaggggcctgacctctaggaacgggacactggaggaagcctagacatctgaacaaatcaagtcatccagatccacggtcagctcctgccccgacttggccttcctcctgctgggctggcccacggacctcgggaacctgccctggctgtgggtgacctgcagcctatctcccaggactatggaagccccatgcaggaacatggttctgacactttggggattataccctaagcttaaaggactggaaaagcccctgaagtcccgagaccacaaccctccaccttctaaagataagacaagtcactgaaggtctcagaactgtggcccattcaccccttccctcaagacaagagtgtggccaagcatcaatctcacccccagagaccagacggtgtccaggtcttgggcagacgaaacctgctccttggggatggtcttcctggctgtgcttccaaagggctggcctgcaatcagctggttttcacttgatcctttcggggtttgcattatatctgactgaaggaatgaactgggagagaacagcagagccgcagcggaatgtggaaaggcccacgtccagactgttcccattctgatttaaaagcctgatgaaggaacagctgaactcagagaaacagcaggtgaaaagtccaagtcaaggaatagaagtagtcagttcgtggtggagttgcattgatgattccagagcggttcctgctcctcctctttaagccagtgtgttttaccaaagattttcgggacaaagaaaaagccaggcagtaggtgccaaatacagtgactcatcagatgaccctgctgtttatctccaacattttcatgaacagctttcaaggaatgaaggaaggaaatgttctgtgtccataaagtaggattggaaacagttgacttgtatgaacatggccaacacaaaatagtccagggggatgtggaatatttgaggagaacaacattagactgagaaattatgacagtcaggaaaagaaaaattgtaccaaatatcaaagaacgtgagtttttttcaacagaaaactaaagcgatagatggaacctgtgagttcacttctaaaggagcattaaaaaaaaaatgaaacctaggaaaa

SEQ ID NO: 21625 - DNA, 479 bp, Homo sapiens
  misc_feature 1..479: note = ENST00000559277
  source 1..479: mol_type = unassigned DNA; mol_type = unassigned DNA
agcccctgaagtcccgagaccacaaccctccaccttctaaagataagacaagtcactgaaggtaaaatcagctcctcagtgtctccaaggacaggaatgccatgggctgggaggcgccatgggtgaacagacttccctacttcctgcctccccaagggtggggagcagtctaggggatggctgtactcctgggcccagtgtctaagtgaaaattaggaggaaatggagggagggtggcgagcgaggacagactggccaaggtcccccgcagccactcctgaagtcctcacgagggagaagcagcctctccttccagccttccccaagtcctccctaagagtgtattctactggtttctgtgcagatttttttcggctgcgaccaatagtagcttaaacatggattattttctttttaatttcttcctgcaaaattcttaggaaaccattaataaaagtaatatacatgtgaaataataa

SEQ ID NO: 21626 - DNA, 2726 bp, Homo sapiens
  misc_feature 1..2726: note = ENST00000612811
  source 1..2726: mol_type = unassigned DNA; mol_type = unassigned DNA
tatatctgactgaaggaatgaactgggagagaacagcagagccgcagcggaatgtggaaaggcccacgtccagactgttcccattctgatttaaaagcctgatgaaggaacagctgaactcagagaaacagcaggtgaaaagcctttctactctgtgttctccaattcatcctaaaatcaagaccaaggtagaattctcgaacttggcctattctgaaaaaaatggacatggctgggacagagagcttgtgtgaatattcccaattgtgaacatggaagctataaattgaggtgtcagaaccacaagatggaagtacgttggatttctgagtcaccacctggaggagagcttccctgcagcattgctggaatctgatgtgaactagatattcatcttgatcgtgttgacttgaacctaattcaggcctaagacataatatatactgcataatatatgccgtataatgataatatatttatgcagcctttattgatatgagtagtggtttatctcagttttataataaaaatctctcaaagaacattgactccaaggaataacaatcacaaaaggattacagctttgtttaacactttctgcaaatccttgaagctgatctttcctgttgtttctaatcccaatagccagcctaaaccttttggtgtaatctcatgtattctgacctctgttatttcctgctgcttaatgatctttctataaattgtatgggaaatgaagcaaatgtaattacagtgtctgccagccctgatgcagataaataggtgggagtctggccaagtgtctccccaagctagcctttggtgtctttcactcacagcagaaagaaataggtcataaattacagcactgatttgttccaatgatatcattagctcctggaaaacaaggatcatgaaaaacccatttcaaatgaacatatgagtcaataccaaccaagcatcttttggaaaagagcccttataaattcatactagaattctgactcctaagtgaatatctctggatcttcagaacatagaagacttagctccagcccatgcatcagtcccttcagaccatagagtcataaccaggcctattgaaagagctggttacatgagacagtcagagatttacctaggtgagaaaataaagattagatggtttgaagcagagttctagcccttccaaatcagacctccaacccctttcttaattctatagtttgtagttttcaaaggagaagttgtaataaagagtaagtaaactaacttctttttttcttatggtttttgtttgataatatgaggataaaagcatacccttttttgacctatcccaggataaaatgcaggtggagaaaaggttttccgtattgtctttagccttgacacaacaaaataggaaaagatattttccgatctgggttgagtagatgcaaagaagtgttttaaggtacatctgtagagcacactcagcacttggggactcaggtgcctcaagagaagctagagacctaatgtagggatatagaggccaggaggacacactggaacacagaagatgacagcttttgaaagagctcaagattctaatttcttgaaccagaggacagattctcctctatgtccgttcacactttcagactttactctgcattagccctctgttccccacacctgcttctggacccctgggtggttacacactctgacttcatcaacccttatccttattgtagggatatgaaatttaaaattggcatcttccacagccaattctggtcactattcttgttactttaactgatatgcaataaagaatatgcctgactttgtccctggttcctgggaagtagcatcaaaacctttagaatttcttaagtggtaggagtgtctattattcatggtgaactcctgggatcaaacttgatagtctgtgctaaagagatgactcaggacaggagctggctgctcctgccagaaagaccaaccatgtgattagagggtggggctttgagccaggtgatatcagctcagtctccagggagccaaggggagctagagattgaattcaactgcaaggccaaagattccatcagtcatgattgtgtaatgatacctcaataaaaactctgggcagcaaagctcagttgagcttcacaggttgttaatattctgataatgtcacacattgatatgccaggaaggtaatgcatccttactctttggggatagaacaacagaagctttgtgttgaactcccctagacctcattatatgtgtatctctttccctttggctggttctgatgtgtatccttttgctgtaataagactacaactgtaatttataggactttcttgagttccatgagtcattttagtgaattattaatcctgagggggttatgggaaccaccaaatttgtagcaagctggtcaggagtaagagtggcctgtgagcctttgaacttgtgtctgatgtctttagtttgtgtagtcttgtggaaaactgtgtccctaacctgtaaagtaactggtgtcaaaagtcagtgaaactaggcataattagaactcatggacattcacacccattccacttcagtcacatgcttccgaggcctcactgagttccttttacacatctatcttctctactttggttcttattccgtatgatggcaaaaagaaatacaactggactctaagatgatggtgactcatg

SEQ ID NO: 21627 - DNA, 658 bp, Homo sapiens
  misc_feature 1..658: note = ENST00000558086
  source 1..658: mol_type = unassigned DNA; mol_type = unassigned DNA
gtgttgctgacaagagaggagcaggctgagagaaaacgccctgtttgtcacaaagttacatctgcgagctccttcaaggaagggagtgcccctggagagtggagagggtggttctcttggctgtctctggaacaaatttgggtaagtgctcaaagatgtgttactacagaatgtacttgtgaagttcttgttgcagtgcagtcagataagcaaagatatctgctagaaaataaagaaaaagctacacaattttagactttgtagttcattgtcttttaagacagcaagtcctgctattgtctgtcataaagctacagaaaaagaccatattgaaaactgacgatagcagttgattatttgtgaaaagcctgagagatgattcagtaaatacaaggtgaatttcattgcatcttcatgcaatcagagacttgcatacactttttatcccctaaacagatgaacgaatggcatgggccagctagcagggagttggcaggataaagttctaaccaacaattgccacttgccttcctttcttccatcagcttctagcttacctttcagagacaggttctatcaaaggaaacctaaagggaaccttcctccctggccctgccccatctagcgtccacaaggatactacactccagtgaagact

SEQ ID NO: 21628 - DNA, 2043 bp, Homo sapiens
  misc_feature 1..2043: note = ENST00000642113
  source 1..2043: mol_type = unassigned DNA; mol_type = unassigned DNA
gcctgacgctccttgttaatgccggttgctgttacagacttgcaattgtgcaactctgtgatgtaaacaggcaggctttgtatttttgcagtgcccctggagagtggagagggtggttctcttggctgtctctggaacaaatttggaggaaaggtcctgtgagggtacagtgagaagatggccatctaccagccaggaggaaaggcctaacaagaaaccaactctgctggcaccttgatcgtgaactcccgccctctagaactgtgagaaaataaacgtctgtttaagccacctggtctgtggtattttgttatggaagcccgagcagaccaatatgcctactaaagtccaagtcaaggaatagaagtagtcagttcgtggtggagttgcattgatgattccagagcggttcctgctcctcctctttaagccagtgtgttttaccaaagattttcgggacaaagaaaaagccaggcagtaggtgccaaatacagtgactcatcagatgaccctgctgtttatctccaacattttcatgaacagctttcaaggaatgaaggaaggaaatgttctgtgtccataaagtaggattggaaacagttgacttgtatgaacatggccaacacaaaatagtccagggggatgtggaatatttgaggagaacaacattagactgagaaattatgacagtcaggaaaagaaaaattgtaccaaatatcaaagaacgtgagtttttttcaacagaaaactaaagcgatagatggaacctgtgagttcacttctaaaggagcattaaaaaaaaaatgaaacctaggaaaatttctgggaagaacatcattgtaaggagtggaaatatagttttcctgaagcattagatgcaaccaatgatgctataatgcatgcttgtttaagggttctggtaaaacagtatggttgttaaaagataagctccagaatttgagacagcatagatgacaagttacagagaaacatcttgaataaaacagcggaagttgttcatgggtaggatttatggtagatccttggagacagggaggacccttctgaattcaagaaagccaacattaattaccaagaaaaagaggagttacagattagaaaatttgactctggtgataggaaaagtcacagaaacttgatatgaaataagataataaaccagatggagaaatacgactgatggagctataagaagtctcaactgtgtaattaaaataaactcattttgctaatgagttagatatttttaagtctacacatttgaaaagggaacggagaagaaaagaaaaacttcattgtatttcaggagcaatctgtctcacctgctacacaaggaatattgctatgtgaaaacaaaggtttactcagcaatcatgcagtgacggcgttccaaattttcagttatttatttccttgcgttggagtaaataagagtaaataacaaatatagtactgatcaatcatgcttatccagctggagctggtgagacagcagattgcagaaatatcattcatttatccaacaaacaatggtagaaaatttatgtgccaaatcctgtgttggacactagaaattcaaagatcagtaagacattgcacctcgatgagtttaccatgtgggagagatacataatgccataattactatctaatgtgataatagagccctcctcaccagtctatggagacaaagatagacacttaatgcagcccgaaagagagaagtgaccagtcaagccttccttggttagagagatcccagccatgtttagagtgacagcaaagatttcagtgatttgggaaagaagagagatgcttcacattttaagcacaagatagttttcagggtgcagagaagagtaatttttctaaggacccagaggatccagtagacctctgtggatcaggacacctgggagagtcccagacatcagggcgactggaaggctcttccccaaccagggcatattccaaggctccaaggctccagctctcagaaagctttggggaatgttctaacag

SEQ ID NO: 21629 - DNA, 2738 bp, Homo sapiens
  misc_feature 1..2738: note = ENST00000569532
  source 1..2738: mol_type = unassigned DNA; mol_type = unassigned DNA
actccggcttctgtgatgtcagcgccggaacctggaatcccggctccgcgagggaaggccggggaggcggcggcggcggcggcggctggagagggtcctcggcagcctctgaggagcgcggggcgcggccatgagcgagtccagcggcagtgcgctccagcccggcaggcccagccggcagccggcggtccatccagagaacctctctctagactccagttgcttctcttctccacctgtgaacttcctccaagaattgccaagctaccggtccattgcacgtaggagaacgactgtccattcccgggacaagcaaagcggaactttgctaaagccaaccgactcttacagctcccagctggaggacagaatcgctgaaaacctcagcagccattctcttcgaaattatgcactgaacatctctgagaagcggagactaagggacattcaagagacacaaatgaagtatctctccgaatgggaccagtggaagcggtatagcagcaagtcttggaagaggttcctagagaaggctcgagagatgacgacccacctggagctgtggcgggaggacatccgcagcatagaagggaaatttggcactgggattcagtcctatttctccttcttgagattcctggtgttgctgaatttggtgatatttctgatcatctttatgctggttttgctcccagtcttactcacgaaatacaagatcaccaacagcagcttcgtgctcattcctttcaaagacatggataaacaatgtacagtctatccagtaagcagttctggactcatttacttttacagttatatcatagacttgctttctggcactggtttcctggaggaaactagcctcttttacggacattacaccattgatggggtgaaatttcagaacttcacctatgatctgcccctggcgtatttgttaagcacaatcgcctccctggccctgagccttctttggatagtgaaaaggtcggtggaaggattcaaaatcaacctgattcggagtgaggagcactttcagagttactgcaacaagatatttgccggctgggacttctgcatcactaaccgcagcatggcggatctgaagcacagcagcttgcggtacgagctccgagcagatctggaggaagaaagaatgcggcagaaaatagcagaaaggacctcagaagaaacaatacgcatttactctttgagactgtttttgaactgtattgttctggctgttttaggggcatgcttttatgcaatatacgtagcaactgtcttctcgcaagagcacatgaaaaaggaaatcgacaagatggtttttggagagaacctcttcatattgtatctaccgtctattgtgatcacgctggccaattttatcaccccaatgatctttgccaagatcatccgctatgaggattattctccaggctttgagatccgtctgacaatccttaggtgtgtctttatgcggctggccaccatatgtgtcctggtgttcacgctgggctccaagatcacatcctgtgatgatgacacatgtgacctttgcggctacaaccagaaactctacccgtgctgggagacccaagttgggcaggaaatgtacaagctgatgatcttcgacttcatcatcatcttggctgtgacactcttcgtggattttcctagaaagctcctggtgacctactgttcctcttgcaagctgattcagtgctgggggcagcaggagtttgccattcctgataacgtcctggggatagtttacgggcaaaccatctgctggatcggagcctttttctcaccccttctccctgcaattgcaaccctgaaattcattatcatcttctatgtgaaagagtggagtctgctttacacctgcagaccctcccccaggccgttcagagcatccaattctaatttcttcttcctgttggtgttgttgatcgggctgtgtttggcaataatacctctgacaatcagcatatcacgcatcccttcctcgaaagcctgtgggccgttcaccaacttcaacaccacctgggaggtcatccccaagacggtgagcaccttccccagctcgctgcagtccttcatccatggtgtcacatccgaagcctttgcagttcctttcttcatgattatttgcctcatcatgttttacttcattgccttagctggagcacacaaacgggtggtcatccagctccgagagcagctatccctggtaaggaagcatagctccagagggtcatggctggggacatttacccaggacactgcaaggaaagtgctgttttcctgggagggagtgaaattactgcagccttctctcaccaccacctccccaaaactctgccttgaggcccagccgcgtccagcttcattaattcactgattcatccattccttcaagatgtgtattaagggggatgtggtggctcatgcctgtaatcccagcacttttgggaggccgaggcaggcagattacttgagctcaggagttcaagaccagcctggccaacatggtgaaaccccgtctctactaaaaatacaaaaagtagttgggcgtggtggtgggcacctgtaatcccagctacttgggaggctgaggcaggagaatcccttgaactcaggaggtggaggtcgcagtgagctgagattgcgctattgcactccagcctgggtgacagagtgagactccatcttaaaaataaaaataaaaaaag

SEQ ID NO: 21630 - DNA, 3640 bp, Homo sapiens
  misc_feature 1..3640: note = ENST00000304381
  source 1..3640: mol_type = unassigned DNA; mol_type = unassigned DNA
actccggcttctgtgatgtcagcgccggaacctggaatcccggctccgcgagggaaggccggggaggcggcggcggcggcggcggctggagagggtcctcggcagcctctgaggagcgcggggcgcggccatgagcgagtccagcggcagtgcgctccagcccggcaggcccagccggcagccggcggtccatccagagaacctctctctagactccagttgcttctcttctccacctgtgaacttcctccaagaattgccaagctaccggtccattgcacgtaggagaacgactgtccattcccgggacaagcaaagcggaactttgctaaagccaaccgactcttacagctcccagctggaggacagaatcgctgaaaacctcagcagccattctcttcgaaattatgcactgaacatctctgagaagcggagactaagggacattcaagagacacaaatgaagtatctctccgaatgggaccagtggaagcggtatagcagcaagtcttggaagaggttcctagagaaggctcgagagatgacgacccacctggagctgtggcgggaggacatccgcagcatagaagggaaatttggcactgggattcagtcctatttctccttcttgagattcctggtgttgctgaatttggtgatatttctgatcatctttatgctggttttgctcccagtcttactcacgaaatacaagatcaccaacagcagcttcgtgctcattcctttcaaagacatggataaacaatgtacagtctatccagtaagcagttctggactcatttacttttacagttatatcatagacttgctttctggcactggtttcctggaggaaactagcctcttttacggacattacaccattgatggggtgaaatttcagaacttcacctatgatctgcccctggcgtatttgttaagcacaatcgcctccctggccctgagccttctttggatagtgaaaaggtcggtggaaggattcaaaatcaacctgattcggagtgaggagcactttcagagttactgcaacaagatatttgccggctgggacttctgcatcactaaccgcagcatggcggatctgaagcacagcagcttgcggtacgagctccgagcagatctggaggaagaaagaatgcggcagaaaatagcagaaaggacctcagaagaaacaatacgcatttactctttgagactgtttttgaactgtattgttctggctgttttaggggcatgcttttatgcaatatacgtagcaactgtcttctcgcaagagcacatgaaaaaggaaatcgacaagatggtttttggagagaacctcttcatattgtatctaccgtctattgtgatcacgctggccaattttatcaccccaatgatctttgccaagatcatccgctatgaggattattctccaggctttgagatccgtctgacaatccttaggtgtgtctttatgcggctggccaccatatgtgtcctggtgttcacgctgggctccaagatcacatcctgtgatgatgacacatgtgacctttgcggctacaaccagaaactctacccgtgctgggagacccaagttgggcaggaaatgtacaagctgatgatcttcgacttcatcatcatcttggctgtgacactcttcgtggattttcctagaaagctcctggtgacctactgttcctcttgcaagctgattcagtgctgggggcagcaggagtttgccattcctgataacgtcctggggatagtttacgggcaaaccatctgctggatcggagcctttttctcaccccttctccctgcaattgcaaccctgaaattcattatcatcttctatgtgaaagagtggagtctgctttacacctgcagaccctcccccaggccgttcagagcatccaattctaatttcttcttcctgttggtgttgttgatcgggctgtgtttggcaataatacctctgacaatcagcatatcacgcatcccttcctcgaaagcctgtgggccgttcaccaacttcaacaccacctgggaggtcatccccaagacggtgagcaccttccccagctcgctgcagtccttcatccatggtgtcacatccgaagcctttgcagttcctttcttcatgattatttgcctcatcatgttttacttcattgccttagctggagcacacaaacgggtggtcatccagctccgagagcagctatccctggaaagtcgtgacaagtgctacctaatccagaaactaacagaagcccaaagggacatgaggaactaactagactgagcgtgaagatggtgctgcctgttgcttctaagctgacctagtgattctgctgagcctacagagtctacctgggttttgagtggacatttaaaaatatatttttcttgagtttaggcttttccatatgtgcagctgtgtttacctaacccagcccttaattagggcttcagtgacttagaaaagcaggggaaacccaaggctttgcctgcagaccggccactctgtgacaactctaccaaaaaccaacaagccattcaagcttttacaagaatgaaagagcggagacggtagtttagtatttgagccacgagtttatgtgcacaagtgttttgggttgtggactgaagctcagcctgttaatcagaccagcccatgagtgtataacaaacagaattggaggctggtttcttaaacacacacgtccacattttttagggttgttttcctgtgcttacaatttttaatgcatgtgcctttatttcacaaaacatgtggctgggcgcagcggctcacgcctgttatcccaacactttgggaggccgaggcaggcggagcacctaagttggggagttcaagaccagcctgaccaacgtggagaaactccgtctccactaaaatacaaaattagctgggtgtggtggcacatgcctgtaatatcagctactcaggaggctgaggcaggagaattgcttgaacccaggaggtggagtttgcagtgagctgagatcacaccattgcactccagcctgggcaaaaagagcaaaactctccctaaaaaaaaaatgtagaatatctcttaagatttccgttatggtaaaaaccatatgcaataaatacctcattgtaagcttacccaaaattgatagatgtcaaccttttaacagaagaacagaagtttaagttattgtttaatgtaatcagttttcattttaatatctttgaaatctttttcaaaggactgtagttttgtaatggacttttcaagccttccttccattgtttttcttccgttcactggctccacacgtttcctggggagtagcctggaatttaaagttgggtgcaggttttagaaagctgttgctgttaacaataattctcccggccatctccactccactactcaaaaatgcctgaatccttgctcagaggagcaaaggtatcttctcgtccctttcttacagccattttcttgcttttccacaaagatattatttaaagtggaatatttttgtaactgggataccaatgagcttttcggtcttttcctgacttggtaaggtttatgggtttctaaatctaataactacagtcataccaccctgaaaa

SEQ ID NO: 21631 - DNA, 1617 bp, Homo sapiens
  misc_feature 1..1617: note = ENST00000568469
  source 1..1617: mol_type = unassigned DNA; mol_type = unassigned DNA
agagggtcctcggcagcctctgaggagcgcggggcgcggccatgagcgagtccagcggcagtgcgctccagcccggcaggcccagccggcagccggcggtccatccagagaacctctctctagactccagttgcttctcttctccacctgtgaacttcctccaagaattgccaagctaccggtccattgcacgtaggagaacgactgtccattcccgggacaagcaaagcggaactttgctaaagccaaccgactcttacagctcccagctggaggacagaatcgctgaaaacctcagcagccattctcttcgaaattatgcactgaacatctctgagaagcggagactaagggacattcaagagacacaaatgaagtatctctccgaatgggaccagtggaagcggtatagcagcaagtcttggaagaggttcctagagaaggctcgagagatgacgacccacctggagctgtggcgggaggacatccgcagcatagaagggaaatttggcactgggattcagtcctatttctccttcttgagattcctggtgttgctgaatttggtgatatttctgatcatctttatgctggttttgctcccagtcttactcacgaaatacaagatcaccaacagcagcttcgtgctcattcctttcaaagacatggataaacaatgtacagtctatccagtaagcagttctggactcatttacttttacagttatatcatagacttgctttctggcactggtttcctggaggaaactagcctcttttacggacattacaccattgatggggtgaaatttcagaacttcacctatgatctgcccctggcgtatttgttaagcacaatcgcctccctggccctgagccttctttggatagtgaaaaggtcggtggaaggattcaaaatcaacctgattcggagtgaggagcactttcagagttactgcaacaagatatttgccggctgggacttctgcatcactaaccgcagcatggcggatctgaagcacagcagcttgcgatctggaggaagaaagaatgcggcagaaaatagcagaaaggacctcagaagaaacaatacgcatttactctttgagactgtttttgaactgtattgttctggctgttttaggggcatgcttttatgcaatatacgtagcaactgtcttctcgcaagagcacatgaaaaaggaaatcgacaagatggtttttggagagaacctcttcatattgtatctaccgtctattgtgatcacgctggccaattttatcaccccaatgatctttgccaagatcatccgctatgaggattattctccaggctttgagatccgtctgacaatccttaggtgtgtctttatgcggctggccaccatatgtgtcctggtgttcacgctgggctccaagatcacatcctgtgatgatgacacatgtgacctttgcggctacaaccagaaactctacccggtgagttgcggggcgggggcgttcggctgggtgggtccttctggaatacagtgtcatggtcaagagaacagcggttgaagccatgggtttgaactgcatttgcttcgctttcttgttctagtgatgagacagagtctg

SEQ ID NO: 21632 - DNA, 4499 bp, Homo sapiens
  misc_feature 1..4499: note = ENST00000421369
  source 1..4499: mol_type = unassigned DNA; mol_type = unassigned DNA
ttccttattcctgctccctccacaaacgcgtcctcatccaatccagtggaacccagccgggccaaaaggacacgagaactgcagtctggaccgtggtgggtttgtcttccagctgttgaccgagacagtctttcaatagcctcatctgctgttaaatgaaaggatttgagcaccccctccacgcctaacattctggtatgaggtgcctgcctcccggacatttcagccttcacatacagttagaccaacttgaaaccgaattctgccttgtctgtttattgctgtgggacctttgagaacctctctctagactccagttgcttctcttctccacctgtgaacttcctccaagaattgccaagctaccggtccattgcacgtaggagaacgactgtccattcccgggacaagcaaagcggaactttgctaaagccaaccgactcttacagctcccagctggaggacagaatcgctgaaaacctcagcagccattctcttcgaaattatgcactgaacatctctgagaagcggagactaagggacattcaagagacacaaatgaagtatctctccgaatgggaccagtggaagcggtatagcagcaagtcttggaagaggttcctagagaaggctcgagagatgacgacccacctggagctgtggcgggaggacatccgcagcatagaagggaaatttggcactgggattcagtcctatttctccttcttgagattcctggtgttgctgaatttggtgatatttctgatcatctttatgctggttttgctcccagtcttactcacgaaatacaagatcaccaacagcagcttcgtgctcattcctttcaaagacatggataaacaatgtacagtctatccagtaagcagttctggactcatttacttttacagttatatcatagacttgctttctggcactggtttcctggaggaaactagcctcttttacggacattacaccattgatggggtgaaatttcagaacttcacctatgatctgcccctggcgtatttgttaagcacaatcgcctccctggccctgagccttctttggatagtgaaaaggtcggtggaaggattcaaaatcaacctgattcggagtgaggagcactttcagagttactgcaacaagatatttgccggctgggacttctgcatcactaaccgcagcatggcggatctgaagcacagcagcttgcggtacgagctccgagcagatctggaggaagaaagaatgcggcagaaaatagcagaaaggacctcagaagaaacaatacgcatttactctttgagactgtttttgaactgtattgttctggctgttttaggggcatgcttttatgcaatatacgtagcaactgtcttctcgcaagagcacatgaaaaaggaaatcgacaagatggtttttggagagaacctcttcatattgtatctaccgtctattgtgatcacgctggccaattttatcaccccaatgatctttgccaagatcatccgctatgaggattattctccaggctttgagatccgtctgacaatccttaggtgtgtctttatgcggctggccaccatatgtgtcctggtgttcacgctgggctccaagatcacatcctgtgatgatgacacatgtgacctttgcggctacaaccagaaactctacccgtgctgggagacccaagttgggcaggaaatgtacaagctgatgatcttcgacttcatcatcatcttggctgtgacactcttcgtggattttcctagaaagctcctggtgacctactgttcctcttgcaagctgattcagtgctgggggcagcaggagtttgccattcctgataacgtcctggggatagtttacgggcaaaccatctgctggatcggagcctttttctcaccccttctccctgcaattgcaaccctgaaattcattatcatcttctatgtgaaagagtggagtctgctttacacctgcagaccctcccccaggccgttcagagcatccaattctaatttcttcttcctgttggtgttgttgatcgggctgtgtttggcaataatacctctgacaatcagcatatcacgcatcccttcctcgaaagcctgtgggccgttcaccaacttcaacaccacctgggaggtcatccccaagacggtgagcaccttccccagctcgctgcagtccttcatccatggtgtcacatccgaagcctttgcagttcctttcttcatgattatttgcctcatcatgttttacttcattgccttagctggagcacacaaacgggtggtcatccagctccgagagcagctatccctggaaagtcgtgacaagtgctacctaatccagaaactaacagaagcccaaagggacatgaggaactaactagactgagcgtgaagatggtgctgcctgttgcttctaagctgacctagtgattctgctgagcctacagagtctacctgggttttgagtggacatttaaaaatatatttttcttgagtttaggcttttccatatgtgcagctgtgtttacctaacccagcccttaattagggcttcagtgacttagaaaagcaggggaaacccaaggctttgcctgcagaccggccactctgtgacaactctaccaaaaaccaacaagccattcaagcttttacaagaatgaaagagcggagacggtagtttagtatttgagccacgagtttatgtgcacaagtgttttgggttgtggactgaagctcagcctgttaatcagaccagcccatgagtgtataacaaacagaattggaggctggtttcttaaacacacacgtccacattttttagggttgttttcctgtgcttacaatttttaatgcatgtgcctttatttcacaaaacatgtggctgggcgcagcggctcacgcctgttatcccaacactttgggaggccgaggcaggcggagcacctaagttggggagttcaagaccagcctgaccaacgtggagaaactccgtctccactaaaatacaaaattagctgggtgtggtggcacatgcctgtaatatcagctactcaggaggctgaggcaggagaattgcttgaacccaggaggtggagtttgcagtgagctgagatcacaccattgcactccagcctgggcaaaaagagcaaaactctccctaaaaaaaaaatgtagaatatctcttaagatttccgttatggtaaaaaccatatgcaataaatacctcattgtaagcttacccaaaattgatagatgtcaaccttttaacagaagaacagaagtttaagttattgtttaatgtaatcagttttcattttaatatctttgaaatctttttcaaaggactgtagttttgtaatggacttttcaagccttccttccattgtttttcttccgttcactggctccacacgtttcctggggagtagcctggaatttaaagttgggtgcaggttttagaaagctgttgctgttaacaataattctcccggccatctccactccactactcaaaaatgcctgaatccttgctcagaggagcaaaggtatcttctcgtccctttcttacagccattttcttgcttttccacaaagatattatttaaagtggaatatttttgtaactgggataccaatgagcttttcggtcttttcctgacttggtaaggtttatgggtttctaaatctaataactacagtcataccaccctgaaaatgcctgatctcgtctaaatctaataactggtgtcatggaattttgagtaaccaaagattcattccagtctcacttaaaaaaataaattctgctgggcacagtggctcatgcctgcaatcccagaactttgggagtccaaggagggcagatcacctgaagtcagaagtttgagaccagcctggtcaatgtggcaagaccccgtctctactaaaagtacaaaaattagccaggcatggtggcgtgtgcctgtaatcccagctacttgggaggctgaggcatgagaatcacttgaacctgggaggtgaaggctgcagtgtgcgagaccgtgccactgtactccagcctaggtgacagagggagaccctatctcaaaaaaaaagataggtgaaaagaaaaaaaaagttgtaattgtaaacatttctgcccagtgcctttatatttatataacattttcactgtgaccagacttgatgatattcaagttttctatttgtgtgtgtgtgtgtgtgtgtgtgtgatgaacacaacgaaaacgtactgcgttttttttcctattataaaagtgatactgaaatatgctaattaatatattaattttagttaaatgctgctaatatgcatacctcttacttgaaggtttttaatatgttttgataactttaataacttcaggtgatgtctgtataacttttaaagtgcagctctctctaacaaatgtgccttacaactcctgattaaacggcgtcttgaaggttttaaaa

SEQ ID NO: 21633 - DNA, 594 bp, Homo sapiens
  misc_feature 1..594: note = ENST00000561963
  source 1..594: mol_type = unassigned DNA; mol_type = unassigned DNA
ctacaaaaaatacaaataattagctaggtgtggtagcgtgtgcttatagtttgagctatgcgggaggctgaggtgggaggatcacctgaacttggtgaggctgaggctgcagtgagccatgatcacactgctgcactccaccctgggtgacagagtgagaccccatctcaaaaagtaaaaaataaaataaaatgtaggtctggtctgaatcagaggcttgcaactgagatgggtcagcatgagctttataacatggcatatttctggagcccacatgagacctatcgaattgaaaatctcaggtcggtggaaggattcaaaatcaacctgattcggagtgaggagcactttcagagttactgcaacaagatatttgccggctgggacttctgcatcactaaccgcagcatggcggatctgaagcacagcagcttgcggcagatctggaggaagaaagaatgcggcagaaaatagcagaaaggacctcagaagaaacaatacgcatttactctttgagactgtttttgaactgtattgttctggctgttttaggggcatgcttttatgcaatatacgtagcaactgtcttctcgc

SEQ ID NO: 21634 - DNA, 1747 bp, Homo sapiens
  misc_feature 1..1747: note = ENST00000424486
  source 1..1747: mol_type = unassigned DNA; mol_type = unassigned DNA
ggaacagaggtagcctgaaagaagcaggaactccaggatcccaaaccagagcagaccctatagtaaagtatttttacatcttttcctttccccagaagagatccctaacctattgttttattgacagccttgctgttagaggctctttcccagaagttggacgaagaggctcaggcgttgctgtttcttgtcttccaagtcaagtggttactctggtaatggattgcctctctccgagctttcaccctggtgagactgtccagatctagtctgtaaacccagcttagaagcactgttgtaaaaatgactgaagagcccatcaaggagatcctgggagccccaaaggctcacatggcagcgacgatggagaagagccccaagagtgaagttgtgatcaccacagtccctctggtcagtgagattcagttgatggctgctacagggggtaccgagctctcctgctaccgctgcatcatcccctttgctgtggttgtcttcatcgccggcatcgtggtcaccgcggtggcttacagcttcaattcccatgggtctattatctccatctttggcctggttgttctgtcatctggactttttttactagcctccagtgccttgtgctggaaagtgagacaaaggagcaagaaagccaagagacgggagagtcaaacagctctcgtggcaaatcagagaagcttgtttgcttgagactgaatacgaccaaatgggccattgggcctggaaaacgtgctctgactttgtcacccaattcacccagaaccatggtgggagagaacagacttggcgttggagcagactggaagaatgggggtgggagggtggaggggcttctcctttgtgaggaatgactcatgtcttctttaacgacaaacttaaccctaagggctacttctgagactgaaaaatcagctttctatttacatgaaacactttgggggtcatgggagtgcacagcattagacagtatttggttcaccctgtaaagtagccaagaaaagatgagaaaaatcaagataggcctggcacactagacatttgcctccaaaagaaataacctacagtcttaagatgtatcataaaaatgttctgccaaggatctaaattaccttgggtttcgcatatgtctatgaaattctgtgataatttttttcaatacattgattcactggcgtctgttttcattttatacttttaataactcatcactggtggtactttatcttgaaaagtaatattttttatattttaacattggacagtgttagccagttgtaatgatgtatcagaagtaaagaaaaacccattaaagttatagctaatagatgctgttgggggttaaattaatagtaaaataatccaatatagcacttttgatgatttttatataaaagtcaactgtacatttcattcagaataataaatacttattgctgctaaaacttcttaaatggttgtttctgctatagttatttctattgcagttccaaattgccatcttcccttgtctcatttgcaagttctcaattgtatttctctcaaatggacaggttccttctttactggaggatttttgtttttatcatattggtttttcattacttctgaatagtcttaattacgtttactaaattctaaaggatttctgtgctattataattaggaaatcaacgtctttggtcaggaactttataatgtgctattaaatgtatattacatttttgtggaa

SEQ ID NO: 21635 - DNA, 1962 bp, Homo sapiens
  misc_feature 1..1962: note = ENST00000575734
  source 1..1962: mol_type = unassigned DNA; mol_type = unassigned DNA
cagttgcttctacaaaacccgtgaaagttctctgtccaaaagccttgttggtcccgcggtacatgcttcctgttcccagagagattcacccttgggctttcctatcagtcttccctaaagttggctgctcctgtgtcctgtcacataaaactgtgaaccgaggtctccgacttacgtcatgtcagtcacagcagggtgaggctccacaagtgtgagttctggcccctgctgctttcctttcaaatgcagtttacagtttattatggtattggacaccccatgctccttactgcattggctttgggtaagaaggagtgaaaattagtgtgcgaacctgaaaacctagaatttctgattgggactgaagaaaacctttgtgctgcagtcagtccccgagccagacgcctgtgactctcttcacatggaaatagatgactatccacagtaaaagcaaaattaaaaagtgacttgtgaaaaatatcctccatgctcctcttaccaagcctgcaacttaaaacctatggtttaaactgtgctttcaattatctggaggaggccagcactgatgagcccatcctgagccagtcattttaaggccagtgctacctaactgagacaaggctaatctggtcgccttgctgttagaggctctttcccagaagttggacgaagaggctcaggcgttgctgtttcttgtcttccaagtcaagtggttactctggtaatggattgcctctctccgagctttcaccctggtgagactgtccagatctagtctgtaaacccagcttagaagcactgttgtaaaaatgactgaagagcccatcaaggagatcctgggagccccaaaggctcacatggcagcgacgatggagaagagccccaagagtgaagttgtgatcaccacagtccctctggtcagtgagattcagttgatggctgctacagggggtaccgagctctcctgctaccgctgcatcatcccctttgctgtggttgtcttcatcgccggcatcgtggtcaccgcggtggcttacagcttcaattcccatgggtctattatctccatctttggcctggttgttctgtcatctggactttttttactagcctccagtgccttgtgctggaaagtgagacaaaggagcaagaaagccaagagacgggagagtcaaacagctctcgtggcaaatcagagaagcttgtttgcttgagactgaatacgaccaaatgggccattgggcctggaaaacgtgctctgactttgtcacccaattcacccagaaccatggtgggagagaacagacttggcgttggagcagactggaagaatgggggtgggagggtggaggggcttctcctttgtgaggaatgactcatgtcttctttaacgacaaacttaaccctaagggctacttctgagactgaaaaatcagctttctatttacatgaaacactttgggggtcatgggagtgcacagcattagacagtatttggttcaccctgtaaagtagccaagaaaagatgagaaaaatcaagataggcctggcacactagacatttgcctccaaaagaaataacctacagtcttaagatgtatcataaaaatgttctgccaaggatctaaattaccttgggtttcgcatatgtctatgaaattctgtgataatttttttcaatacattgattcactggcgtctgttttcattttatacttttaataactcatcactggtggtactttatcttgaaaagtaatattttttatattttaacattggacagtgttagccagttgtaatgatgtatcagaagtaaagaaaaacccattaaagttatagctaatagatgctgttgggggttaaattaatagtaaaataatccaatatagcacttttgatgatttttatataaaagtcaactgtacatttcattcagaataataaatacttattgctgct

SEQ ID NO: 21636 - DNA, 720 bp, Homo sapiens
  misc_feature 1..720: note = ENST00000571679
  source 1..720: mol_type = unassigned DNA; mol_type = unassigned DNA
cacttcagaccacaaatccccacctcattttcaatgaattttttgctgaactgtccacctaaagtgggtaataaaaagatcccagggagcaggttgcactgtgtttaatagtaacacaataaagatttgttggctgtcattcaatggagaagaacatcatttgttgctggccacttgccttgacattgattttgtgggcagccaatgggtgatagtttgcaaagaatgcatgttatgcccagcaagattggcggagtctgagttgctctttcaccctggtgagactgtccagatctagtctgtaaacccagcttagaagcactgttgtaaaaatgactgaagagcccatcaaggagatcctgggagccccaaaggctcacatggcagcgacgatggagaagagccccaagagtgaagttgtgatcaccacagtccctctggtcagtgagattcagttgatggctgctacagggggtaccgagctctcctgctaccgctgcatcatcccctttgctgtggttgtcttcatcgccggcatcgtggtcaccgcggtggcttacagcttcaattcccatgggtctattatctccatctttggcctggttgttctgtcatctggactttttttactagcctccagtgccttgtgctggaaagtgagacaaaggagcaagaaagccaagagacgggagagtcaaacagctctcgtggcaaatcaga

SEQ ID NO: 21637 - DNA, 566 bp, Homo sapiens
  misc_feature 1..566: note = ENST00000575685
  source 1..566: mol_type = unassigned DNA; mol_type = unassigned DNA
gtagaaatgattcggactcatcatgtcactgagcaaagctgggggaagccaaaactcagaatctgctggcaaggaaaagaacgaaggaaaaaaaaaaatccttgctgttagaggctctttcccagaagttggacgaagaggctcaggcgttgctgtttcttgtcttccaagtcaagtggttactctggtaatggattgcctctctccgagcagattggaagatattgttacacttcagaccacaaatccccacctcattttcaatgaattttttgctgaactgtccacctaaagtgggtaataaaaagatcccagggagcaggttgcactgtgtttaatagtaacacaataaagatttgttggctgtcattcaatggagaagaacatcatttgttgctggccacttgccttgacattgattttgtgggcagccaatgggtgatagtttgcaaagaatgcatgttatgcccagcaagattggcggagtctgagttgctgtaagttctgggattaatggtacgaaatattgtttgtaatgtattctcctcttgaatgagaccatcttt

SEQ ID NO: 21638 - DNA, 570 bp, Homo sapiens
  misc_feature 1..570: note = ENST00000570586
  source 1..570: mol_type = unassigned DNA; mol_type = unassigned DNA
gtcatttaggaacagaggtagcctgaaagaagcaggaactccaggatcccaaaccagagcagaccctatagtaaagtatttttacatcttttcctttccccagaagagatccctaacctattgttttattgacagccttgctgttagaggctctttcccagaagttggacgaagaggctcaggcgttgctgtttcttgtcttccaagtcaagtggttactctggtaatggattgcctctctccgaggtgagtcagattggaagatattgttacacttcagaccacaaatccccacctcattttcaatgaattttttgctgaactgtccacctaaagtgggtaataaaaagatcccagggagcaggttgcactgtgtttaatagtaacacaataaagatttgttggctgtcattcaatggagaagaacatcatttgttgctggccacttgccttgacattgattttgtgggcagccaatgggtgatagtttgcaaagaatgcatgttatgcccagcaagattggcggagtctgagttgctgtaagttctgggattaatggtacgaaatatt

SEQ ID NO: 21639 - DNA, 570 bp, Homo sapiens
  misc_feature 1..570: note = ENST00000575806
  source 1..570: mol_type = unassigned DNA; mol_type = unassigned DNA
tttcaaatgcagtttacagtttattatggtattggacaccccatgctccttactgcattggctttgggtaagaaggagtgaaaattagtgtgcgaacctgaaaacctagaatttctgattgggactgaagaaaacctttgtgctgcagtcagtccccgagccagacgcctgtgactctcttcacatggaaatagatgactatccacagtaaaagcaaaattaaaaagtgacttgtgaaaaatatcctccatgctcctcttaccaagcctgcaacttaaaacctatggtttaaactgtgctttcaattatctggaggaggccagcactgatgagcccatcctgagccagtcattttaaggccagtgctacctaactgagacaaggctaatctggtcgccttgctgttagaggctctttcccagaagttggacgaagaggctcaggcgttgctgtttcttgtcttccaagtcaagtggttactctggtaatggattgcctctctccgaggtgagtgtaagtaatttggggacagatcttgattttcaggttagctcaatctcagctttgggg

SEQ ID NO: 21640 - DNA, 555 bp, Homo sapiens
  misc_feature 1..555: note = ENST00000514529
  source 1..555: mol_type = unassigned DNA; mol_type = unassigned DNA
gctttctcctgagccgtcggagggagccggagcgcttctcccgagttggtgatagattggtggtcatccaacatgcagaaatgaatgagcagtgaaaagcagcagagccgatgggtcatgaggatgtaagtgcgtttgaaggcttccacaccctctactccaggatgcttttcaacttatggtggtgtgacatcctgataaacacaatcctccgaagtactttggaaacgtactagcaccattctccgaggcccgatgatcgtacagtggctggaaacggcattttcgcatgtgcttttcctgagtctaggttgtcaggtggatccttcttaggctcctcagtttgaacaagctgtcagagtgtatcaaagaataccagataggaggagaagaaaaagtaacagctgaaaaaaaaaaagagggaaaaaagagtaggcactcccctccacccactctccggttccattcagcacactgacttcattcagcagtttttttcctgctttgtatgcaaagacagagcctctcatgagaacttggatggtggagtataaa

SEQ ID NO: 21641 - DNA, 3744 bp, Homo sapiens
  misc_feature 1..3744: note = ENST00000321871
  source 1..3744: mol_type = unassigned DNA; mol_type = unassigned DNA
gctttctcctgagccgtcggagggagccggagcgcttctcccgagttggtgatagattggtggtcatccaacatgcagaaatgaatgagcagtgaaaagcagcagagccgatgggtcatgaggatgtaagtgcgtttgaaggcttccacaccctctactccaggacagaatcatgaataaactggaggataagcaggaccagatgataccatgaagagaagtttacaggccctctattgccaactgttaagtttcctgctgatcttggcactgaccgaagcgctggcatttgccatccaggaaccatctcccagggaatctcttcaggtcctcccttcaggcactcccccgggaaccatggtgacagcaccccacagctctaccagacatacttctgtggtgatgctgacccccaatcccgatggacccccctcacaggctgcagctcccatggcaacaccgacaccccgtgcagaggggcaccctcctacgcacaccatctccaccatcgctgcgacagtaaccgccccccattctgaaagctccctgtccacagggcccgctccagcagccatggcaaccacatcctccaagccagagggccgccctcgagggcaggctgcccccaccatcctgctgacaaagccaccgggggccaccagccgccccaccacagcgcccccccgcactaccacacgcaggccccccaggcccccaggctcttcccgaaaaggggctggtaattcatcacgccctgtcccgcctgcacctggtggccactccaggagtaaagaaggacagcgaggacgaaatccaagctccacacctctggggcagaagcggcccctggggaaaatctttcagatctacaagggcaacttcacagggtctgtggaaccggagccctctaccctcacccccaggaccccactctggggctactcctcttcaccacagccccagacagtggctgcgaccacagtgcccagcaatacctcatgggcacccaccaccacctccctggggcctgcaaaggacaagccaggccttcgcagagcagcccaggggggtggttctaccttcaccagccaaggagggacaccagatgccacagcagcctcaggtgcccctgtcagtccacaagctgccccagtgccttctcagcgcccccaccacggtgacccacaggatggccccagccatagtgactcttggcttactgttacccctggcaccagcagacctctgtctaccagctctggggtcttcacggctgccacggggcccaccccagctgccttcgataccagtgtctcagccccttcccaggggattcctcagggagcatccacaaccccacaagctccaacccatccctccagggtctcagaaagcactatttctggagccaaggaggagactgtggccaccctcaccatgaccgaccgggtgcccagtcctctctccacagtggtatccacagccacaggcaatttcctcaaccgcctggtccccgccgggacctggaagcctgggacagcagggaacatctcccatgtggccgagggggacaaaccgcagcacagagccaccatctgcctgagcaagatggatatcgcctgggtgatcctggccatcagcgtgcccatctcctcctgctctgtcctgctgacggtgtgctgcatgaagaggaagaagaagaccgccaacccggagaacaacctgagctactggaacaacaccatcaccatggactacttcaacaggcatgctgtggagctgcccagggagatccagtcccttgaaacctctgaggaccagctctcagagccccgctccccagccaatggcgactatagagacactgggatggtccttgttaaccccttctgtcaagaaacactgtttgtgggaaacgatcaagtatctgagatctaactacagcaggcatcactttgccattccgtatttttcgtctctaaattataaatatacaaatacatatattataaatataacctttgtgtaaccctgacttaatgagaaacattttcagctttttttcctatgaattgtcaacatcttttttacaagtgtggtttaaaaaaaaaaaaaactttacagaatgatctgtggctttataaaataaaggtatttctaagcaaagcagttgcattgattgcttctcttaataactattcttgagcacctggggatcccaggaaccctggtcaggtgaggtaagagactgacctcctgtagaagctgaatgttacagtgcaagcgcacgattctttgagtgattcttaaagctctggttcctcttgatttggtgtgaccccatttcctcccttctcatacgcacacctgtaaagggaactggaccgcctcaggggaagacggcagactcatgcacagagaaggaaaagggaacatctcatcacctctgaggatgagtaccctggagccttatgacggcaccattggatgtcatgtttaattccatccaagttgtggatggcaggcaggagcatggagccctcaggaatccatggaggacatcaaggcatcccaaggccatattcccctaacattacttccactgctaacaacaggactgcctttccctggtgggaaaatgctccctttatgcccattcctgtatcccctccaacacccacatctgcattaaacacccgtgcctttctcttggagagggtttagatgcagatcccggccctggagctttaaaatgcttgcccttccttcttcaaggatcaaatgtttattggggttcagctttgttttctcaaaaggccatggtatcgtgcccctgaggaacatgtttatctaagaagctttgaggtagtagagcgataatttttgaaaccttcctcctgcaatctttaaaaaagaaaaaaaagattgcccaaacaaatcatttgggagaagacatcattatactcctacttggcactgcaaacctgctcgcagcaccagccggtggacttgccatccagctctcagcttccactgctccccttgttcccggccggctggctgcctccccgtgctgtgtccagcacggccaacaacgtcagaccctcagagacgcccaaggggcttccagaggtggccgcttctctattttttcctgattgtggctgagagagatgattactgctttgacacttcctttctctaaaagaaaaatagtttgatagtatattttgaatatagatgctcttatagtcagattgggaattgaacttgaatattgggtcatatgtttgtgttgttgctgtagtctatcatgacttttttctttctgcattttccttaaaaaaaaaaaaaagatggccttcaaaagtgtgttctcaatgttgtatgaacctccttcacatgagttcggttgttgtctctcttcaaagactcttcaacccacaaagaagcaactaaatgtttctctaagtttaattttctagcgtgttgttgtcttacctttttaaccttaccataatatttctgttaactgttacatttaatataccaatgtgtgtaagtatacagagaaaaatctgtttgtaaagtaaaatttatatataatatatgtaatcaaagatacatatgttatatatacatatgtggatgtatgacttatttttccttatccacagatttcagctaccatgtatatataaataaacttattttattagccagaggattctgttgctaatacat

SEQ ID NO: 21642 - DNA, 2165 bp, Homo sapiens
  misc_feature 1..2165: note = ENST00000393130
  source 1..2165: mol_type = unassigned DNA; mol_type = unassigned DNA
agccgtcggagggagccggagcgcttctcccgagttggtgatagattggtggtcatccaacatgcagaaatgaatgagcagtgaaaagcagcagagccgatgggtcatgaggatgtaagtgcgtttgaaggcttccacaccctctactccaggaatcatgaataaactggaggataagcaggaccagatgataccatgaagagaagtttacaggccctctattgccaactgttaagtttcctgctgatcttggcactgaccgaagcgctggcatttgccatccaggaaccatctcccagggaatctcttcaggtcctcccttcaggcactcccccgggaaccatggtgacagcaccccacagctctaccagacatacttctgtggtgatgctgacccccaatcccgatggacccccctcacaggctgcagctcccatggcaacaccgacaccccgtgcagaggggcaccctcctacgcacaccatctccaccatcgctgcgacagtaaccgccccccattctgaaagctccctgtccacagggcccgctccagcagccatggcaaccacatcctccaagccagagggccgccctcgagggcaggctgcccccaccatcctgctgacaaagccaccgggggccaccagccgccccaccacagcgcccccccgcactaccacacgcaggccccccaggcccccaggctcttcccgaaaaggggctggtaattcatcacgccctgtcccgcctgcacctggtggccactccaggagtaaagaaggacagcgaggacgaaatccaagctccacacctctggggcagaagcggcccctggggaaaatctttcagatctacaagggcaacttcacagggtctgtggaaccggagccctctaccctcacccccaggaccccactctggggctactcctcttcaccacagccccagacagtggctgcgaccacagtgcccagcaatacctcatgggcacccaccaccacctccctggggcctgcaaaggacaagccaggccttcgcagagcagcccaggggggtggttctaccttcaccagccaaggagggacaccagatgccacagcagcctcaggtgcccctgtcagtccacaagctgccccagtgccttctcagcgcccccaccacggtgacccacaggatggccccagccatagtgactcttggcttactgttacccctggcaccagcagacctctgtctaccagctctggggtcttcacggctgccacggggcccaccccagctgccttcgataccagtgtctcagccccttcccaggggattcctcagggagcatccacaaccccacaagctccaacccatccctccagggtctcagaaagcactatttctggagccaaggaggagactgtggccaccctcaccatgaccgaccgggtgcccagtcctctctccacagtggtatccacagccacaggcaatttcctcaaccgcctggtccccgccgggacctggaagcctgggacagcagggaacatctcccatgtggccgagggggacaaaccgcagcacagagccaccatctgcctgagcaagatggatatcgcctgggtgatcctggccatcagcgtgcccatctcctcctgctctgtcctgctgacggtgtgctgcatgaagaggaagaagaagaccgccaacccggagaacaacctgagctactggaacaacaccatcaccatggactacttcaacaggcatgctgtggagctgcccagggagatccagtcccttgaaacctctgaggaccagctctcagagccccgctccccagccaatggcgactatagagacactgggatggtccttgttaaccccttctgtcaagaaacactgtttgtgggaaacgatcaagtatctgagatctaactacagcaggcatcactttgccattccgtatttttcgtctctaaattataaatatacaaatacatatattataaatataacctttgtgtaaccctgacttaatgagaaacattttcagctttttttcctatgaattgtcaacatcttttttacaagtgtggtttaaaaaaaaaaaaaactttacagaatgatctgtggctttataaaataaaggtatttctaagcaaagcagttgcattgat

SEQ ID NO: 21643 - DNA, 823 bp, Homo sapiens
  misc_feature 1..823: note = ENST00000514894
  source 1..823: mol_type = unassigned DNA; mol_type = unassigned DNA
cggagggagccggagcgcttctcccgagttggtgatagattggtggtcatccaacatgcagaaatgaatgagcagtgaaaagcagcagagccgatgggtcatgaggatgtaagtgcgtttgaaggcttccacaccctctactccaggacagaatcatgaataaactggaggataagcaggaccagatgataccatgaagagaagtttacaggccctctattgccaactgttaaggccctgccttctccatcagacacctgggaatcacagctggggcccctgctttggccgtttgtcctgctggaatctgatggaggaaagacgctctgagagagtaattagacgcagacagagatctctctccatagtcagaggagcctagcaggggctgaaggaactgcctgaggatgacaaagaaggggatccatgaacaaggaggtgctaacaggtttcctgctgatcttggcactgaccgaagcgctggcatttgccatccaggaaccatctcccagggaatctcttcaggtcctcccttcaggcactcccccgggaaccatggtgacagcaccccacagctctaccagacatacttctgtggtgatgctgacccccaatcccgatggacccccctcacaggctgcagctcccatggcaacaccgacaccccgtgcagaggggcaccctcctacgcacaccatctccaccatcgctgcgacagtaaccgccccccattctgaaagctccctgtccacagggcccgctccagcagccatggcaaccacatcctccaagccagagggccgccctcgagggcaggctgccc

SEQ ID NO: 21644 - DNA, 874 bp, Homo sapiens
  misc_feature 1..874: note = ENST00000512662
  source 1..874: mol_type = unassigned DNA; mol_type = unassigned DNA
ccggagcgcttctcccgagttggtgatagattggtggtcatccaacatgcagaaatgaatgagcagtgaaaagcagcagagccgatgggtcatgaggatgtaagtgcgtttgaaggcttccacaccctctactccaggatgcttttcaacttatggtggtgtgacatcctgataaacacaatacagaatcatgaataaactggaggataagcaggaccagatgataccatgaagagaagtttacaggccctctattgccaactgttaaggttatctatgaagcacttgtgatgtttttgagcagtaaccaccattttttgagtatgtacatgttacacagcctgtcatataccaatcatgtcagtcaggatccccacagggagcagatggcactcaactggggtttcctgctgatcttggcactgaccgaagcgctggcatttgccatccaggaaccatctcccagggaatctcttcaggtcctcccttcaggcactcccccgggaaccatggtgacagcaccccacagctctaccagacatacttctgtggtgatgctgacccccaatcccgatggacccccctcacaggctgcagctcccatggcaacaccgacaccccgtgcagaggggcaccctcctacgcacaccatctccaccatcgctgcgacagtaaccgccccccattctgaaagctccctgtccacagggcccgctccagcagccatggcaaccacatcctccaagccagagggccgccctcgagggcaggctgcccccaccatcctgctgacaaagccaccgggggccaccagccgccccaccacagcgcccccccgcactaccacacgcaggccccccaggcccccaggctc

SEQ ID NO: 21645 - DNA, 681 bp, Homo sapiens
  misc_feature 1..681: note = ENST00000512137
  source 1..681: mol_type = unassigned DNA; mol_type = unassigned DNA
gaagctagtctacacacatggatgggactatggaaatatacatgtgacttttaaacctgaacagtagctgttggtgatagattggtggtcatccaacatgcagaaatgaatgagcagtgaaaagcagcagagccgatgggtcatgaggatgtaagtgcgtttgaaggcttccacaccctctactccaggacagaatcatgaataaactggaggataagcaggaccagatgataccatgaagagaagtttacaggccctctattgccaactgttaagtttcctgctgatcttggcactgaccgaagcgctggcatttgccatccaggaaccatctcccagggaatctcttcaggtcctcccttcaggcactcccccgggaaccatggtgacagcaccccacagctctaccagacatacttctgtggtgatgctgacccccaatcccgatggacccccctcacaggctgcagctcccatggcaacaccgacaccccgtgcagaggggcaccctcctacgcacaccatctccaccatcgctgcgacagtaaccgccccccattctgaaagctccctgtccacagggcccgctccagcagccatggcaaccacatcctccaagccagagggccgccctcgagggcaggctgcccccaccatcctgctgacaaagccaccgggggc

SEQ ID NO: 21646 - DNA, 510 bp, Homo sapiens
  misc_feature 1..510: note = ENST00000511555
  source 1..510: mol_type = unassigned DNA; mol_type = unassigned DNA
gtatgcaaagacagagcctctcatgagaacttggatggtggagtataaacactcatttaaaaataaatccagatgtagttggctgcagtcatctgacagaaccctgattctctcttcaataatgacgttcatttgtacctcattaattgagagtttttaataatttctccagggtaagaaaactgagtcacacaaggatatatttgtgtaacacaatttcaaaaaggcaaactcttgctcttgttaacgacagaatcatgaataaactggaggataagcaggaccagatgataccatgaagagaagtttacaggccctctattgccaactgttaagtttcctgctgatcttggcactgaccgaagcgctggcatttgccatccaggaaccatctcccagggaatctcttcaggtcctcccttcaggcactcccccgggaaccatggtgacagcaccccacagctctaccagacatacttctgtggtgatgctgacccccaatcccgatgg

SEQ ID NO: 21647 - DNA, 2470 bp, Homo sapiens
  misc_feature 1..2470: note = ENST00000508711
  source 1..2470: mol_type = unassigned DNA; mol_type = unassigned DNA
gagagcaagacggcagcatctacggttctttctgctcaggaatgggaacccagagtgggcagtagagcggaggcaagccatgcagaggcaggagcagatgagaccctagatgccacgagaagctaaacatgtggggaaaataaagagcagattaactcaggaaaattatatggggagctcttatgctactctgaagatctgagactcgttggagaatttacaatcccaaattaactcagggagaattccaactagactctgaaatgaattagatggagatttaaaatagggcaatttagtgggaagagatacttaatttgaagacagaatcatgaataaactggaggataagcaggaccagatgataccatgaagagaagtttacaggccctctattgccaactgttaactgtcctgctgacggtgtgctgcatgaagaggaagaagaagaccgccaacccggagaacaacctgagctactggaacaacaccatcaccatggactacttcaacaggcatgctgtggagctgcccagggagatccagtcccttgaaacctctgaggaccagctctcagagccccgctccccagccaatggcgactatagagacactgggatggtccttgttaaccccttctgtcaagaaacactgtttgtgggaaacgatcaagtatctgagatctaactacagcaggcatcactttgccattccgtatttttcgtctctaaattataaatatacaaatacatatattataaatataacctttgtgtaaccctgacttaatgagaaacattttcagctttttttcctatgaattgtcaacatcttttttacaagtgtggtttaaaaaaaaaaaaaactttacagaatgatctgtggctttataaaataaaggtatttctaagcaaagcagttgcattgattgcttctcttaataactattcttgagcacctggggatcccaggaaccctggtcaggtgaggtaagagactgacctcctgtagaagctgaatgttacagtgcaagcgcacgattctttgagtgattcttaaagctctggttcctcttgatttggtgtgaccccatttcctcccttctcatacgcacacctgtaaagggaactggaccgcctcaggggaagacggcagactcatgcacagagaaggaaaagggaacatctcatcacctctgaggatgagtaccctggagccttatgacggcaccattggatgtcatgtttaattccatccaagttgtggatggcaggcaggagcatggagccctcaggaatccatggaggacatcaaggcatcccaaggccatattcccctaacattacttccactgctaacaacaggactgcctttccctggtgggaaaatgctccctttatgcccattcctgtatcccctccaacacccacatctgcattaaacacccgtgcctttctcttggagagggtttagatgcagatcccggccctggagctttaaaatgcttgcccttccttcttcaaggatcaaatgtttattggggttcagctttgttttctcaaaaggccatggtatcgtgcccctgaggaacatgtttatctaagaagctttgaggtagtagagcgataatttttgaaaccttcctcctgcaatctttaaaaaagaaaaaaaagattgcccaaacaaatcatttgggagaagacatcattatactcctacttggcactgcaaacctgctcgcagcaccagccggtggacttgccatccagctctcagcttccactgctccccttgttcccggccggctggctgcctccccgtgctgtgtccagcacggccaacaacgtcagaccctcagagacgcccaaggggcttccagaggtggccgcttctctattttttcctgattgtggctgagagagatgattactgctttgacacttcctttctctaaaagaaaaatagtttgatagtatattttgaatatagatgctcttatagtcagattgggaattgaacttgaatattgggtcatatgtttgtgttgttgctgtagtctatcatgacttttttctttctgcattttccttaaaaaaaaaaaaaagatggccttcaaaagtgtgttctcaatgttgtatgaacctccttcacatgagttcggttgttgtctctcttcaaagactcttcaacccacaaagaagcaactaaatgtttctctaagtttaattttctagcgtgttgttgtcttacctttttaaccttaccataatatttctgttaactgttacatttaatataccaatgtgtgtaagtatacagagaaaaatctgtttgtaaagtaaaatttatatataatatatgtaatcaaagatacatatgttatatatacatatgtggatgtatgacttatttttccttatccacagatttcagctaccatgtatatataaataaacttattttattagcc

SEQ ID NO: 21648 - DNA, 4833 bp, Homo sapiens
  misc_feature 1..4833: note = ENST00000515826
  source 1..4833: mol_type = unassigned DNA; mol_type = unassigned DNA
tccaactagactctgaaatgaattagatggagatttaaaatagggcaatttagtgggaagagatacttaatttgaagacagaatcatgaataaactggaggataagcaggaccagatgataccatgaagagaagtttacaggccctctattgccaactgttaagtttcctgctgatcttggcactgaccgaagcgctggcatttgccatccaggaaccatctcccagggaatctcttcaggtcctcccttcaggcactcccccgggaaccatggtgacagcaccccacagctctaccagacatacttctgtggtgatgctgacccccaatcccgatggacccccctcacaggctgcagctcccatggcaacaccgacaccccgtgcagaggggcaccctcctacgcacaccatctccaccatcgctgcgacagtaaccgccccccattctgaaagctccctgtccacagggcccgctccagcagccatggcaaccacatcctccaagccagagggccgccctcgagggcaggctgcccccaccatcctgctgacaaagccaccgggggccaccagccgccccaccacagcgcccccccgcactaccacacgcaggccccccaggcccccaggctcttcccgaaaaggggctggtaattcatcacgccctgtcccgcctgcacctggtggccactccaggagtaaagaaggacagcgaggacgaaatccaagctccacacctctggggcagaagcggcccctggggaaaatctttcagatctacaagggcaacttcacagggtctgtggaaccggagccctctaccctcacccccaggaccccactctggggctactcctcttcaccacagccccagacagtggctgcgaccacagtgcccagcaatacctcatgggcacccaccaccacctccctggggcctgcaaaggacaagccaggccttcgcagagcagcccaggggggtggttctaccttcaccagccaaggagggacaccagatgccacagcagcctcaggtgcccctgtcagtccacaagctgccccagtgccttctcagcgcccccaccacggtgacccacaggatggccccagccatagtgactcttggcttactgttacccctggcaccagcagacctctgtctaccagctctggggtcttcacggctgccacggggcccaccccagctgccttcgataccagtgtctcagccccttcccaggggattcctcagggagcatccacaaccccacaagctccaacccatccctccagggtctcagaaagcactatttctggagccaaggaggagactgtggccaccctcaccatgaccgaccgggtgcccagtcctctctccacagtggtatccacagccacaggcaatttcctcaaccgcctggtccccgccgggacctggaagcctgggacagcagggaacatctcccatgtggccgagggggacaaaccgcagcacagagccaccatctgcctgagcaagatggatatcgcctgggtgatcctggccatcagcgtgcccatctcctcctgctcagatcctatcacctgaaagcatgcccttccacaaatgtgaatacagtactcagggctccatctgaaaatggagtgacccctcttcttcctgtcacacatctgacaagccatggatgactccccagtgacattcctgggaacccaagagagcttaattcccaactctgttttaaaactcaaggaaattgggactccatgacctcctccagagtcttgatggctactgcctcaggagaaacagagcagttgaagcttttcaactaaatgggaaagggaacagttaacatcttgtgtttgcatagagctgcgcagtttacaaaacgcttctgcatatgtcatctctataccctccggtgttcaggacaatacaggatagtggatatcaacttgaagatcatcaagacctggactcaagttgcagtaattagttgggtgatcaagatcaatactattagcttctatgaccttcagttacctgttctgaaaatgggaagagcaatagtgccttcctcaggcagttatcatgtgggctaaataagcttcaaagtgcctgggtcagtgctgggaatatagtagagaccctgtaagtctgacttgtacttttctttcttggatgaaaggtgagaccactgaaatagtgaatgttctaacccctaggtggagctttgtccttgagccacccaatagtcatataacacagtttttctttctagatctctcttgtagaggatgttgggagaacaagaagagaactgtcattaattaagcatccattgtgtgtcaggcattgtgtttggcattttgcatccatgatctctttaattctcattacaagcctatgaagttcatcttaagtgactttccaggtggaatacatggcagagtcacaatttgaacctaggtctttctgtagccaggctggctttcagtaagtaaatgaaatggtgtttgagaagcactggaaactccctgagagaaatataatcaggccaggagcatgaacatgtgaggggaagacagcgtggagcagaactttctgttctgactcccaggccttcccgcagggcaggatctctgcatctggcattctaacaacatgggctgttagagcactggactcgggggcggaggacttggattctgcaacctctaccagcccaggttagcagcatggccttgagcaagttcacctctctaggtttccatgccccaccttctagaataagaatgtaggctgggggaaggggctgatttgtttcagcacctactgtgcaccagggacaatttgaagtgctggcagatgtatgactgcatttaatcttcccaaggaagctgacgctgagagaggttaagtaacttactcaagtcatgcaagtaatagattgtcacctagattctaattctaaattcgatgtcccttttgccctattgactaggcctaagatggcatctgtcactttgattctgtttgcttataactgctcagtagatcagaggcacaaatatctttctaccttagagaggcgtgcaaactatacaaatctgactcacagatacacttttcccctgccagcctgtgttctgtgtctatggcagtgttttgtggggcatgatgggatgtgcccctacaggctgataactgaagagctgttctgtttgtcctgattgctcccctccctctagctctaactctaccaaaactgagctggagctgaggaaacagcacttttcccacttcccagatggttccctctttatggcttctgtcacaccagctagaactcctccaggtgtttcaccatgccagctgcaggagcagagtgaaaggtagtgacaatgaagaacagagacaccagagaaggggacaggggacccgggatcttgtcccagctctgccactcacatacctgtgacctgtggcaaggcggccagcactttaggccacagtttttcctctagaataaggaggcggcctgaattagcaagtttcaggctgagcaccacagccccctccttgcccctttcctcttcaaccatctgaagaaagggttttttggaaggaagggagggaaagaggaaagagatccacaatatttgaaaagttctgtaccagctaatctctcaaatccccgttagccctaacactcagaaattccttctatgttttaaagattttttaaaaaggatctagaagactgaaaagcaaattagaagtctttttgatcaaagcagataagataaagtagaaacttaccctatctcctaaccttgtacagagacctttccaggttgagaggccagcaaggctggcagctggaaagaaagctacagaattccccaggcagcctacagggccctgggctctgggctgtgaggtctcagcctatacaggtgccagcttgtgcaactgccccacaccctggcatgaacccacccctgatgctggccagaccctcaggctgctgcgaacagagctggccctctgccaacccccggtgctggcctctctggacagcccagcctgggaccccgactccccagcacagagatggttggcaccaccaggatgtcagatgtggctcttggcttcagctctcctcatccccagaggctctggtgatgatgaacctggggcaggatatactcagtcctcacttcatggcttctccccaagaggcctctgtcacccttgtccttgtgttacccttctgcagtgtgaatctggacaggccaccccacctctctgacctcagaagccttccctgctcacaagccactcaattcacacatggttaatcaacaatatcgagacataattcttcctcctgggccctgggagtctcagggatgaacagacagggtcacatgtcacactgtgctcagtcaagctgtgtggagcccacctcaggccatctgtgcaggtgggcttttgcatcaatctaaggcaggaatcagctggtaagagcatagactggccaggtgcagtggctcacacctgtaatcaatcccagcactttaggaggctgaggcaggcggattacctgaggtcaggagttcgagaccagcctaaccaacatggcaaaaccctgtctctactaaaaatacaaaaattagccagacatggtggcaggcacctgtaatatcccagcttcttgggaggctgaggcaggagaatcgcttgatcccaggaggcagaggttgcagtgagccaagattgcgccactgcactccagcctgggcaacggagctagactccatc

SEQ ID NO: 21649 - DNA, 555 bp, Homo sapiens
  misc_feature 1..555: note = ENST00000510183
  source 1..555: mol_type = unassigned DNA; mol_type = unassigned DNA
ggtgaggcggccagcttcatgaggaaggagaatgcattgggaagcaagaaaagaatcatgaataaactggaggataagcaggaccagatgataccatgaagagaagtttacaggccctctattgccaactgttaagtttcctgctgatcttggcactgaccgaagcgctggcatttgccatccaggaaccatctcccagggaatctcttcaggtcctcccttcaggcactcccccgggaaccatggtgacagcaccccacagctctaccagacatacttctgtggtgatgctgacccccaatcccgatggacccccctcacaggctgcagctcccatggcaacaccgacaccccgtgcagaggggcaccctcctacgcacaccatctccaccatcgctgcgacagtaaccgccccccattctgaaagctccctgtccacagggcccgctccagcagccatggcaaccacatcctccaagccagagggccgccctcgagggcaggctgcccccaccatcctgctgacaaagccaccgggggccaccagccgcccca

SEQ ID NO: 21650 - DNA, 1929 bp, Homo sapiens
  misc_feature 1..1929: note = ENST00000511388
  source 1..1929: mol_type = unassigned DNA; mol_type = unassigned DNA
agtattttacctcttctctctgtctccttttcaaggtttcctgctgatcttggcactgaccgaagcgctggcatttgccatccaggaaccatctcccagggaatctcttcaggtcctcccttcaggcactcccccgggaaccatggtgacagcaccccacagctctaccagacatacttctgtggtgatgctgacccccaatcccgatggacccccctcacaggctgcagctcccatggcaacaccgacaccccgtgcagaggggcaccctcctacgcacaccatctccaccatcgctgcgacagtaaccgccccccattctgaaagctccctgtccacagggcccgctccagcagccatggcaaccacatcctccaagccagagggccgccctcgagggcaggctgcccccaccatcctgctgacaaagccaccgggggccaccagccgccccaccacagcgcccccccgcactaccacacgcaggccccccaggcccccaggctcttcccgaaaaggggctggtaattcatcacgccctgtcccgcctgcacctggtggccactccaggagtaaagaaggacagcgaggacgaaatccaagctccacacctctggggcagaagcggcccctggggaaaatctttcagatctacaagggcaacttcacagggtctgtggaaccggagccctctaccctcacccccaggaccccactctggggctactcctcttcaccacagccccagacagtggctgcgaccacagtgcccagcaatacctcatgggcacccaccaccacctccctggggcctgcaaaggacaagccaggccttcgcagagcagcccaggggggtggttctaccttcaccagccaaggagggacaccagatgccacagcagcctcaggtgcccctgtcagtccacaagctgccccagtgccttctcagcgcccccaccacggtgacccacaggatggccccagccatagtgactcttggcttactgttacccctggcaccagcagacctctgtctaccagctctggggtcttcacggctgccacggggcccaccccagctgccttcgataccagtgtctcagccccttcccaggggattcctcagggagcatccacaaccccacaagctccaacccatccctccagggtctcagaaagcactatttctggagccaaggaggagactgtggccaccctcaccatgaccgaccgggtgcccagtcctctctccacagtggtatccacagccacaggcaatttcctcaaccgcctggtccccgccgggacctggaagcctgggacagcagggaacatctcccatgtggccgagggggacaaaccgcagcacagagccaccatctgcctgagcaagatggatatcgcctgggtgatcctggccatcagcgtgcccatctcctcctgctctgtcctgctgacggtgtgctgcatgaagaggaagaagaagaccgccaacccggagaacaacctgagctactggaacaacaccatcaccatggactacttcaacaggcatgctgtggagctgcccagggagatccagtcccttgaaacctctgaggaccagctctcagagccccgctccccagccaatggcgactatagagacactgggatggtccttgttaaccccttctgtcaagaaacactgtttgtgggaaacgatcaagtatctgagatctaactacagcaggcatcactttgccattccgtatttttcgtctctaaattataaatatacaaatacatatattataaatataacctttgtgtaaccctgacttaatgagaaacattttcagctttttttcctatgaattgtcaacatcttttttacaagtgtggtttaaaaaaaaaaaaaactttacagaatgatctgtggctttataa

SEQ ID NO: 21651 - DNA, 3321 bp, Homo sapiens
  misc_feature 1..3321: note = ENST00000361236
  source 1..3321: mol_type = unassigned DNA; mol_type = unassigned DNA
cccagcccggccccgccgccccggctgcgcacgcgacgccccctccaggccccgctcctgcgccctatttggtcattcggggggcaagcggcgggaggggaaacgtgcgcggccgaaggggaagcggagccggcgccggctgcgcagaggagccgctctcgccgccgccacctcggctgggagcccacgaggctgccgcatcctgccctcggaacaatgggactcggcgcgcgaggtgcttgggccgcgctgctcctggggacgctgcaggtgctagcgctgctgggggccgcccatgaaagcgcagccatggcggagactctccaacatgtgccttctgaccatacaaatgaaacttccaacagtactgtgaaaccaccaacttcagttgcctcagactccagtaatacaacggtcaccaccatgaaacctacagcggcatctaatacaacaacaccagggatggtctcaacaaatatgacttctaccaccttaaagtctacacccaaaacaacaagtgtttcacagaacacatctcagatatcaacatccacaatgaccgtaacccacaatagttcagtgacatctgctgcttcatcagtaacaatcacaacaactatgcattctgaagcaaagaaaggatcaaaatttgatactgggagctttgttggtggtattgtattaacgctgggagttttatctattctttacattggatgcaaaatgtattactcaagaagaggcattcggtatcgaaccatagatgaacatgatgccatcatttaaggaaatccatggaccaaggatggaatacagattgatgctgccctatcaattaattttggtttattaatagtttaaaacaatattctctttttgaaaatagtataaacaggccatgcatataatgtacagtgtattacgtaaatatgtaaagattcttcaaggtaacaagggtttgggttttgaaataaacatctggatccttatagaccgttcatacaatggttttagcaagttcatagtaagacaaacaagtcctatctttttttttttggctggggtgggggcattggtcacatatgaccagtaattgaaagacgtcatcactgaaagacagaatgccatctgggcatacaaataagaagtttgtcacagcactcaggattttgggtatcttttgtagctcacataaagaacttcagtgcttttcagagctggatatatcttaattactaatgccacacagaaattatacaatcaaactagatctgaagcataatttaagaaaaacatcaacattttttgtgctttaaactgtagtagttggtctagaaacaaaatactccaagaaaaagaaaattttcaaataaaacccaaaataatagctttgcttagccctgttagggatccattggagcattaaggagcacatatttttattaacttcttttgagctttcaatgttgatgtaatttttgttctctgtgtaatttaggtaaactgcagtgtttaacataataatgttttaaagacttagttgtcagtattaaataatcctggcattatagggaaaaaacctcctagaagttagattatttgctactgtgagaatattgtcaccactggaagttactttagttcatttaattttaattttatattttgtgaatattttaagaactgtagagctgctttcaatatctagaaatttttaattgagtgtaaacacacctaactttaagaaaaagaaccgcttgtatgattttcaaaagaacatttagaattctatagagtcaaaactatagcgtaatgctgtgtttattaagccagggattgtgggacttcccccaggcaactaaacctgcaggatgaaaatgctatattttctttcatgcactgtcgatattactcagatttggggaaatgacatttttatactaaaacaaacaccaaaatattttagaataaattcttagaaagttttgagaggaatttttagagaggacatttcctccttcctgatttggatattccctcaaatccctcctcttactccatgctgaaggagaagtactctcagatgcattatgttaatggagagaaaaagcacagtattgtagagacaccaatattagctaatgtattttggagtgttttccattttacagtttatattccagcactcaaaactcagggtcaagttttaacaaaagaggtatgtagtcacagtaaatactaagatggcatttctatctcagagggccaaagtgaatcacaccagtttctgaaggtcctaaaaatagctcagatgtcctaatgaacatgcacctacatttaataggagtacaataaaactgttgtcagcttttgttttacagagaacgctagatattaagaattttgaaatggatcatttctacttgctgtgcattttaaccaataatctgatgaatatagaaaaaaatgatccaaaatatggatatgattggatgtatgtaacacatacatggagtatggaggaaattttctgaaaaatacatttagattagtttagtttgaaggagaggtgggctgatggctgagttgtatgttactaacttggccctgactggttgtgcaaccattgcttcatttctttgcaaaatgtagttaagatatactttattctaatgaaggccttttaaatttgtccactgcattcttggtatttcactacttcaagtcagtcagaacttcgtagaccgacctgaagtttctttttgaatacttgtttctttagcactttgaagatagaaaaaccactttttaagtactaagtcatcatttgccttgaaagtttcctctgcattgggtttgaagtagtttagttatgtctttttctctgtatgtaagtagtataatttgttactttcaaatacccgtactttgaatgtaggtttttttgttgttgttatctataaaaattgagggaaatggttatgcaaaaaaatattttgctttggaccatatttcttaagcataaaaaaaatgctcagttttgcttgcattccttgagaatgtatttatctgaagatcaaaacaaacaatccagatgtataagtactaggcagaagccaattttaaaatttccttgaataatccatgaaaggaataattcaaatacagataaacagagttggcagtatattatagtgataattttgtattttcacaaaaaaaaagttaaactcttcttttctttttattataatgaccagcttttggtatttcattgttaccaagttctatttttagaataaaattgttctccttctaaaa

SEQ ID NO: 21652 - DNA, 3579 bp, Homo sapiens
  misc_feature 1..3579: note = ENST00000398136
  source 1..3579: mol_type = unassigned DNA; mol_type = unassigned DNA
aaaggcttccttccgggcaccgcgaagccagcgtgctcagcattcagggaggcagcggcgctcgccttcatccaggacaacaaaactgccatttccgaagagaaaggaaacggctcgcggtttctggggttcccaagcgcgcgcctgcgagggaggccgcgagccgagtcgccacgcccagaaccccgagcccgcccccgcgccacccagcccggccccgccgccccggctgcgcacgcgacgccccctccaggccccgctcctgcgccctatttggtcattcggggggcaagcggcgggaggggaaacgtgcgcggccgaaggggaagcggagccggcgccggctgcgcagaggagccgctctcgccgccgccacctcggctgggagcccacgaggctgccgcatcctgccctcggaacaatgggactcggcgcgcgaggtgcttgggccgcgctgctcctggggacgctgcaggtgctagcgctgctgggggccgcccatgaaagcgcagccatggcggcatctgcaaacatagagaattctgggcttccacacaactccagtgctaactcaacagagactctccaacatgtgccttctgaccatacaaatgaaacttccaacagtactgtgaaaccaccaacttcagttgcctcagactccagtaatacaacggtcaccaccatgaaacctacagcggcatctaatacaacaacaccagggatggtctcaacaaatatgacttctaccaccttaaagtctacacccaaaacaacaagtgtttcacagaacacatctcagatatcaacatccacaatgaccgtaacccacaatagttcagtgacatctgctgcttcatcagtaacaatcacaacaactatgcattctgaagcaaagaaaggatcaaaatttgatactgggagctttgttggtggtattgtattaacgctgggagttttatctattctttacattggatgcaaaatgtattactcaagaagaggcattcggtatcgaaccatagatgaacatgatgccatcatttaaggaaatccatggaccaaggatggaatacagattgatgctgccctatcaattaattttggtttattaatagtttaaaacaatattctctttttgaaaatagtataaacaggccatgcatataatgtacagtgtattacgtaaatatgtaaagattcttcaaggtaacaagggtttgggttttgaaataaacatctggatccttatagaccgttcatacaatggttttagcaagttcatagtaagacaaacaagtcctatctttttttttttggctggggtgggggcattggtcacatatgaccagtaattgaaagacgtcatcactgaaagacagaatgccatctgggcatacaaataagaagtttgtcacagcactcaggattttgggtatcttttgtagctcacataaagaacttcagtgcttttcagagctggatatatcttaattactaatgccacacagaaattatacaatcaaactagatctgaagcataatttaagaaaaacatcaacattttttgtgctttaaactgtagtagttggtctagaaacaaaatactccaagaaaaagaaaattttcaaataaaacccaaaataatagctttgcttagccctgttagggatccattggagcattaaggagcacatatttttattaacttcttttgagctttcaatgttgatgtaatttttgttctctgtgtaatttaggtaaactgcagtgtttaacataataatgttttaaagacttagttgtcagtattaaataatcctggcattatagggaaaaaacctcctagaagttagattatttgctactgtgagaatattgtcaccactggaagttactttagttcatttaattttaattttatattttgtgaatattttaagaactgtagagctgctttcaatatctagaaatttttaattgagtgtaaacacacctaactttaagaaaaagaaccgcttgtatgattttcaaaagaacatttagaattctatagagtcaaaactatagcgtaatgctgtgtttattaagccagggattgtgggacttcccccaggcaactaaacctgcaggatgaaaatgctatattttctttcatgcactgtcgatattactcagatttggggaaatgacatttttatactaaaacaaacaccaaaatattttagaataaattcttagaaagttttgagaggaatttttagagaggacatttcctccttcctgatttggatattccctcaaatccctcctcttactccatgctgaaggagaagtactctcagatgcattatgttaatggagagaaaaagcacagtattgtagagacaccaatattagctaatgtattttggagtgttttccattttacagtttatattccagcactcaaaactcagggtcaagttttaacaaaagaggtatgtagtcacagtaaatactaagatggcatttctatctcagagggccaaagtgaatcacaccagtttctgaaggtcctaaaaatagctcagatgtcctaatgaacatgcacctacatttaataggagtacaataaaactgttgtcagcttttgttttacagagaacgctagatattaagaattttgaaatggatcatttctacttgctgtgcattttaaccaataatctgatgaatatagaaaaaaatgatccaaaatatggatatgattggatgtatgtaacacatacatggagtatggaggaaattttctgaaaaatacatttagattagtttagtttgaaggagaggtgggctgatggctgagttgtatgttactaacttggccctgactggttgtgcaaccattgcttcatttctttgcaaaatgtagttaagatatactttattctaatgaaggccttttaaatttgtccactgcattcttggtatttcactacttcaagtcagtcagaacttcgtagaccgacctgaagtttctttttgaatacttgtttctttagcactttgaagatagaaaaaccactttttaagtactaagtcatcatttgccttgaaagtttcctctgcattgggtttgaagtagtttagttatgtctttttctctgtatgtaagtagtataatttgttactttcaaatacccgtactttgaatgtaggtttttttgttgttgttatctataaaaattgagggaaatggttatgcaaaaaaatattttgctttggaccatatttcttaagcataaaaaaaatgctcagttttgcttgcattccttgagaatgtatttatctgaagatcaaaacaaacaatccagatgtataagtactaggcagaagccaattttaaaatttccttgaataatccatgaaaggaataattcaaatacagataaacagagttggcagtatattatagtgataattttgtattttcacaaaaaaaaagttaaactcttcttttctttttattataatgaccagcttttggtatttcattgttaccaagttctatttttagaataaaattgttctccttct

SEQ ID NO: 21653 - DNA, 743 bp, Homo sapiens
  misc_feature 1..743: note = ENST00000532161
  source 1..743: mol_type = unassigned DNA; mol_type = unassigned DNA
aggtttggaccagtcacccgctggccccggggccgcctgctgaggaaattgcctggtgcttcccctctcgctttttggatgcggcggtcgcaggccgggacgggtgcgcataacctgttgagttaccgcaagttggtttttacagcctttccctgaagttaatgtttgccgagcatctgcaaacatagagaattctgggcttccacacaactccagtgctaactcaacagagactctccaacatgtgccttctgaccatacaaatgaaacttccaacagtactgtgaaaccaccaacttcagttgcctcagactccagtaatacaacggtcaccaccatgaaacctacagcggcatctaatacaacaacaccagggatggtctcaacaaatatgacttctaccaccttaaagtctacacccaaaacaacaagtgtttcacagaacacatctcagatatcaacatccacaatgaccgtaacccacaatagttcagtgacatctgctgcttcatcagtaacaatcacaacaactatgcattctgaagcaaagaaaggatcaaaatttgatactgggagctttgttggtggtattgtattaacgctgggagttttatctattctttacattggatgcaaaatgtattactcaagaagaggcattcggtatcgaaccatagatgaacatgatgccatcatttaaggaaatccatggaccaaggatggaatacagattgatgctgccc

SEQ ID NO: 21654 - DNA, 568 bp, Homo sapiens
  misc_feature 1..568: note = ENST00000528969
  source 1..568: mol_type = unassigned DNA; mol_type = unassigned DNA
tgtttcaatgaattaccgattagagaaactcatctgcaaacatagagaattctgggcttccacacaactccagtgctaactcaacagagactctccaacatgtgccttctgaccatacaaatgaaacttccaacagtactgtgaaaccaccaacttcagttgcctcagactccagtaatacaacggtcaccaccatgaaacctacagcggcatctaatacaacaacaccagggatggtctcaacaaatatgacttctaccaccttaaagtctacacccaaaacaacaagtgtttcacagaacacatctcagatatcaacatccacaatgaccgtaacccacaatagttcagtgacatctgctgcttcatcagtaacaatcacaacaactatgcattctgaagcaaagaaaggatcaaaatttgatactgggagctttgttggtggtattgtattaacgctgggagttttatctattctttacattggatgcaaaatgtattactcaagaagaggcattcggtatcgaaccatagatgaacatgatgccatcatttaaggaaatccatg

SEQ ID NO: 21655 - DNA, 549 bp, Homo sapiens
  misc_feature 1..549: note = ENST00000529492
  source 1..549: mol_type = unassigned DNA; mol_type = unassigned DNA
ggccgcccatgaaagcgcagccatggcggcatctgcaaacatagagaattctgggcttccacacaactccagtgctaactcaacagagactctccaacatgtgccttctgaccatacaaatgaaacttccaacagtactgtgaaaccaccaacttcagttgcctcagactccagtaatacaacggtcaccaccatgaaacctacagcggcatctaatacaacaacaccagggatggtctcaacaaatatgacttctaccaccttaaagtctacacccaaaacaacaagtgtttcacagaacacatctcagatatcaacatccacaatgaccgtaacccacaatagttcagtgacatctgctgcttcatcagtaacaagtatgtattaaagctgaccttttttttcctatgctgcaagtagttaaatgccacatttaagtcattattctgtctggcaaaaataatatagaaactttatatgcctagatttcccttaattcctaattaaatgttcttaacacagaaaatcagagagctttaattacaatgt

SEQ ID NO: 21656 - DNA, 550 bp, Homo sapiens
  misc_feature 1..550: note = ENST00000525577
  source 1..550: mol_type = unassigned DNA; mol_type = unassigned DNA
acatgtaagtgagattttcgctggtggagggtgtcaatgcctgaagggttgaagatcaggagcaatgactggattacagaatgaagaggacttactgaacaattcgcttccaaaagaaaagggagaagaagaaatccaagaagacatcagcactttcaccttttatgtcttctaggtttgacaggggtctgctattccaccctcaattcagcatctgcaaacatagagaattctgggcttccacacaactccagtgctaactcaacagagactctccaacatgtgccttctgaccatacaaatgaaacttccaacagtactgtgaaaccaccaacttcagttgcctcagactccagtaatacaacggtcaccaccatgaaacctacagcggcatctaatacaacaacaccagggatggtctcaacaaatatgacttctaccaccttaaagtctacacccaaaacaacaagtgtttcacagaacacatctcagatatcaacatccacaatgaccgtaacccacaatagttcagtgacatctgctgcttcat

SEQ ID NO: 21657 - DNA, 568 bp, Homo sapiens
  misc_feature 1..568: note = ENST00000531103
  source 1..568: mol_type = unassigned DNA; mol_type = unassigned DNA
aacgaataaagcactctgaaaagttgcttaattgggacatagaaatctcttacattttttccaaatctaaaggtgtactaatttaaaaattaaaaccctactgagaaggtgcagttaaataagaaaatcctattttatccctccattgtatgaaattaggggtgttggttgggtggtgcaagacctagagatgcctgtgagtagaatcggcctctcctgaaatggtccactccactcagaagagcagagtcctcagtggcagaaattggcccatctgtccccaattgtgtgggtaaatgaattttggcaaagctgttgcattcggtggctggtatatacatctgcaaacatagagaattctgggcttccacacaactccagtgctaactcaacagagactctccaacatgtgccttctgaccatacaaatgaaacttccaacagtactgtgaaaccaccaacttcagttgcctcagactccagtaatacaacggtcaccaccatgaaacctacagcggcatctaatacaacaacaccagggatggtctcaacaaatatgacttctacc

SEQ ID NO: 21658 - DNA, 467 bp, Homo sapiens
  misc_feature 1..467: note = ENST00000526676
  source 1..467: mol_type = unassigned DNA; mol_type = unassigned DNA
agtcacccgctggccccggggccgcctgctgaggaaattgcctggtgcttcccctctcgctttttggatgcggcggtcgcaggccgggacgggtgcgcataacctgttgagttaccgcaagttggtttttacagcctttccctgaagttaatgtttgccgagcatctgcaaacatagagaattctgggcttccacacaactccagtgctaactcaacaggcagactcaacccaaacacttggtgaggcccttaccctgtgattttagtttgggacaaagccttgggcctctgagttcactaacatggaaagatgcaagaaccaggctgatgtcatcaatatcagtagtaaatcatcaagagactctccaacatgtgccttctgaccatacaaatgaaacttccaacagtactgtgaaaccaccaacttcagttgcctcagactccagtaatacaacggtcaccacca

SEQ ID NO: 21659 - DNA, 1786 bp, Homo sapiens
  misc_feature 1..1786: note = ENST00000439858
  source 1..1786: mol_type = unassigned DNA; mol_type = unassigned DNA
gcttccccagtaggatccagtctgtggggctcatttgagggagaatgagcacggggcttttggaggctgcagcctagggccaagggatggaggctcacctgagtgcaggttaggcaggtgaagtgtctccccggaaaccaagctagagtgccccacctgctcggccctgccttctcggatcggatccagcacatccaggcttctcctcctcccgaggaaccagtggtgacagctgaggccatgtgagtaggatcctgaatgaggctttatctctggctgttcgtcccatcgtccaccgtggcaccagctccctcagccagccgggatgggaccagcgactgagagagccagaggcagagaggtgagggtgaccatatcctggactgtgagaggaatgggactctgggcctgtagctgccaagcaggtggcaggtgctccaggctgtgatctgaaccctctgacccctgacattgacctcctaccctgacccctgcctgaccaagccatgtctgaacaggaggctcaagccccagggggccgggggctgcccccggacatgctggcagagcaggtggagctgtggtggtcccagcagccgcggcgctcggcgctctgcttcgtcgtggccgtgggcctcgtggcaggctgtggcgcgggcggcgtggcactgctgtcaaccaccagcagccgctcaggtgaatggcggctagcaacgggcactgtgctctgtttgctggctctgctggttctggtgaaacagctgatgagctcggctgtgcaggacatgaactgcatccgccaggcccaccatgtggccctgctgcgcagtggtggaggggccgacgccctcgtggtgctgctcagtggcctcgtgctgctggtcaccggcctgaccctggccgggctggccgccgcccctgcccctgctcggccgctggccgccatgctgtctgtgggcattgctctggctgccttgggctcgcttttgctgctgggcctgctgctgtatcaagtgggtgtgagcggacactgcccctccatctgtatggccactccctccacccacagtggccatggcggccatggcagcatcttcagcatctcaggacagttgtctgctggccggcgtcacgagaccacatccagcattgccagcctcatctgacggagccagagccgtccttcttctcacagcggcctcagcgtccccagagccgagccagggtgtgagtgcatgtgaacgttgagtacacatgagtgcgtgtatgcccccaggctgggtcagctcttctgtggattgcatggcgtgtgattaaaagcccatgtgttcccacacatccacatcatgggaaggttaatgtgtgcctccttggaactgggtgttggtgtccatggaacttcctctctgtatctcaggtcagtaggcgcagaaacgcctcatgatgaagattcttgagccccatttccaagacccctcacatccaatcctgtcctgtaacatccatcaaggatttccataggggtgactggtgcccacccaagactgcaccagtgcctgctcattgaggagagtaactgctggccaggcagaaagaatatgggctctgcaatgagacagacctggaggggactctcccgttgagcactagcagctggaggagttgggagttcatggctatcatggttgtgttaatcgattgtggggatgaaatgtcattgtgtatggaaggcggggctcatggctgattggcaataaaatggcggctgccgttgtcattgtctcca

SEQ ID NO: 21660 - DNA, 1850 bp, Homo sapiens
  misc_feature 1..1850: note = ENST00000432792
  source 1..1850: mol_type = unassigned DNA; mol_type = unassigned DNA
catttgagggagaatgagcacggggcttttggaggctgcagcctagggccaagggatggaggaatgcctcagcccagcagaaggagcagtgccacgtcagccaatcggctcaggccctgccctggaaacgacacctgttcatcctcctcccggcaggctcacctgagtgcaggttaggcaggtgaagtgtctccccggaaaccaagctagagtgccccacctgctcggccctgccttctcggatcggatccagcacatccaggcttctcctcctcccgaggaaccagtggtgacagctgaggccatgtgagtaggatcctgaatgaggctttatctctggctgttcgtcccatcgtccaccgtggcaccagctccctcagccagccgggatgggaccagcgactgagagagccagaggcagagaggtgagggtgaccatatcctggactgtgagaggaatgggactctgggcctgtagctgccaagcaggtggcaggtgctccaggctgtgatctgaaccctctgacccctgacattgacctcctaccctgacccctgcctgaccaagccatgtctgaacaggaggctcaagccccagggggccgggggctgcccccggacatgctggcagagcaggtggagctgtggtggtcccagcagccgcggcgctcggcgctctgcttcgtcgtggccgtgggcctcgtggcaggctgtggcgcgggcggcgtggcactgctgtcaaccaccagcagccgctcaggtgaatggcggctagcaacgggcactgtgctctgtttgctggctctgctggttctggtgaaacagctgatgagctcggctgtgcaggacatgaactgcatccgccaggcccaccatgtggccctgctgcgcagtggtggaggggccgacgccctcgtggtgctgctcagtggcctcgtgctgctggtcaccggcctgaccctggccgggctggccgccgcccctgcccctgctcggccgctggccgccatgctgtctgtgggcattgctctggctgccttgggctcgcttttgctgctgggcctgctgctgtatcaagtgggtgtgagcggacactgcccctccatctgtatggccactccctccacccacagtggccatggcggccatggcagcatcttcagcatctcaggacagttgtctgctggccggcgtcacgagaccacatccagcattgccagcctcatctgacggagccagagccgtccttcttctcacagcggcctcagcgtccccagagccgagccagggtgtgagtgcatgtgaacgttgagtacacatgagtgcgtgtatgcccccaggctgggtcagctcttctgtggattgcatggcgtgtgattaaaagcccatgtgttcccacacatccacatcatgggaaggttaatgtgtgcctccttggaactgggtgttggtgtccatggaacttcctctctgtatctcaggtcagtaggcgcagaaacgcctcatgatgaagattcttgagccccatttccaagacccctcacatccaatcctgtcctgtaacatccatcaaggatttccataggggtgactggtgcccacccaagactgcaccagtgcctgctcattgaggagagtaactgctggccaggcagaaagaatatgggctctgcaatgagacagacctggaggggactctcccgttgagcactagcagctggaggagttgggagttcatggctatcatggttgtgttaatcgattgtggggatgaaatgtcattgtgtatggaaggcggggctcatggctgattggcaataaaatggcggctgccgttgtcattgtctcca

SEQ ID NO: 21661 - DNA, 179 bp, Homo sapiens
  misc_feature 1..179: note = ENST00000442284
  source 1..179: mol_type = unassigned DNA; mol_type = unassigned DNA
gggcttttggaggctgcagcctagggccaagggatggaggctcacctgagtgcaggttaggcaggtgaagtgtctccccggaaaccaagctagagtgccccacctgctcggccctgccttctcggatcggatccagcacatccaggcttctcgtgagttcccccattgtcccccaacgc

SEQ ID NO: 21662 - DNA, 567 bp, Homo sapiens
  misc_feature 1..567: note = ENST00000456751
  source 1..567: mol_type = unassigned DNA; mol_type = unassigned DNA
ggaatgctgggactgactccacggccacgcccacctcccccacttccttgagagcatcggcaccagcccccgcccacctcgggggtaggggtcagcctctgcagaggagtctccgggaggacagatacctcgtcaggatgtaacctgtgcacggccacatagtaatattcccagaatgacccaggacctacgtcttctgccctgtcctgccttggagggctcctcccgaggaaccagtggtgacagctgaggccatgtgagtaggatcctgaatgaggctttatctctggctgttcgtcccatcgtccaccgtggcaccagctccctcagccagccgggatgggaccagcgactgagagagccagaggcagagaggtgagggtgaccatatcctggactgtgagaggaatgggactctgggcctgtagctgccaagcaggtggcaggtgctccaggctgtgatctgaaccctctgacccctgacattgacctcctaccctgacccctgcctgaccaagccatgtctgaacaggaggctcaagccccagggggccgggggctgccccc

SEQ ID NO: 21663 - DNA, 2881 bp, Homo sapiens
  misc_feature 1..2881: note = ENST00000416379
  source 1..2881: mol_type = unassigned DNA; mol_type = unassigned DNA
ccgcaatggcccaggcagtgtggtcgcgcctcggccgcatcctctggcttgcctgcctcctgccctgggccccggcaggggtggccgcaggcctgtatgaactcaatctcaccaccgatagccctgccaccacgggagcggtggtgaccatctcggccagcctggtggccaaggacaacggcagcctggccctgcccgctgacgcccacctctaccgcttccactggatccacaccccgctggtgcttactggcaagatggagaagggtctcagctccaccatccgtgtggtcggccacgtgcccggggaattcccggtctctgtctgggtcactgccgctgactgctggatgtgccagcctgtggccaggggctttgtggtcctccccatcacagagttcctcgtgggggaccttgttgtcacccagaacacttccctaccctggcccagctcctatctcactaagaccgtcctgaaagtctccttcctcctccacgacccgagcaacttcctcaagaccgccttgtttctctacagctgggacttcggggacgggacccagatggtgactgaagactccgtggtctattataactattccatcatcgggaccttcaccgtgaagctcaaagtggtggcggagtgggaagaggtggagccggatgccacgagggctgtgaagcagaagaccggggacttctccgcctcgctgaagctgcaggaaacccttcgaggcatccaagtgttggggcccaccctaattcagaccttccaaaagatgaccgtgaccttgaacttcctggggagccctcctctgactgtgtgctggcgtctcaagcctgagtgcctcccgctggaggaaggggagtgccaccctgtgtccgtggccagcacagcgtacaacctgacccacaccttcagggaccctggggactactgcttcagcatccgggccgagaatatcatcagcaagacacatcagtaccacaagatccaggtgtggccctccagaatccagccggctgtctttgctttcccatgtgctacacttatcactgtgatgttggccttcatcatgtacatgaccctgcggaatgccactcagcaaaaggacatggtggaggtggctgattttgacttttcccccatgtctgacaagaacccggagccaccctctggggtcaggtgctgctgccagatgtgctgtgggcctttcttgctggagactccatctgagtacctggaaattgttcgtgagaaccacgggctgctcccgcccctctataagtctgtcaaaacttacaccgtgtgagcactccccctccccaccccatctcagtgttaactgactgctgacttggagtttccagcagggtggtgtgcaccactgaccaggaggggttcatttgcgtggggctgttggcctggatcatccatccatctgtacagttcagccactgccacaagcccctccctctctgtcacccctgaccccagccattcacccatctgtacagtccagccactgacataagccccactcggttaccacccccttgaccccctacctttgaagaggcttcgtgcaggactttgatgcttggggtgttccgtgttgactcccaggtgggcctggctgcccactgcccattcctctcatattggcacatctgctgtccattgggggttctcagtttcctcccccagacagccctacctgtgccagagagctagaaagaaggtcataaagggttaaaaatccataactaaaggttgtacacatagatgggcacactcacagagagaagtgtgcatgtacacacaccacacacacacacacacacacacacacacacacacacagaaatataaacacatgcgtcacatgggcatttcagatgatcagctctgtatctggttaagtcggttgctgggatgcaccctgcactagagctgaaaggaaatttgacctccaagcagccctgacaggttctgggcccgggccctccctttgtgctttgtctctgcagttcttgcgccctttataaggccatcctagtccctgctggctggcagggggctggatggggggcaggactaatactgagtgattgcagagtgctttataaatatcaccttattttatcgaaacccatctgtgaaactttcactgaggaaaaggccttgcagcggtagaagaggttgagtcaaggccgggcgcggtggctcacgcctgtaatcccagcactttgggaggccgaggcgggtggatcacgagatcaggagatcgagaccaccctggctaacacggtgaaaccccgtctctactaaaaaaatacaaaaagttagccgggcgtggtggtgggtgcctgtagtcccagctactcgggaggctgaggcaggagaatggtgcgaacccgggaggcggagcttgcagtgagcccagatggcgccactgcactccagcctgagtgacagagcgagactctgtctccaaaaaaaaaaaaagaagaggttgagtcagcagggacttgggttccctgtgtgtgaggggggcattcttgcctgccagctgctcccgaggtggccttgagaaggaagaagcaggatgacagagcctgagcagcggaaccagcctgcaccctcccttctggcccagcgacctgggctgtggctgagacaataatgaggccagaagtagccggagcctgtcaggaagggcaggggaggactgtggggtctgggctctgtcgctgtaaccatctgctcccaggctgtgtgcagaaaatggcatttacactattgtgcagctcattctcatgaaatactgccattgttgctaaataaagcttgtgtgctctgaatatagccaagcataga

SEQ ID NO: 21664 - DNA, 3015 bp, Homo sapiens
  misc_feature 1..3015: note = ENST00000339375
  source 1..3015: mol_type = unassigned DNA; mol_type = unassigned DNA
ggcggcggcggcgcgcagcgacagagcgtcccccggcgaggacgagcgagcacggcgcccgcacctccccgcaccgcccgcgctgcgcgcccggaggagcgaccgccgcagttctcgagctccagctgcattccctccgcgtccgccccacgcttctcccgctccgggccccgcaatggcccaggcagtgtggtcgcgcctcggccgcatcctctggcttgcctgcctcctgccctgggccccggcaggggtggccgcaggcctgtatgaactcaatctcaccaccgatagccctgccaccacgggagcggtggtgaccatctcggccagcctggtggccaaggacaacggcagcctggccctgcccgctgacgcccacctctaccgcttccactggatccacaccccgctggtgcttactggcaagatggagaagggtctcagctccaccatccgtgtggtcggccacgtgcccggggaattcccggtctctgtctgggtcactgccgctgactgctggatgtgccagcctgtggccaggggctttgtggtcctccccatcacagagttcctcgtgggggaccttgttgtcacccagaacacttccctaccctggcccagctcctatctcactaagaccgtcctgaaagtctccttcctcctccacgacccgagcaacttcctcaagaccgccttgtttctctacagctgggacttcggggacgggacccagatggtgactgaagactccgtggtctattataactattccatcatcgggaccttcaccgtgaagctcaaagtggtggcggagtgggaagaggtggagccggatgccacgagggctgtgaagcagaagaccggggacttctccgcctcgctgaagctgcaggaaacccttcgaggcatccaagtgttggggcccaccctaattcagaccttccaaaagatgaccgtgaccttgaacttcctggggagccctcctctgactgtgtgctggcgtctcaagcctgagtgcctcccgctggaggaaggggagtgccaccctgtgtccgtggccagcacagcgtacaacctgacccacaccttcagggaccctggggactactgcttcagcatccgggccgagaatatcatcagcaagacacatcagtaccacaagatccaggtgtggccctccagaatccagccggctgtctttgctttcccatgtgctacacttatcactgtgatgttggccttcatcatgtacatgaccctgcggaatgccactcagcaaaaggacatggtggagaacccggagccaccctctggggtcaggtgctgctgccagatgtgctgtgggcctttcttgctggagactccatctgagtacctggaaattgttcgtgagaaccacgggctgctcccgcccctctataagtctgtcaaaacttacaccgtgtgagcactccccctccccaccccatctcagtgttaactgactgctgacttggagtttccagcagggtggtgtgcaccactgaccaggaggggttcatttgcgtggggctgttggcctggatcatccatccatctgtacagttcagccactgccacaagcccctccctctctgtcacccctgaccccagccattcacccatctgtacagtccagccactgacataagccccactcggttaccacccccttgaccccctacctttgaagaggcttcgtgcaggactttgatgcttggggtgttccgtgttgactcccaggtgggcctggctgcccactgcccattcctctcatattggcacatctgctgtccattgggggttctcagtttcctcccccagacagccctacctgtgccagagagctagaaagaaggtcataaagggttaaaaatccataactaaaggttgtacacatagatgggcacactcacagagagaagtgtgcatgtacacacaccacacacacacacacacacacacacacacacacacacagaaatataaacacatgcgtcacatgggcatttcagatgatcagctctgtatctggttaagtcggttgctgggatgcaccctgcactagagctgaaaggaaatttgacctccaagcagccctgacaggttctgggcccgggccctccctttgtgctttgtctctgcagttcttgcgccctttataaggccatcctagtccctgctggctggcagggggctggatggggggcaggactaatactgagtgattgcagagtgctttataaatatcaccttattttatcgaaacccatctgtgaaactttcactgaggaaaaggccttgcagcggtagaagaggttgagtcaaggccgggcgcggtggctcacgcctgtaatcccagcactttgggaggccgaggcgggtggatcacgagatcaggagatcgagaccaccctggctaacacggtgaaaccccgtctctactaaaaaaatacaaaaagttagccgggcgtggtggtgggtgcctgtagtcccagctactcgggaggctgaggcaggagaatggtgcgaacccgggaggcggagcttgcagtgagcccagatggcgccactgcactccagcctgagtgacagagcgagactctgtctccaaaaaaaaaaaaagaagaggttgagtcagcagggacttgggttccctgtgtgtgaggggggcattcttgcctgccagctgctcccgaggtggccttgagaaggaagaagcaggatgacagagcctgagcagcggaaccagcctgcaccctcccttctggcccagcgacctgggctgtggctgagacaataatgaggccagaagtagccggagcctgtcaggaagggcaggggaggactgtggggtctgggctctgtcgctgtaaccatctgctcccaggctgtgtgcagaaaatggcatttacactattgtgcagctcattctcatgaaatactgccattgttgctaaataaagcttgtgtgctctgaatatagccaagcataga

SEQ ID NO: 21665 - DNA, 3891 bp, Homo sapiens
  misc_feature 1..3891: note = ENST00000450876
  source 1..3891: mol_type = unassigned DNA; mol_type = unassigned DNA
ttttaaatttttttttttgtagagaatgggtgtcgctgtgttgttcaggctgatctaaaactcctgggctcaagtgaccctctggcttcaaagcgctgtgattacaggtgtgagctgactgggcccggcctcaaatgcctttataatttaagaaatggctctgaaaaaaaaggaaatacgtgatgtgggccaaagcagcgaacgtgtgaggtgggcctgaggaaaggtcggagctggagtcccccacagggacaggtgatgttgctttgaagtgaatgagatgcgtctgaaaaaaataatctcagagttgcctgggcactagaaggggcttcccttgccccctcgattcctgcttctactccccgggctggccctgccctggaaaccacacgagggtggcccacgcatccgtcagatgtctggggaccatgtacctgctaagggaggggaggacgaggcagggacatggggatgtatcagggtcagtcatcgtgccacaacccccagcccccagggaacacgggatgggcagcatttttactttaaaatgttgcctcatctagaggggttttccaccctgttggtgctggctttggggagatatgattttatttgatttatgtatttatttatttgagatggaatttcgctctttttgcccaggctggagtgcagtggcgcaatctcggctcacggcaaccaccatctcccaggttcaagtaattctccggcctcagcctcccgagtagctgagattacaggcgttcgccaccacacccggctaattttgtattgttagtagagacggggtttcgccatgttggccaggccggtctcaaacgcctgacctcaggtgatccacccacctcggcctcccaaagtgctggaattacaggcatgagccaccgtgcctgaccgagatgcaattttagagcccaggaggccaggctgctatttcttccaggagtgatttcccaaaatggacctggagctgacaggttcctggggggacttgtggggggaccttgtgcccactcggtcgtgcatctactgtccccacatccccatcgccagaaggccagcacccacctttctgccacattttgggaaccataaaaggacccagattggagacttgttgagggacaggcctgtatgaactcaatctcaccaccgatagccctgccaccacgggagcggtggtgaccatctcggccagcctggtggccaaggacaacggcagcctggccctgcccgctgacgcccacctctaccgcttccactggatccacaccccgctggtgcttactggcaagatggagaagggtctcagctccaccatccgtgtggtcggccacgtgcccggggaattcccggtctctgtctgggtcactgccgctgactgctggatgtgccagcctgtggccaggggctttgtggtcctccccatcacagagttcctcgtgggggaccttgttgtcacccagaacacttccctaccctggcccagctcctatctcactaagaccgtcctgaaagtctccttcctcctccacgacccgagcaacttcctcaagaccgccttgtttctctacagctgggacttcggggacgggacccagatggtgactgaagactccgtggtctattataactattccatcatcgggaccttcaccgtgaagctcaaagtggtggcggagtgggaagaggtggagccggatgccacgagggctgtgaagcagaagaccggggacttctccgcctcgctgaagctgcaggaaacccttcgaggcatccaagtgttggggcccaccctaattcagaccttccaaaagatgaccgtgaccttgaacttcctggggagccctcctctgactgtgtgctggcgtctcaagcctgagtgcctcccgctggaggaaggggagtgccaccctgtgtccgtggccagcacagcgtacaacctgacccacaccttcagggaccctggggactactgcttcagcatccgggccgagaatatcatcagcaagacacatcagtaccacaagatccaggtgtggccctccagaatccagccggctgtctttgctttcccatgtgctacacttatcactgtgatgttggccttcatcatgtacatgaccctgcggaatgccactcagcaaaaggacatggtggagaacccggagccaccctctggggtcaggtgctgctgccagatgtgctgtgggcctttcttgctggagactccatctgagtacctggaaattgttcgtgagaaccacgggctgctcccgcccctctataagtctgtcaaaacttacaccgtgtgagcactccccctccccaccccatctcagtgttaactgactgctgacttggagtttccagcagggtggtgtgcaccactgaccaggaggggttcatttgcgtggggctgttggcctggatcatccatccatctgtacagttcagccactgccacaagcccctccctctctgtcacccctgaccccagccattcacccatctgtacagtccagccactgacataagccccactcggttaccacccccttgaccccctacctttgaagaggcttcgtgcaggactttgatgcttggggtgttccgtgttgactcccaggtgggcctggctgcccactgcccattcctctcatattggcacatctgctgtccattgggggttctcagtttcctcccccagacagccctacctgtgccagagagctagaaagaaggtcataaagggttaaaaatccataactaaaggttgtacacatagatgggcacactcacagagagaagtgtgcatgtacacacaccacacacacacacacacacacacacacacacacacacagaaatataaacacatgcgtcacatgggcatttcagatgatcagctctgtatctggttaagtcggttgctgggatgcaccctgcactagagctgaaaggaaatttgacctccaagcagccctgacaggttctgggcccgggccctccctttgtgctttgtctctgcagttcttgcgccctttataaggccatcctagtccctgctggctggcagggggctggatggggggcaggactaatactgagtgattgcagagtgctttataaatatcaccttattttatcgaaacccatctgtgaaactttcactgaggaaaaggccttgcagcggtagaagaggttgagtcaaggccgggcgcggtggctcacgcctgtaatcccagcactttgggaggccgaggcgggtggatcacgagatcaggagatcgagaccaccctggctaacacggtgaaaccccgtctctactaaaaaaatacaaaaagttagccgggcgtggtggtgggtgcctgtagtcccagctactcgggaggctgaggcaggagaatggtgcgaacccgggaggcggagcttgcagtgagcccagatggcgccactgcactccagcctgagtgacagagcgagactctgtctccaaaaaaaaaaaaagaagaggttgagtcagcagggacttgggttccctgtgtgtgaggggggcattcttgcctgccagctgctcccgaggtggccttgagaaggaagaagcaggatgacagagcctgagcagcggaaccagcctgcaccctcccttctggcccagcgacctgggctgtggctgagacaataatgaggccagaagtagccggagcctgtcaggaagggcaggggaggactgtggggtctgggctctgtcgctgtaaccatctgctcccaggctgtgtgcagaaaatggcatttacactattgtgcagctcattctcatgaaatactgccattgttgctaaataaagcttgtgtgctctgaatat

SEQ ID NO: 21666 - DNA, 867 bp, Homo sapiens
  misc_feature 1..867: note = ENST00000474857
  source 1..867: mol_type = unassigned DNA; mol_type = unassigned DNA
cccactgcccattcctctcatattggcacatctgctgtccattgggggttctcagtttcctcccccagacagccctacctgtgccagagagctagaaagaaggtcataaagggttaaaaatccataactaaaggttgtacacatagatgggcacactcacagagagaagtgtgcatgtacacacaccacacacacacacacacacacacacacacacacacacagaaatataaacacatgcgtcacatgggcatttcagatgatcagctctgtatctggttaagtcggttgctgggatgcaccctgcactagagctgaaaggaaatttgacctccaagcagccctgacaggttctgggcccgggccctccctttgtgctttgtctctgcagttcttgcgccctttataaggccatcctagtccctgctggctggcagggggctggatggggggcaggactaatactgagtgattgcagagtgctttataaatatcaccttattttatcgaaacccatctgtgaaactttcactgaggaaaaggccttgcagcggtagaagaggttgagtcagcagggacttgggttccctgtgtgtgaggggggcattcttgcctgccagctgctcccgaggtggccttgagaaggaagaagcaggatgacagagcctgagcagcggaaccagcctgcaccctcccttctggcccagcgacctgggctgtggctgagacaataatgaggccagaagtagccggagcctgtcaggaagggcaggggaggactgtggggtctgggctctgtcgctgtaaccatctgctcccaggctgtgtgcagaaaatggcatttacactattgtgcagctcattctc

SEQ ID NO: 21667 - DNA, 2261 bp, Homo sapiens
  misc_feature 1..2261: note = ENST00000345589
  source 1..2261: mol_type = unassigned DNA; mol_type = unassigned DNA
gcgctgcgcgcccggaggagcgaccgccgcagttctcgagctccagctgcattccctccgcgtccgccccacgcttctcccgctccgggccccgcaatggcccaggcagtgtggtcgcgcctcggccgcatcctctggcttgcctgcctcctgccctgggccccggcaggggtggccgcagagttcctcgtgggggaccttgttgtcacccagaacacttccctaccctggcccagctcctatctcactaagaccgtcctgaaagtctccttcctcctccacgacccgagcaacttcctcaagaccgccttgtttctctacagctgggacttcggggacgggacccagatggtgactgaagactccgtggtctattataactattccatcatcgggaccttcaccgtgaagctcaaagtggtggcggagtgggaagaggtggagccggatgccacgagggctgtgaagcagaagaccggggacttctccgcctcgctgaagctgcaggaaacccttcgaggcatccaagtgttggggcccaccctaattcagaccttccaaaagatgaccgtgaccttgaacttcctggggagccctcctctgactgtgtgctggcgtctcaagcctgagtgcctcccgctggaggaaggggagtgccaccctgtgtccgtggccagcacagcgtacaacctgacccacaccttcagggaccctggggactactgcttcagcatccgggccgagaatatcatcagcaagacacatcagtaccacaagatccaggtgtggccctccagaatccagccggctgtctttgctttcccatgtgctacacttatcactgtgatgttggccttcatcatgtacatgaccctgcggaatgccactcagcaaaaggacatggtggagaacccggagccaccctctggggtcaggtgctgctgccagatgtgctgtgggcctttcttgctggagactccatctgagtacctggaaattgttcgtgagaaccacgggctgctcccgcccctctataagtctgtcaaaacttacaccgtgtgagcactccccctccccaccccatctcagtgttaactgactgctgacttggagtttccagcagggtggtgtgcaccactgaccaggaggggttcatttgcgtggggctgttggcctggatcatccatccatctgtacagttcagccactgccacaagcccctccctctctgtcacccctgaccccagccattcacccatctgtacagtccagccactgacataagccccactcggttaccacccccttgaccccctacctttgaagaggcttcgtgcaggactttgatgcttggggtgttccgtgttgactcccaggtgggcctggctgcccactgcccattcctctcatattggcacatctgctgtccattgggggttctcagtttcctcccccagacagccctacctgtgccagagagctagaaagaaggtcataaagggttaaaaatccataactaaaggttgtacacatagatgggcacactcacagagagaagtgtgcatgtacacacaccacacacacacacacacacacacacacacacacacacagaaatataaacacatgcgtcacatgggcatttcagatgatcagctctgtatctggttaagtcggttgctgggatgcaccctgcactagagctgaaaggaaatttgacctccaagcagccctgacaggttctgggcccgggccctccctttgtgctttgtctctgcagttcttgcgccctttataaggccatcctagtccctgctggctggcagggggctggatggggggcaggactaatactgagtgattgcagagtgctttataaatatcaccttattttatcgaaacccatctgtgaaactttcactgaggaaaaggccttgcagcggtagaagaggttgagtcaaggccgggcgcggtggctcacgcctgtaatcccagcactttgggaggccgaggcgggtggatcacgagatcaggagatcgagaccaccctggctaacacggtgaaaccccgtctctactaaaaaaatacaaaaagttagccgggcgtggtggtgggtgcctgtagtcccagctactcgggaggctgaggcaggagaatggtgcgaacccgggaggcggagcttgcagtgagcccagatggcgccactgcactccagcctgagtgacagagcgagactctgtctccaaaaaaaaaaaaagaa

SEQ ID NO: 21668 - DNA, 589 bp, Homo sapiens
  misc_feature 1..589: note = ENST00000461092
  source 1..589: mol_type = unassigned DNA; mol_type = unassigned DNA
agagcgtcccccggcgaggacgagcgagcacggcgcccgcacctccccgcaccgcccgcgctgcgcgcccggaggagcgaccgccgcagttctcgagctccagctgcattccctccgcgtccgccccacgcttctcccgctccgggccccgcaatggcccaggcagtgtggtcgcgcctcggccgcatcctctggcttgcctgcctcctgccctgggccccggcaggggtggccgcaggacccagatggtgactgaagactccgtggtctattataactattccatcatcgggaccttcaccgtgaagctcaaagtggtggcggagtgggaagaggtggagccggatgccacgagggctgtgaagcagaagaccggggacttctccgcctcgctgaagctgcaggaaacccttcgaggcatccaagtgttggggcccaccctaattcagaccttccaaaagatgaccgtgaccttgaacttcctggggagccctcctctgactgtgtgctggcgtctcaagcctgagtgcctcccgctggaggaaggggagtgccaccctgtgtccgtggccagcacagcgtacaacct

SEQ ID NO: 21669 - DNA, 547 bp, Homo sapiens
  misc_feature 1..547: note = ENST00000486839
  source 1..547: mol_type = unassigned DNA; mol_type = unassigned DNA
agatgcgaatttagagcccaggaggccaggctgccatttcctctctggtggtgatttccaaaatggacccggagctgacaggttcctggggcctgtatgaactcaatctcaccaccgatagccctgccaccacgggagcggtggtgaccatctcggccagcctggtggccaaggacaacggcagcctggccctgcccgctgacgcccacctctaccgcttccactggatccacaccccgctggtgcttactggcaagatggagaagggtctcagctccaccatccgtgtggtcggccacgtgcccggggaattcccggtctctgtctgggtcactgccgctgactgctggatgtgccagcctgtggccaggggctttgtggtcctccccatcacagagttcctcgtgggggaccttgttgtcacccagaacacttccctaccctggcccagctcctatctcactaagaccgtcctgaaagtctccttcctcctccacgacccgagcaacttcctcaagaccgccttgtttctctacagctgggactt

SEQ ID NO: 21670 - DNA, 679 bp, Homo sapiens
  misc_feature 1..679: note = ENST00000445790
  source 1..679: mol_type = unassigned DNA; mol_type = unassigned DNA
acaaaaattagccaggcctggtggcgggcacctgtaatcccatcttactagggaggctgaggcaggagaatcgcttgaacccgggaggcggaggttgcagtgagccgagatcgcgccattctgggacagagcgagactctgtctcaagattaaaaaaaaaaaaaaaagaaaagaggaagcagcagcagcagcagcagcaagaggaatttcgaggcctttcgcccaacgcctggcgcaccttaagctctcaacagttcttgaatgaggagtagcatctcggagccacgagcgtgcagagagaaggcacctggaggagagccccaagggacctgcaggcggcttgcagcgcagcgcacgcccctggggacgctgagcctgtatgaactcaatctcaccaccgatagccctgccaccacgggagcggtggtgaccatctcggccagcctggtggccaaggacaacggcagcctggccctgcccgctgacgcccacctctaccgcttccactggatccacaccccgctggtgcttactggcaagatggagaagggtctcagctccaccatccgtgtggtcggccacgtgcccggggaattcccggtctctgtctgggtcactgccgctgactgctggatgtgccagcctgtggccaggggctttgtggtcctccccatcacag

SEQ ID NO: 21671 - DNA, 558 bp, Homo sapiens
  misc_feature 1..558: note = ENST00000418253
  source 1..558: mol_type = unassigned DNA; mol_type = unassigned DNA
ctgctggcgctgactgcgctccagtgcccagtgacagagagtcgagggattgtggatagcctgcagaagttttcctcgctccctgcttacctccccacgaacttgcacatctccaatgcagaggagtcctttttccttaaagaagccaaccaagacctcacaaggaactccagtctgcaggcccgggtggagccattcttcatctaccgagccaggacaccccctattatcaatgccagctatggcccattttcagtggagaagataatcccccaggagctcctgttgacatctacagcctttggaaacatggacaaatttcccttcaactggaaattgaaatcccacatccttgacagctccatctactccaacagacccaaagtgcagaccttgttttatgtcactggcatgggctgggatgacagtgaccttacggaagatctaccctgtgtcaagatgtttgctttccctgaggccagggaagtggcagccagctgtcggctgcaaggggccccagggctgtgtgtggctgagctggagctgctgcccgagtgg

SEQ ID NO: 21672 - DNA, 553 bp, Homo sapiens
  misc_feature 1..553: note = ENST00000535330
  source 1..553: mol_type = unassigned DNA; mol_type = unassigned DNA
aattaggaactggggggtgttgaataaagctgaagatttggtgccctcgcctcagctccagactctacgggaaatgtttggtgcagcatccagaatggacaccactgctgtctgcaccgggggagcaccctctcccctcccatcatagctaattgatgtccaagtcctaccagaatctcttcatttcctctccatcctggtggccctttctgcagtagaggctgcgtgacagagagtcgagggattgtggatagcctgcagaagttttcctcgctccctgcttacctccccacgaacttgcacatctccaatgcagaggagtcctttttccttaaagaagccaaccaagacctcacaaggaactccagtctgcaggcccgggtggagccattcttcatctaccgagccaggacaccccctattatcaatgccagctatggcccattttcagtggagaagataatcccccaggagctcctgttgacatctacagcctttggaaacatggacaaatttcccttcaactggaaattgaaatcccacatccttgaca

SEQ ID NO: 21673 - DNA, 10906 bp, Homo sapiens
  misc_feature 1..10906: note = ENST00000299308
  source 1..10906: mol_type = unassigned DNA; mol_type = unassigned DNA
tacgggaaatgtttggtgcagcatccagaatggacaccactgctgtctgcaccgggggagtgacagagagtcgagggattgtggatagcctgcagaagttttcctcgctccctgcttacctccccacgaacttgcacatctccaatgcagaggagtcctttttccttaaagaagccaaccaagacctcacaaggaactccagtctgcaggcccgggtggagccattcttcatctaccgagccaggacaccccctattatcaatgccagctatggcccattttcagtggagaagataatcccccaggagctcctgttgacatctacagcctttggaaacatggacaaatttcccttcaactggaaattgaaatcccacatccttgacagctccatctactccaacagacccaaagtgcagaccttgttttatgtcactggcatgggctgggatgacagtgaccttacggaagatctaccctgtgtcaagatgtttgctttccctgaggccagggaagtggcagccagctgtcggctgcaaggggccccagggctgtgtgtggctgagctggagctgctgcccgagtggttcagctcaggcctggacctggaaccagaggaggagatcccagccctgctcgggggcaccacgatggagctcttcttcacgctctacccagctgacaaggctggccagtgtcctctggaggaggaaggcaagtgggagaacaatatccactcgggcctggagagcccccagcaagcgtttccagcccgagagaggattgggagtgtggtggtctacccaacccaagatgatctgaagtggtccctggtgagcttggacgagaatgtggtcatctcggtacctctgaatctagtccgggaaggggacacggccacctttttggtctctctgaccagtagctctgtggcagaccagttcactcttagaattaaggcggcagcaggtgtgaagataacggcagtgagagtcagcagtgaggaccaatgggcagtccaggaggaaattgataatggcagcactcagacgtcggccaccctcacctgcatgggccatcgcccggacacgcagagcagggtaaatggatccttctatgagatcttgcaagtggactttggaattgataatagcagtgacctggctggggcccagcagattacctggcaggtggagtacccgattgaggactccatgagtgagctggtcgtctccgagatcttcgtcagccagacaaccttcgtgggcatcgtccctcttgccatggacaccgaggttttgaacactgccattctcactggaaagcctgtttcagttcctgtcaaagtcgtgggggtccaggaggatggttctgtggtcgatgtgtctgagtctgtggaatgcaagtctgccgatgaagatgtcattaaggtttccaacaactgtgattccatttttgtgaatgggaaggaaatgaagagcaaagtggacacgattgtgaacttcacccaccagcacttcacctcccagttcgaggtcactgtctgggcacccaggctccccctgcagattgagatctcagacaccgagctgagccagatcaagggctggaggatcccggttgctgccaacagaaggcctacccgggaaagcgatgacgaggacgatgaggagaagaagggacgaggctgctccctgcagtaccagcacgccacagtgcgtgtcctcacccagtttgtggccgagtcacctgacttagggcagctgacctacatgctgggccccgactggcagtttgacatcactgaccttgtgaccgagttcatgaaggtggaggagccgaaaatcgctcagttacaggacggcaggaccctggctggtcgggagccgggaataaccacggtgcaggtcctctcgccgttgtctgactccatcctggctgagaagacggtgattgtcctggatgaccgagtcaccatcgcggagctgggagtgcagctcgtagctggcatgtctctctccctgcagccacaccgagcagacaaaagggccatcgtctccacagctgctgccctggatgttcttcagtccccacagcaggaagcaatagtaagttcttggattttgttcagtgatggttcggtgacacctttagacatttacgatcctaaggattattctgttactgtctcatcattggatgaaatggtggtgtctgtccaggcaaaccttgagtccaaatggccaattgtggttgcagagggtgaaggacaagggcctttgattaagttagaaatgatgataagtgaaccttgtcagaagaccaagaggaagagtgttcttgccgtgggtaaaggaaatgtcaaggtcaaattcgaaccaagtagtgatgagcaccaaggaggcagcaatgatattgagggcataaatcgggaatataaagaccacctcagtaattccatagagcgcgaaggaaaccaggagagagcagtccaggaatggttccaccgtggcacacctgttggccaagaggaaagtaccaacaaaagcacaaccccccagtctcccatggaagggaagaataagttactcaaaagtggtggtccagatgcctttacaagcttccccactcaagggaagtcaccggaccccaataatcctagtgacctcacagtgacctcaagggggctaacggacttggagattggcatgtatgccttgctctgcgtcttctgtctggccattctggtcttcttgatcaactgcgtggcgtttgcctggaaatacagacacaaaaggtttgctgtgagtgagcagggcaacatcccccattcccacgactgggtctggcttgggaatgaagtggaacttttggagaaccctgttgacattacactcccatcagaggagtgcacaaccatgatagacaggggcctgcagttcgaggagaggaacttccttctgaatggcagttcccagaagacttttcatagtcaactactcagaccctctgactatgtctatgagaaagaaattaaaaatgaacctatgaattcttcgggcccaaagaggaagagagtcaagttcacttcctacaccaccatcctcccagaggacggcggcccatacaccaactccatcctgtttgacagcgatgataacatcaagtgggtctgccaagatatggggctgggggattcacaggactttagagactatatggaaagtctgcaagaccagatgtaaactcctttcttatgtttgtattcacctttatgccttctgttttttgaatgctggagcagtgagtttgatcagcaataggggatgatttaacaaagtttgatttgtggaggtctggtgggattcatttctaagcaggtaaaagaggtttggagagctatagaagctgggttttaagtttggaaatgcctctaaaacagccacatgtggggactggagaaattctaagacaacagttttatggactgcctggtacgagctcagtgcaaatgtattaaacctgaccccacagacattgttagtcatctcgtgacaaatggccatgtggaattagaaaagatttgggtgttgatttttctatttctagaccttttaaagcacagtggacacttattgccccttggcctgagtttagacatacatgaaagatgactgaatgtagctatcctgatttgtcatgagcgctgctcattatttttatatacatttgcacctgcacctgttcctttgacctctggaattctttttgaaacatgaagagaagaaatttcagtcttttccttgagctctgtttgatttacacatgagttttcttccctgggatttgccatgccatgttatttcctgggtctccatgcaggatgtcaggtttttccagttttctgcacttcatcatctagggatggtatccaagaagcttattctcactttgttttttccttccttttgttgttgaactttcttgtataacactgggacaaagggttttacttaaaatgttaatatacagtgagggagggccatctctttactgttttctatgtgaagtttcaaacatttggaaaaaagttgtcaatcacaaacatttatttttattctctgcttgttgaaaactcatggggaactcctggagtgcatttctgagggtaaaaaggccccaacatagctgtatttatacaagtgctttgtggccaacacaatttactatccaaactgaagtcttaaagtagaattgacctacacagaaaggaaattgcctaggcaatagatgcagattacactttccattttaccagaacaaaagtttttttttttttaaataagtagaatgacagttcaagttagcaatatatagaaatccatccatacaatgaccaaaataaataaataaataaaactcaatcatgactttggcagagataaaacattgacaagggtgtgcatttgtggagagaagcagtgggtttccccccaaaatccatacaaataaatgactattccagaactcaagaagcagctattatagaaaaaaaaattaaaaaccacagctattgaaaaattaaaacggcaagagaaaaaaagaaacaactcctgcataatgtttaaataaaaatgttattttaatagcatcatgaatggtcttaaggcaaaaatttcagattagcaaaatgtgatgacatatttattaagattgtattattggaaatgtagacactggactagtatgcctcattatgagctttactgagccatttgcatctctaagaaatatgattttaaaggcccaaagtaggaaggatctgcagggggtcacctgaagcagtgccctgactccaaatggctgataactgagctaatccaaggagaggcgttcagttgttctcttattatagatttccttgggtgggaacatgacaaccccgcctcctctagccatgacgtggcagccaaaaagttcttcctgtatctctggcccacaggactgtagtgtgtttgggaacagtgctgaaattgcaagtgatgtaggcctgacctccagagcccagcgttcagttagttgtataaaatggggcttaggaaccgaagctgatgaagttccaaaagtagttcagtttgatgggataaggaagcaaggagagccaggcattagctgcaaaaggagcttgcagagagatggctgacactttatgggaagattcctcagtcagccaaaagcttttcaaagagtttggtgcagaggtagctcagagccaaccatccaggaccgaagaaagctcatgtgctgattgacacatagctatccaggtgagtcggctccttctatgaggcttttcaatcgtctctccctttggatctctggcattccagaaagactgggaattcatttctgaaaatgatgaacctccgctgaaacggggaggaaatctcttacacacatacagcagggtcctgcccactggtaaagtgagacgttgggtagggggtgtaactggggaggaggtgaaggaaattatccctgccatggggagtgttattcaggaacataaaaattagagcattccctctgatggcagtgcttgacggggtgcagggaacaaactggggagcgttcaaacatgccagtggtttctcagcagggctggaaactggccacagtcctgaagatgcttcttgtgacaacttagagtcactgggagtcacacagctcctgtgtagccgcctttgctcctctgtgttaaaacccagtcagttcaaaataacaatcaaatggaaggccatgggggaagggttccttccaccatataacccacacccagatgtatataaacgcatatacatacatatacccgtgtgtgtgtgtgtgtgtgtgtgtgtgtgtgtgaatactgaagagccagacaacaaactatttagtaagaatcaacagtgactgtcaattgttctcagatttggcatggatactatttctcatgaaataatgtcattaaagtatttcctcctctaaatatttcctgaagatcataaaccatgggttatagcaccttgttttccagctagtcaatatacaactattaggtgctgtgccccaaaatatctaaaatgggggtaaagatataaactattaagccatgaaatctaattttctggggaccatgcatttgcctggattttccaggattttatggctgatagacccaaattattagtcttgataaacaacctgaaccaaacatttataaagtcccttcctctcccatgggaatggaatgctcagactcctgctgagggagacaccagcaagcctcttgagaaggcaccagacagtgaactctgtggtcacatgaagggaggttcagatgctagacgaccagcgtatgacctggaaccattgaggattgcaaccgctgcctccagggtccagatgtgctgcagtagagggcagagcacaggaatcaagaagcagctgccacaccaaagaactgatgcttaaacacacaggtgtgttgcatttgagagaaggcaagaagaaaagacaatagaaggttaccctggaaaaacaacacctagcaaacctcagaatactccatgtgtcccaagagaaggaataattgtctttctagctgttatatattgcacactggccaggataaattcccagactataataatcctgactatgtagacggaagtttctatttataaagtcatgcagggggaaagttgattaatttttgtcccattgccacatctgtagactaagtaatttttaacttgctaacttttagaatgtccacctttgtgcattttggtagcattcttgtttcattattttagaaaggggtcttcccattactgggatgtcggggccctgtcagagaactattattaaggctctgtgagggaactgttcagtctcacagcaaggaccacagagcgtggtttcatctgaaccctacaagtcagggacaccagtgtgttttctactcgagttacctaaaaatggtctcaattttccatttcattctctgtaaatgacacaatagatggtttatagactcagcagccctcaccttttattaaaattatatatgtgtgatgtaatgcatatcacctgtcatgtaaagggacggtatggatggtggaaaagttatgctaaaatatggattgcagatatttttgtatgtaatataggcaatataatgaaacaccgagttttttaaagtgaaagcatgcaaaatcgtagcttttaaatgtacagacatcccactcaaaaatatctaaactgatagtgggaaaaacatttgagacctagtaacatcatgaaatgcactgaatttggaattctggcctagaaaggctgtggcttatgttgggattgatgatggaatctgccagaacattttcatcttattcttcttgacttttggatttttttcttttctttttttctggaaatatttcggaaataaagtgacttcatttttcagcataaaagtatattctaaccacagggtaacacatcgtttttaacatgaaaataaacatttaaacattcttcagttgtttcattattttatctgcatgttccataaagcagctgtatggttggctataatatagatttattttttcttttcagccagagattttaatacccttgatgcagtaataaatggacatcaaaagaaaacatttcttaaaagttgccaacgtattttaccttgaaaacatttcttatttgttatcctagtaggctggggaaagcttctctccagatgtctcagaaaaagatctcctgtttctcatggccccgtccagggtcaaaccatgttgaaagtcagtgctgaaatgcatgatgctgcgggtgtttgagagcctttgacctctgtccaccctttggtctttgctcgtcaatggcttggtcttgtatatgtatctggggcaggggctttgtactgggcccagggtgctgagctttccagaacaggcagagctctagagacctaagaaaaccacaggacaggcggggattctttttgagaggctgaagtagatgtttcagctgaaagatgggtggtacacttgccaagtgcctagaggggctagaggctctctgttggtgtgtgtgtatttcttgaaactgcagagtcatttttggcatgctggcaaatgctactccttgcttttaggatgaatagggatgcctctttggcgataatttgacgtgtcataataaatgcccaataccaaacctagtctttctccaggcccttcagacatcattcaggtaactgggtgtaaacacaggagttggctttgtgaaactgaggcaggatttcctgcctctaaactattggcagcaaaagagccaaaaatgtgctcccaggtgcaaaaccccagccccatcagaattgcttctcagcactttgggtaactgttttgcactaacagcttcctccttgtcttttccctgggaacatgggagcactgacacagaactcaactggtccagccctttgggaggcccaggtgggcagatcacctgaagtcaggagtttgagaccagcctgggcaacatggtgaaaccctgtctctactaaaaatacaaaaattatccagtcgtggtggtgcatgcctgtagtcccagctactctggaggctgaggcaggagaatcacttgaacctgagaggtgaaggttgtagtgagccaagatcgtaccactgcactctggcctgggcaacaagagcgagactttgtctcaaacagaaacaaaacaagaaaaacaaaaagaacttaaccagttctccccagatctcagcgtgcatgcatatatagagtttagtaaaatgtgtttcaaaaaaagaaggataaaagaaagtttgaagtaagatttgtaaaagaatgaacactttaggttttgtgtgtgagtgcaaaatgtaaacacggcatttgaaattttttggtattgaaatccttaatgcctgttagtttctttatggttttatacaattgagataggttctgaagtttttttgttgtttgcttttagaaatttttaaaaatacaaaaaaaaagcgcagaaacattttcatctgggttactgtgtttatagactattctatgactcaagacaactaggacaccatcattttccagataagaaataacagttcaagttcattagggaaattatcttcccagtccaagcaagcaataatgttatcaacttacaatattggacaatcttcatattctatgagatgcctttaaaatttctttggatttaatgctgctcttggtcagttgttcaaatgaaacattgtaatttcatgttaacgacaagagtctcacgggagtctctttagatgctgcaggaactgagaggatagaagacctctctatacatctacattgcccattggagtaaagcactttacagagagatggatgccgctttgggatttggggtctatgtaatgctgatttttttcaaacctgtttggaaatattacttctttgggatggctgaaataacttttgacctgacacatctttctgtacttcctgtggccaaaaaagcaagtgagactttctgtttcccattgtaaggctggagctgaaatagtctgccacgttattgttatctcctttgtaagaatttgactttctgaatgaaataacagaatgccagtgtcaacactgaccatatgatatagttatttcacttagagatgcttcctcaaagagcgtgcctttttcctccatcataaccgctttaggatctctgttttatccatgtatttcccacatagtagaagcattttccatttccatgaatattacaggctgagaaggagcacacatctggcactgataagcacactggcccaggcactcagccttctcatttcattaatctggttggtgaccgtttccatcgggcacacctggaaatgtccatcggacatattgccatctcagttgctgcagtgcagtgaattaccccagagccaccagttcacatgcccaaagatgaactggcccatggagggacttgattgccaagtgacttcctttctgtagttatcctctgctgtgacccttattttggacttctagcaagggcattcagtgtggattccaagaacaaaaccaattgtccaacctccattacaggggtcttctaggtattccccacacattatttgtgggcataagcaaacaccataactatgaaaggctgagagtggagaattaagtcataaggaaatgatcaaacctagggaaaaataagtggctataaaacactgaaagatagtcacatccacatagcgtgtatcatgcaacagacccgtgctcttagagggaggtagtgtgtgtcttcccatggcaaataatttttacaatactgctcatgtttaatgtgtgtctacagggcatgctgttgtctcaaaattgaaatgtgcatcttaggtatcagttcccagcctcagactcttctcaggcaggtggaccggatctcagctgcagaacatagtgagtggccaaacctacacagcccagccagtagtgtgctttggggtgattgcaaggcagcaaacagtggggacaagttttgtctggcatttgaaaaggtgttatcccttactttccacatttctgaattggattcttgttccctggtaaacaccagatattataaacagagcatgctgttatgacattgtgcttctatatacctttttgtataatgtatctatctcattatattacctatggtttcagtatgatctgttgtgtatgttccaccgtatatttaatgtctctgtaaaggcacttccaaacattttgaaaacgaagaaataaaacatgttggatgatt

SEQ ID NO: 21674 - DNA, 5787 bp, Homo sapiens
  misc_feature 1..5787: note = ENST00000534945
  source 1..5787: mol_type = unassigned DNA; mol_type = unassigned DNA
tgacagagagtcgagggattgtggatagcctgcagaagttttcctcgctccctgcttacctccccacgaacttgcacatctccaatgcagaggagtcctttttccttaaagaagccaaccaagacctcacaaggaactccagtctgcaggcccgggtggagccattcttcatctaccgagccaggacaccccctattatcaatgccagctatggcccattttcagtggagaagataatcccccaggagctcctgttgacatctacagcctttggaaacatggacaaatttcccttcaactggaaattgaaatcccacatccttgacagctccatctactccaacagacccaaagtgcagaccttgttttatgtcactggcatgggctgggatgacagtgaccttacggaagatctaccctgtgtcaagatgtttgctttccctgaggccagggaagtggcagccagctgtcggctgcaaggggccccagggctgtgtgtggctgagctggagctgctgcccgagtggttcagctcaggcctggacctggaaccagaggaggagatcccagccctgctcgggggcaccacgatggagctcttcttcacgctctacccagctgacaaggctggccagtgtcctctggaggaggaaggcaagtgggagaacaatatccactcgggcctggagagcccccagcaagcgtttccagcccgagagaggattgggagtgtggtggtctacccaacccaagatgatctgaagtggtccctggtgagcttggacgagaatgtggtcatctcggtacctctgaatctagtccgggaaggggacacggccacctttttggtctctctgaccagtagctctgtggcagaccagttcactcttagaattaaggcggcagcaggtgtgaagataacggcagtgagagtcagcagtgaggaccaatgggcagtccaggaggaaattgataatggcagcactcagacgtcggccaccctcacctgcatgggccatcgcccggacacgcagagcagggtaaatggatccttctatgagatcttgcaagtggactttggaattgataatagcagtgacctggctggggcccagcagattacctggcaggtggagtacccgattgaggactccatgagtgagctggtcgtctccgagatcttcgtcagccagacaaccttcgtgggcatcgtccctcttgccatggacaccgaggttttgaacactgccattctcactggaaagcctgtttcagttcctgtcaaagtcgtgggggtccaggaggatggttctgtggtcgatgtgtctgagtctgtggaatgcaagtctgccgatgaagatgtcattaaggtaaggggggatttatctacagctgtcctaagtgctcagagctttttgtcgttccttcttttgtctccaaggtcttgttctcactgagcatcccatgctctaaagggctggaggccagaatgacctcacgaaggaggaaacagctgaccgcagagactccctggaatcagcaggcggctgcagcaggtgatgctgcttccctctccctggaaaggggaatccctgacccttaatctccagcagaaagaatttattctcctccccttcttgtctcccctattcttctctctatctttcctcgtaagacaatattttcctaactttagcaatccaaataagaccttctcattttttgcaaactcactgtgcctaataatattatttactcaatatattttctttaaatgccttgcttctttcgggtagccagttagctcagtgggttagagtgtggtgctaataaatgcattactttttcaaacttaaaaactaatttagcttcattataagacaataaagtccgtgagcttggtgtattacattttttgttaatatgcattaaaataaataactattcaaataaaattaagttcacccatgtgccacctaactgaacttgaatataaccagtgggatacagtttaggaaatgggacatttctgctagattcttcactcaaattagctatgtttctgactccaaattctgctaggaaccagaaaatatttttttcatgctctctgaaggggtctttttgaaccaccaaatttaatatttctgcctattttttcttagcacattggttgctattgcttttgcagcagagacctcagggagaaaggatttgaatttttagaatgactgatccttcctcctttaaattattaagagagccccaaagtccaatctattcagctattttagaaaaatacaataactcagagttctgcccttcctcacattctacaagctcttgtttagaggttacatgaaacttggtctcagtattgaaaacttcgtggtagacaggaaaacctttaggggtttccctatagtagaaaaggtctgggaggggttgatttcttcttgttgtgacctacaggatgctgtgtcttaagcaagagacagtttcggaaaaaaagactgatgtattcgtgaggtctaattaacaaagaaattaattcctaggaaactcaagtttggcatagactctttcctggacatggaatgctcatcgtccttagatatggaaggtggactggcttaaaacctgcacacatagccctgcctggggttcctggtggtccttgtattctgtaggcaggtttgattaaatatatggccttaaatattcagagtttagaaagagctgagccaagtcacaggagattatatgcaccaatgacaaatatggatgatgaactgctgttggttgctattgacaatgcgcaagttttacactatttttactattcccatgtcattctagaaaggagacactgataagagatggtatctgtatgcttacgtcataatgggctcaaacaaatgattcagtctgtagtttcctaagccttttgttctgacctaagagcctgctatgaagccccatggggtggaatcctccttctcttgccctgaagagctctactctagaggggcaggtccaagttcacagatcccgttattgccatatacctggttttctccactccacacaaatgtactaaaagtatcctctgctcatcctcatagacgttgttttggaagatgatacctttttgctcagctgtcacctatatagcctcaggaggatggggattcgtctaacaaattattgcccagtcttcagaggaacaaagtgaaacctgcagatcgcaagctcagagctgtattcacactttttaaggggattccaggactgttgcaagtttgggggcttgtgtcaattgaggcgatttaattaaatggctgtgatgcatttactatggcttcagtgtcaatgtttgtagtaaattttactataactccaagttgaatggagttgtccacagagctatgaccttggcatcatcccagggacatcctcaaatacatggcacattcattagcaccctttggagagatcctctgagtctgtggagttgtcacacagtcatacttcagagtacagaaaacactgaatgatttttagggagagtcttgcagggctcaccaaagatctttgtgccttggaaccatgagttagataagggaaaaatgtgaatttagaaagatgtaagttatggtaatatccaaacaaatgaacttgtttggcctgtgattgtatgacttttgcgggacagaatcagaggacatacatgattttgaaaagctggaaccttggcctaatctggcaagattaaaagagataaatgtaaaatttcaagttgacaactatagtagtccttccttatctgtggtttcactttccgtggtttcatttcactgtggtcaatcacagtccaaaaacgttaaatgaaaattttcagaaagaagcaattcatgttttaaattgtgtactgttctgagtatcgtgaagaaatcttgagtcttcctgctccatcccacctgggttgtaactcatgactttgtctggcatatccatgctgtagataccacccacctctgagtcatttagtagctgcctgggtgatcaaatagactgtcgcggtatcacagtgcttgtgttcaagtcacccttatgttatttacaaatgaccccaaagtataagagtagtgatgctggcaattcggctagaccaacaagaagtcataaagtgcttcttttaagtgaaaaggtgagagttcttgacttaataaggaaggaaaaagatcatatgctggagttactaagatctacagtcagagcgaatcgtctatccatgaaatcgtgatgaaggaaaaaacattcatcgtagttttgctgtcacatctcaaatacaaaagttaaggccacagtgtgtgataaattcttcattaagatgtgaaaagacattaaatttaggtgaaagacatgaacagaaacttgttctgctggatgacagtctgattcagttctatctgtggtttcaggcatccactgggggtcttagactatattacccatggatgggaggagactgggagactgctgtacttttaggttaaaaaaaaaaaaaacaagtagaggattgtgtgtgtgtgtgtgtgtgtgtgtgcgcacacacacaagaagccttagcgtttttatcagtattgggatccagtgagtcaactgtttgataaggctgctacaggttgatttttattagcatgaatgggtgtgtgcctcagagcagaggtcacaggcaggcagtctgcagaccagatctgacccagaagtgtgtggggggtgcggggagggtctgcatagtttaaaaattgttacttaatttgttgcccccatgtaaaaattggcaagttcgcacagaaatctggatttacagtttcttatgaaaaatcacaggaccaggtggtcctgggtctccatgatttcctgtgaacctcgtctggagttgaagagaggatgctcctctgcataaaacctgtgccctccagctcactgtagtctccaccactcccttttgtctttcacatggaggttgaaggatatttgtcatttctggtcacacttgtgctcctagtttttgatagtggatttcagaggaaggtgagatattttttgtactccagtctctaaaaataaataagcaacaaatgatagacttcactctctcactctgatggagaattctgtatctttctaggccgtaagaagaacaataaaaaattgggttgtgctctgccaaaaagtgtctgagaggctgaggactcttgaaatcaaatcacaggagaaatgattgaaggaagtgtgagtgttaagcctattgatgagaagaaaaggctcaggggtgaggtggagagggagacatgacagctttttgtaagtctttcaagggccatcatgtagaagatggagtagctttgtgctttttagattccaagaatggaagttgaaaggtaccagttttagctcaatataaagaaaaagactgcagaggtagtgagttctttggttgagcttccagacatgtgatgttgctaaagatcctgactccaccttcctcaccgtttgaccttgggcaaattacttaccatctctgagcctagtttccttatctataaaatggggatggtaatgatacagtggaaacgtacttttctagagatttgttctaaagtcacagcaaacggcagaactaacaataaccaaactactccctaatccttgaaaatccccagtctcactgggtcatccaggctggagtgcagtggcgtgatctcggcttactgcagc

SEQ ID NO: 21675 - DNA, 2055 bp, Homo sapiens
  misc_feature 1..2055: note = ENST00000535886
  source 1..2055: mol_type = unassigned DNA; mol_type = unassigned DNA
acagtcaagaaaggtgtagatcctgcagactgcgtggaggccatgctttcacatcaagccttcctcggtgacttgctcagcctgactgtgttcttatttgctgggtctctctctggaaatctccactttgagtgtttccaacaactgtgattccatttttgtgaatgggaaggaaatgaagagcaaagtggacacgattgtgaacttcacccaccagcacttcacctcccagttcgaggtcactgtctgggcacccaggctccccctgcagattgagatctcagacaccgagctgagccagatcaagggctggaggatcccggttgctgccaacagaaggcctacccgggaaagcgatgacgaggacgatgaggagaagaagggacgaggctgctccctgcagtaccagcacgccacagtgcgtgtcctcacccagtttgtggccgagtcacctgacttagggcagctgacctacatgctgggccccgactggcagtttgacatcactgaccttgtgaccgagttcatgaaggtggaggagccgaaaatcgctcagttacaggacggcaggaccctggctggtcgggagccgggaataaccacggtgcaggtcctctcgccgttgtctgactccatcctggctgagaagacggtgattgtcctggatgaccgagtcaccatcgcggagctgggagtgcagctcgtagctggcatgtctctctccctgcagccacaccgagcagacaaaagggccatcgtctccacagctgctgccctggatgttcttcagtccccacagcaggaagcaatagtaagttcttggattttgttcagtgatggttcggtgacacctttagacatttacgatcctaaggattattctgttactgtctcatcattggatgaaatggtggtgtctgtccaggcaaaccttgagtccaaatggccaattgtggttgcagagggtgaaggacaagggcctttgattaagttagaaatgatgataagtgaaccttgtcagaagaccaagaggaagagtgttcttgccgtgggtaaaggaaatgtcaaggtcaaattcgaaccaagtagtgatgagcaccaaggaggcagcaatgatattgagggcataaatcgggaatataaagaccacctcagtaattccatagagcgcgaaggaaaccaggagagagcagtccaggaatggttccaccgtggcacacctgttggccaagaggaaagtaccaacaaaagcacaaccccccagtctcccatggaagggaagaataagttactcaaaagtggtggtccagatgcctttacaagcttccccactcaagggaagtcaccggaccccaataatcctagtgacctcacagtgacctcaagggggctaacggacttggagattggcatgtatgccttgctctgcgtcttctgtctggccattctggtcttcttgatcaactgcgtggcgtttgcctggaaatacagacacaaaaggtttgctgtgagtgagcagggcaacatcccccattcccacgactgggtctggcttgggaatgaagtggaacttttggagaaccctgttgacattacactcccatcagaggagtgcacaaccatgatagacaggggcctgcagttcgaggagaggaacttccttctgaatggcagttcccagaagacttttcatagtcaactactcagaccctctgactatgtctatgagaaagaaattaaaaatgaacctatgaattcttcgggcccaaagaggaagagagtcaagttcacttcctacaccaccatcctcccagaggacggcggcccatacaccaactccatcctgtttgacagcgatgataacatcaagtgggtctgccaagatatggggctgggggattcacaggactttagagactatatggaaagtctgcaagaccagatgtaaactcctttcttatgtttgtattcacctttatgccttctgttttttgaatgctggagcagtgagtttgatcagcaataggggatgatttaacaaagtttgatttgtgg

SEQ ID NO: 21676 - DNA, 9659 bp, Homo sapiens
  misc_feature 1..9659: note = ENST00000613307
  source 1..9659: mol_type = unassigned DNA; mol_type = unassigned DNA
atagccaggtttccaaccaacctttcctgtgctggaaaggactcacagtcaagaaaggtgtagatcctgcagactgcgtggaggccatgctttcacatcaagccttcctcggtgacttgctcagcctgactgtgttcttatttgctgggtctctctctggaaatctccactttgagtgtttccaacaactgtgattccatttttgtgaatgggaaggaaatgaagagcaaagtggacacgattgtgaacttcacccaccagcacttcacctcccagttcgaggtcactgtctgggcacccaggctccccctgcagattgagatctcagacaccgagctgagccagatcaagggctggaggatcccggttgctgccaacagaaggcctacccgggaaagcgatgacgaggacgatgaggagaagaagggacgaggctgctccctgcagtaccagcacgccacagtgcgtgtcctcacccagtttgtggccgagtcacctgacttagggcagctgacctacatgctgggccccgactggcagtttgacatcactgaccttgtgaccgagttcatgaaggtggaggagccgaaaatcgctcagttacaggacggcaggaccctggctggtcgggagccgggaataaccacggtgcaggtcctctcgccgttgtctgactccatcctggctgagaagacggtgattgtcctggatgaccgagtcaccatcgcggagctgggagtgcagctcgtagctggcatgtctctctccctgcagccacaccgagcagacaaaagggccatcgtctccacagctgctgccctggatgttcttcagtccccacagcaggaagcaatagtaagttcttggattttgttcagtgatggttcggtgacacctttagacatttacgatcctaaggattattctgttactgtctcatcattggatgaaatggtggtgtctgtccaggcaaaccttgagtccaaatggccaattgtggttgcagagggtgaaggacaagggcctttgattaagttagaaatgatgataagtgaaccttgtcagaagaccaagaggaagagtgttcttgccgtgggtaaaggaaatgtcaaggtcaaattcgaaccaagtagtgatgagcaccaaggaggcagcaatgatattgagggcataaatcgggaatataaagaccacctcagtaattccatagagcgcgaaggaaaccaggagagagcagtccaggaatggttccaccgtggcacacctgttggccaagaggaaagtaccaacaaaagcacaaccccccagtctcccatggaagggaagaataagttactcaaaagtggtggtccagatgcctttacaagcttccccactcaagggaagtcaccggaccccaataatcctagtgacctcacagtgacctcaagggggctaacggacttggagattggcatgtatgccttgctctgcgtcttctgtctggccattctggtcttcttgatcaactgcgtggcgtttgcctggaaatacagacacaaaaggtttgctgtgagtgagcagggcaacatcccccattcccacgactgggtctggcttgggaatgaagtggaacttttggagaaccctgttgacattacactcccatcagaggagtgcacaaccatgatagacaggggcctgcagttcgaggagaggaacttccttctgaatggcagttcccagaagacttttcatagtcaactactcagaccctctgactatgtctatgagaaagaaattaaaaatgaacctatgaattcttcgggcccaaagaggaagagagtcaagttcacttcctacaccaccatcctcccagaggacggcggcccatacaccaactccatcctgtttgacagcgatgataacatcaagtgggtctgccaagatatggggctgggggattcacaggactttagagactatatggaaagtctgcaagaccagatgtaaactcctttcttatgtttgtattcacctttatgccttctgttttttgaatgctggagcagtgagtttgatcagcaataggggatgatttaacaaagtttgatttgtggaggtctggtgggattcatttctaagcaggtaaaagaggtttggagagctatagaagctgggttttaagtttggaaatgcctctaaaacagccacatgtggggactggagaaattctaagacaacagttttatggactgcctggtacgagctcagtgcaaatgtattaaacctgaccccacagacattgttagtcatctcgtgacaaatggccatgtggaattagaaaagatttgggtgttgatttttctatttctagaccttttaaagcacagtggacacttattgccccttggcctgagtttagacatacatgaaagatgactgaatgtagctatcctgatttgtcatgagcgctgctcattatttttatatacatttgcacctgcacctgttcctttgacctctggaattctttttgaaacatgaagagaagaaatttcagtcttttccttgagctctgtttgatttacacatgagttttcttccctgggatttgccatgccatgttatttcctgggtctccatgcaggatgtcaggtttttccagttttctgcacttcatcatctagggatggtatccaagaagcttattctcactttgttttttccttccttttgttgttgaactttcttgtataacactgggacaaagggttttacttaaaatgttaatatacagtgagggagggccatctctttactgttttctatgtgaagtttcaaacatttggaaaaaagttgtcaatcacaaacatttatttttattctctgcttgttgaaaactcatggggaactcctggagtgcatttctgagggtaaaaaggccccaacatagctgtatttatacaagtgctttgtggccaacacaatttactatccaaactgaagtcttaaagtagaattgacctacacagaaaggaaattgcctaggcaatagatgcagattacactttccattttaccagaacaaaagtttttttttttttaaataagtagaatgacagttcaagttagcaatatatagaaatccatccatacaatgaccaaaataaataaataaataaaactcaatcatgactttggcagagataaaacattgacaagggtgtgcatttgtggagagaagcagtgggtttccccccaaaatccatacaaataaatgactattccagaactcaagaagcagctattatagaaaaaaaaattaaaaaccacagctattgaaaaattaaaacggcaagagaaaaaaagaaacaactcctgcataatgtttaaataaaaatgttattttaatagcatcatgaatggtcttaaggcaaaaatttcagattagcaaaatgtgatgacatatttattaagattgtattattggaaatgtagacactggactagtatgcctcattatgagctttactgagccatttgcatctctaagaaatatgattttaaaggcccaaagtaggaaggatctgcagggggtcacctgaagcagtgccctgactccaaatggctgataactgagctaatccaaggagaggcgttcagttgttctcttattatagatttccttgggtgggaacatgacaaccccgcctcctctagccatgacgtggcagccaaaaagttcttcctgtatctctggcccacaggactgtagtgtgtttgggaacagtgctgaaattgcaagtgatgtaggcctgacctccagagcccagcgttcagttagttgtataaaatggggcttaggaaccgaagctgatgaagttccaaaagtagttcagtttgatgggataaggaagcaaggagagccaggcattagctgcaaaaggagcttgcagagagatggctgacactttatgggaagattcctcagtcagccaaaagcttttcaaagagtttggtgcagaggtagctcagagccaaccatccaggaccgaagaaagctcatgtgctgattgacacatagctatccaggtgagtcggctccttctatgaggcttttcaatcgtctctccctttggatctctggcattccagaaagactgggaattcatttctgaaaatgatgaacctccgctgaaacggggaggaaatctcttacacacatacagcagggtcctgcccactggtaaagtgagacgttgggtagggggtgtaactggggaggaggtgaaggaaattatccctgccatggggagtgttattcaggaacataaaaattagagcattccctctgatggcagtgcttgacggggtgcagggaacaaactggggagcgttcaaacatgccagtggtttctcagcagggctggaaactggccacagtcctgaagatgcttcttgtgacaacttagagtcactgggagtcacacagctcctgtgtagccgcctttgctcctctgtgttaaaacccagtcagttcaaaataacaatcaaatggaaggccatgggggaagggttccttccaccatataacccacacccagatgtatataaacgcatatacatacatatacccgtgtgtgtgtgtgtgtgtgtgtgtgtgtgtgtgaatactgaagagccagacaacaaactatttagtaagaatcaacagtgactgtcaattgttctcagatttggcatggatactatttctcatgaaataatgtcattaaagtatttcctcctctaaatatttcctgaagatcataaaccatgggttatagcaccttgttttccagctagtcaatatacaactattaggtgctgtgccccaaaatatctaaaatgggggtaaagatataaactattaagccatgaaatctaattttctggggaccatgcatttgcctggattttccaggattttatggctgatagacccaaattattagtcttgataaacaacctgaaccaaacatttataaagtcccttcctctcccatgggaatggaatgctcagactcctgctgagggagacaccagcaagcctcttgagaaggcaccagacagtgaactctgtggtcacatgaagggaggttcagatgctagacgaccagcgtatgacctggaaccattgaggattgcaaccgctgcctccagggtccagatgtgctgcagtagagggcagagcacaggaatcaagaagcagctgccacaccaaagaactgatgcttaaacacacaggtgtgttgcatttgagagaaggcaagaagaaaagacaatagaaggttaccctggaaaaacaacacctagcaaacctcagaatactccatgtgtcccaagagaaggaataattgtctttctagctgttatatattgcacactggccaggataaattcccagactataataatcctgactatgtagacggaagtttctatttataaagtcatgcagggggaaagttgattaatttttgtcccattgccacatctgtagactaagtaatttttaacttgctaacttttagaatgtccacctttgtgcattttggtagcattcttgtttcattattttagaaaggggtcttcccattactgggatgtcggggccctgtcagagaactattattaaggctctgtgagggaactgttcagtctcacagcaaggaccacagagcgtggtttcatctgaaccctacaagtcagggacaccagtgtgttttctactcgagttacctaaaaatggtctcaattttccatttcattctctgtaaatgacacaatagatggtttatagactcagcagccctcaccttttattaaaattatatatgtgtgatgtaatgcatatcacctgtcatgtaaagggacggtatggatggtggaaaagttatgctaaaatatggattgcagatatttttgtatgtaatataggcaatataatgaaacaccgagttttttaaagtgaaagcatgcaaaatcgtagcttttaaatgtacagacatcccactcaaaaatatctaaactgatagtgggaaaaacatttgagacctagtaacatcatgaaatgcactgaatttggaattctggcctagaaaggctgtggcttatgttgggattgatgatggaatctgccagaacattttcatcttattcttcttgacttttggatttttttcttttctttttttctggaaatatttcggaaataaagtgacttcatttttcagcataaaagtatattctaaccacagggtaacacatcgtttttaacatgaaaataaacatttaaacattcttcagttgtttcattattttatctgcatgttccataaagcagctgtatggttggctataatatagatttattttttcttttcagccagagattttaatacccttgatgcagtaataaatggacatcaaaagaaaacatttcttaaaagttgccaacgtattttaccttgaaaacatttcttatttgttatcctagtaggctggggaaagcttctctccagatgtctcagaaaaagatctcctgtttctcatggccccgtccagggtcaaaccatgttgaaagtcagtgctgaaatgcatgatgctgcgggtgtttgagagcctttgacctctgtccaccctttggtctttgctcgtcaatggcttggtcttgtatatgtatctggggcaggggctttgtactgggcccagggtgctgagctttccagaacaggcagagctctagagacctaagaaaaccacaggacaggcggggattctttttgagaggctgaagtagatgtttcagctgaaagatgggtggtacacttgccaagtgcctagaggggctagaggctctctgttggtgtgtgtgtatttcttgaaactgcagagtcatttttggcatgctggcaaatgctactccttgcttttaggatgaatagggatgcctctttggcgataatttgacgtgtcataataaatgcccaataccaaacctagtctttctccaggcccttcagacatcattcaggtaactgggtgtaaacacaggagttggctttgtgaaactgaggcaggatttcctgcctctaaactattggcagcaaaagagccaaaaatgtgctcccaggtgcaaaaccccagccccatcagaattgcttctcagcactttgggtaactgttttgcactaacagcttcctccttgtcttttccctgggaacatgggagcactgacacagaactcaactggtccagccctttgggaggcccaggtgggcagatcacctgaagtcaggagtttgagaccagcctgggcaacatggtgaaaccctgtctctactaaaaatacaaaaattatccagtcgtggtggtgcatgcctgtagtcccagctactctggaggctgaggcaggagaatcacttgaacctgagaggtgaaggttgtagtgagccaagatcgtaccactgcactctggcctgggcaacaagagcgagactttgtctcaaacagaaacaaaacaagaaaaacaaaaagaacttaaccagttctccccagatctcagcgtgcatgcatatatagagtttagtaaaatgtgtttcaaaaaaagaaggataaaagaaagtttgaagtaagatttgtaaaagaatgaacactttaggttttgtgtgtgagtgcaaaatgtaaacacggcatttgaaattttttggtattgaaatccttaatgcctgttagtttctttatggttttatacaattgagataggttctgaagtttttttgttgtttgcttttagaaatttttaaaaatacaaaaaaaaagcgcagaaacattttcatctgggttactgtgtttatagactattctatgactcaagacaactaggacaccatcattttccagataagaaataacagttcaagttcattagggaaattatcttcccagtccaagcaagcaataatgttatcaacttacaatattggacaatcttcatattctatgagatgcctttaaaatttctttggatttaatgctgctcttggtcagttgttcaaatgaaacattgtaatttcatgttaacgacaagagtctcacgggagtctctttagatgctgcaggaactgagaggatagaagacctctctatacatctacattgcccattggagtaaagcactttacagagagatggatgccgctttgggatttggggtctatgtaatgctgatttttttcaaacctgtttggaaatattacttctttgggatggctgaaataacttttgacctgacacatctttctgtacttcctgtggccaaaaaagcaagtgagactttctgtttcccattgtaaggctggagctgaaatagtctgccacgttattgttatctcctttgtaagaatttgactttctgaatgaaataacagaatgccagtgtcaacactgaccatatgatatagttatttcacttagagatgcttcctcaaagagcgtgcctttttcctccatcataaccgctttaggatctctgttttatccatgtatttcccacatagtagaagcattttccatttccatgaatattacaggctgagaaggagcacacatctggcactgataagcacactggcccaggcactcagccttctcatttcattaatctggttggtgaccgtttccatcgggcacacctggaaatgtccatcggacatattgccatctcagttgctgcagtgcagtgaattaccccagagccaccagttcacatgcccaaagatgaactggcccatggagggacttgattgccaagtgacttcctttctgtagttatcctctgctgtgacccttattttggacttctagcaagggcattcagtgtggattccaagaacaaaaccaattgtccaacctccattacaggggtcttctaggtattccccacacattatttgtgggcataagcaaacaccataactatgaaaggctgagagtggagaattaagtcataaggaaatgatcaaacctagggaaaaataagtggctataaaacactgaaagatagtcacatccacatagcgtgtatcatgcaacagacccgtgctcttagagggaggtagtgtgtgtcttcccatggcaaataatttttacaatactgctcatgtttaatgtgtgtctacagggcatgctgttgtctcaaaattgaaatgtgcatcttaggtatcagttcccagcctcagactcttctcaggcaggtggaccggatctcagctgcagaacatagtgagtggccaaacctacacagcccagccagtagtgtgctttggggtgattgcaaggcagcaaacagtggggacaagttttgtctggcatttgaaaaggtgttatcccttactttccacatttctgaattggattcttgttccctggtaaacaccagatattataaacagagcatgctgttatgacattgtgcttctatatacctttttgtataatgtatctatctcattatattacctatggtttcagtatgatctgttgtgtatgttccaccgtatatttaatgtctctgtaaaggcacttccaaacattttgaaaacgaagaaataaaacatgttggatgattccttgt

SEQ ID NO: 21677 - DNA, 4947 bp, Homo sapiens
  misc_feature 1..4947: note = ENST00000435159
  source 1..4947: mol_type = unassigned DNA; mol_type = unassigned DNA
atgcgctccgagggtgcggcccccgggccggcggcgccgctgtgcggggcgctgagcctgctgctgggcgcgctgctgggcaaagtgatagagggtcacggggtcacagacaacatacagagattctcctcactgccaccttacctacctgtgagctaccacatcctcagagcagagacctccttcttcctcaaggaagccaaccaggacctgctgcggaactccagcctgcaggcgagggtggagtccttctttacctacaaaaccaggcagcccccagtgctcaatgccagctatggacccttttctgtggagaaggttgtgcctctggacttgatgttgacttcaaactttttaggtccaaccaataagtttagttttgattggaaactaaaagcccacatcctgcgggacaaagtctacctgagccggcccaaagtgcaggttcttttccacatcatgggcagagactgggatgaccacggcgccggggagaagctgccatgcctgagggtctttgctttccgagaaaccagagaggtgcggggcagctgccggctgaagggggacctggggctgtgtgtggctgagctggagctcctgtccagctggttcagtgccccgacggtgggtgccgggaggaagaagtccatggaccagccggaggggacccctgtggagctctactacaccgtgcacccaggaaacgagcgaggggactgtgccgggggtgacttcaggaagggcaacgccatccgtccaggaaaggatgggctggaggaaaccacgtcccacctgcagaggatcggcaccgtcggcctttaccgggcccaggacagcgcccagctcagcgagctgcgtttggatggtaacgtggtcatctggctgccttccaggccagtcaagcagggagaggtggtcacggcctatgtcaccatctcgagcaattcctctgtggacctcttcatcttgagagccaaggtgaagaagggggtgaacatcctgagtgctcagacccgtgagccccggcagtggggcgtcaagcaggaggtgggcagcggcggaaagcacgtgacggccaccgtggcctgccagcgcctggggcccagcccacgcaacaggagcagcagtttattcaatgaggttgtgcagatgaactttgaaatagccagtttcagcagcctttcagggactcagcccatcacgtggcaggtggagtacccacggaaggggaccacagacatcgccgtgtccgagatctttgtcagccagaaggacctggtgggcatcgttcccttggctatggacactgaaattctgaacaccgccgtactcacaggaaagacagttgccatgcctatcaaggtggtctctgtggaggagaacagtgccgtgatggacatctcagagtcggtggagtgcaagtccacagacgaggacgttatcaaagtgtctgagcgctgtgactacatctttgtcaatggcaaagagatcaaaggaaagatggatgcggtggtgaacttcacataccagtacctgagcgcccccctgtgtgtcaccgtgtgggtgccccggctgcccctgcagatcgaggtctctgacacggagctcagccagataaagggctggagggtccccattgtgaccaataagaggcccactcgtgagagcgaggatgaggacgaggaggagcggcggggccggggctgcgcactgcaataccagcacgccaccgtgcgggtcctcacccagtttgtgtctgagggcgccggtccatggggccagccgaactacctgcttagtcctaactggcagttcgacatcactcacctggtggcagacttcatgaagctggaggaacctcacgtggccaccctccaggacagccgggtcctggttgggcgagaggttgggatgacgaccatccaggtgttgtctccactgtctgactccatcctggcagagaagacaataaccgtgctagatgacaaagtatcggtgacagacttggccatccagctcgtggctgggctgtctgtcgccctttaccccaacgcagaaaacagcaaggccgtaacagctgtggtcacagctgaggaggtgctgcggacccccaaacaggaggctgtattcagcacgtggctgcagttcagtgatggctctgtgacgcccctggacatctacgacaccaaggacttctccctggcagccacctcccaggacgaggctgtcgtgtcagtcccccagccccgctctcccaggtggcccgttgtggtggccgaaggggaaggccagggcccactgatccgagtggacatgacgatcgccgaggcctgccagaaatctaaacgcaagagcatcctggctgtgggcgtcggcaacgtcagggtcaagttcggacagaacgatgctgactccagccccggcggggactatgaggaagatgagatcaagaaccacgccagcgaccgccggcagaagggccagcaccatgagcgcacaggccaagatgggcacctctatggcagctctcccgtggagcgtgaggaaggggctctccgaagagccactaccacggccaggtccctgctggacaacaaagtggtgaagaacagtcgggcagacgggggcaggctggcaggagaggggcagctgcagaacatccccattgacttcaccaacttccctgcccacgtggacctccccaaggccgggagtgggctggaggaaaacgacctggtgcagactccgcggggcctgagtgatctggagatagggatgtacgccctcctgggggtgttctgcctggccatcctcgtcttcctgatcaactgcgccacctttgccctgaagtacaggcacaagcaagtgcccctggaaggtcaggcctccatgacccactctcacgactgggtgtggcttggcaatgaggccgaactcctggagagcatgggggatgcgccgccgccccaggacgagcacaccaccatcatagaccgcggaccgggggcctgcgaggagagcaaccatctcctgctcaatggtggctcccacaagcacgtgcagagccagattcacaggtcagccgactccggggggcggcagggcagagaacagaagcaggaccccctgcactcgcccacctccaagaggaagaaggtgaaatttaccacctttaccaccatccccccggacgacagctgccccacggtgaactccatcgtcagcagcaatgatgaggacatcaaatgggtgtgtcaagacgtggctgtgggtgcccccaaggaacttagaaactatctggagaaactcaaagataaggcttaggcccctctagccaaagggccctgcccagatgccttccttgtactggaaactggcccaagtggggcagaaggcgttgtcagtggggttaagaagggacggtcccagggtccatgctagaccagttggaaagttttgaagtcaggaaaagacgtttttgtatcaagggatttttagcagttaatggtggtggatttttaaaggtcaggggaataaagtctggggcatggggagtgcagaccaagttactgaactgcacaggcaaaattaggaaggttattttatgagtcaaaacatactacagacaagctaccaaaaattatttgttaaaaaatgcaacaagacaaataaaaagagaaataatcatctgtttatatttctaataaaggagcaaaatataaaaataggacctgctaagagacattttccattctaattcacgattcacttttccaaggacagccttcaactgtcaccacacagctgggggggagtcatttcttaacaagggatgcctcttgggatagaactagggagttttaaatctttacttgatcatcttttattttcttttccactttttccttttttctctctctctgtgtcctagacttccattgcatttatatttaatgtttatttctgagaatcaagcagtatatttttcctaaatgaaacataaattatattcctattcattagataggttcctaggaacaatgccaattaatccattgtttaagtagtaacttgaatgtttttctatatccctccagctttgttgatagtggcgggttttgtacaattggagggagccctcagagccttctgggggaggagaggaactgtccttaatccatcaccactaccatagggcaaagccagcaggtgtggccctgtgaggggctgtacagacgggatgtggccaggagaacagagccccacctggaccacctgacccctcgggattccacccctgtcatcgtggggatgttcctatatgggagaaagttgggttaaatcaaaaaagaggccacgcccaggtgtaatcagagccaacctggtgggcttggtctatcacaagacataactgatgctgaacatgaacaaagataaaaactgtttggagggtttttgagttgtttttcttatgttgttgggtggggtataccagcataaactctaaagataaaatctatgttagattgtcaatcaactgtgtttttgaacagcataattgtgtagcagcacattgcaaaaatgcattcatccaaagcgacacatgtggcaacgtagaccacgccagtgaaataagccccttcgtgatcacctgactccagttctccgtgtgctccattggctgcggctgcaggaggaagatgcctgacagccctcatgctctccgcaggggggcgctcacaaagatgccaggggtgtttattgtgtttatttttttaattactaaaatcagtagctaagaaagggtccttgaagcctcctaacctgggttggacctttgaaaaatatatttgtagcacatattatagatggaaagaagaagatatttatttatacctgtgatgccaattgtcattaaaaggcttttcatggcttgacaagtca

SEQ ID NO: 21678 - DNA, 5305 bp, Homo sapiens
  misc_feature 1..5305: note = ENST00000389441
  source 1..5305: mol_type = unassigned DNA; mol_type = unassigned DNA
cgtttatagataccaaggatgaggatgtggatacctttcggagctattatttagtctcccacactctcccgaagacatgtcccaattcttgtttaggatgaaaactaaaggactcattgccttcccccaggaaagctaggagacaagacaagagaacaaaatccttacattgaacttgcttcttcccatcagcgctggcatggaggagccctcttgcaccaggtagaagttggcagcctgagctctggagccagacttctggggctaaatcctggctctgcccttcctggtagaggaacataggcaggctcccccactcctgccggcttcctcatctggaatgtgggaatggcagtggtgcctagcgttgtggttgttctgaggatgaaaggaatccgcatgtttggattccctgaaaagcggagcctgtgacgtgcacttgagaacaggtgctttatttggggaatgatctctggaggcagaatgagggagtgagcagcaagacaggacacattttggaaaaccagcaggaggtgcatcattgagctagctcgcatggtgggcaacttctgtgaagtcccatcgagcccctctagggaattctgcaggacaggcctcagaatccacccctgtgcctcgtcgagcccctctagggaactctgcaggacgggcctcagaatccaccccgtgcctgcaggggaaagtggtctgcacatgccctgttgaggacgttctcaggatacacccgcatgggagtgaagacagtagaaggggaagaagaggggctaagcaaggtcaggtccaggtgcagcacagccagctccttgaggagctcttaagaatgagctgtgctgtgcatgggtccctccttgaggcaaacagcctgggcttctcaccccaccaggtagtcactgggcagagaagcggggtgagcaggacataactcccgggtaactctgagggacacagctccactcacctaagggcagtcttctacggaagatgtggcaggagctgtcggcaacacacgcagcccctggggaggagtccaccaacctagccacagggaccccaggaagcctgggtactcagagagcacctttcataacagcgtctgctattattactcaaaagcaacacccaatgtctgctccataccaggacctcctcccccatagtaaggggaggaaagggaagcacctccaccagccagggcacttccctttcctcctccttgggccatgcaacgggatgaaagctcacctttccctccccttttctctctcacctcttcacaggtttctgacagatgtgactacgtctttgtcaatgggaaagaaatgaaaggcaaggtcaacgtggtggtgaacttcacctaccagcacctgagcagccccctggagatgacggtgtgggtgccccggcttccgctgcagatcgaggtctccgacaccgagctcaatcagatcaagggttggagagtgcccatcgtctccagcaggaggcctgccggggacagtgaagaggaggaggatgatgagcggaggggccgcggctgcaccctgcagtaccagcacgccatggtgcgggtcctgacgcagtttgtggctgaggcggccggccctgggggacacctggcccacctgctgggctcagactggcaagtggacatcacggagctgataaatgacttcatgcaggtggaggagcccaggatcgccaagctgcaaggcggacagatcctgatggggcaggagcttgggatgaccaccattcagatcctgtctcctctgtcagacaccatcctcgctgaaaagaccatcactgtgctggacgagaaggtgaccatcacagacctcggggtgcagctggtgacagggctgtcactctccttgcagctcagcccaggaagcaacagggccatctttgccactgcagtggctcaggaacttctgcagaggccaaaacaggaagcagccatcagttgctgggtccagttcagtgatggctcagtcacgcccttggatatttacgatgggaaagacttctccttgatggccacatctttggatgagaaggtagtctccatccaccaagaccccaaattcaagtggcctatcattgctgcggaaacagaaggacaaggcaccctggtcaaggtggaaatggttattagtgaatcctgccagaaatccaagcggaagagtgtgttagctgttggaacggcaaacatcaaagttaaatttggccaaaacgatgctaaccccaacaccagtgacagcagacacacaggggcaggggttcacatggaaaacaatgtcagtgacagaaggcccaaaaaaccctcgcaggaatgggggagtcaggaaggacagtactatggcagttcttctatgggactcatggagggacggggcaccacgacagacaggtccatcctgcagaagaagaaaggccaggaaagccttttagatgacaacagccacttgcagaccatccccagcgacctcaccagcttcccagcccaggtggacctccccagaagcaatggggaaatggatgggaatgaccttatgcaggcatccaaagggctgagcgacttagaaattgggatgtatgctttgttgggagtcttctgtttggccattttggtcttcttgataaactgtgtgacctttgcattaaaatacagacacaaacaggttcccttcgaggagcaggaagggatgagtcactctcatgactgggttgggttaagcaaccggacagagctgttggagaatcacatcaactttgcctcctcgcaagatgagcaaatcactgccattgacaggggcatggatttcgaggaaagtaaatatctcctcagcacaaactcccaaaaaagcatcaatgggcagctgttcaaacctttgggacccatcatcattgatgggaaagatcagaaaagtgagcccccaacatcccctacctcaaaaaggaaaagggtaaaatttaccaccttcaccgccgtctcctcagacgacgagtaccccaccaggaactccatcgtgatgagtagcgaggatgacattaagtgggtctgccaggatctggaccctggggactgcaaagagctgcacaactacatggagaggttacatgaaaatgtgtaagccagacacacacagacattggttctcactcacctttcagcctttaattccaggatgtgtagcaacggtgcccccggaagagaaacaaagcagcaggacaaaataaggatgacactatccatacagcctcagccaatgaccccggctcggcggcgaggcctggagtccgcatcgacgcacacattccagagtacagtgtcttgcttaagaggtttatcatgcatggcaagatttttaagacttgaaacaaaaacgagttctgaatcactgagcgtctgagagcgtccaggaaagaacagcctctctctctcgaatcaaagcaatttggatattgtaaaatccacatggctccaatattcaatattgcagactatggaagaaaagtacaactcaggtggagcatccatggatcgcatccatggatcaatgggaggaagcgtgtcatcgaaactggagcagcacatcttgctgtgagcgcgatcacaggcagtccagtgccgccgtcagctgtgggaggcatgattgtgagtcattgtctctcaaaggctgggccagagctgtctcagatcatggacaggccaaggaagtggctgacaaggactgaaagggaacatgtgggctaacaggccacaaatacctttgtaactacatgccaaggacaaacacatggacgcaaatcctctgagcccttcagggtacttctttatttgtaaactaaggatactgggcatagaatttgaatcaggttcaaagaaccacgctcttttgattcatatcaagttcacaatgtatccatttctattcctccactgcattgccatcctccccaaagccgttggtcacctgtgggtgggggagggagagggcagtttgtagtatttgctgggtcttttttctccccctgggttttgtgtcaactcccaagtgacattctgtagagaagctccccccgcaacctgggcatatgtcccacgccgtccgtctttgaagaggctggtctctaggcatgggcggtagtcacggtgaattccataccaggggatatacattcccttgctttactagaaagaaaacagggccacttgggatgggtctttcactgttcatggcagatctcctgtccaaagatgtggcctcgaggctgttgagacaaatcggggtgcctgtgtggaacgtgcagggcgtgtggagttgggggggttctgggtgtgaaagtggtggatccagcaggaagcccagcctcacacacaccggacagcacagaaaccttcttcatcttggaggtgcgaagggataaggggcatcagtgcatgtggtgaagatgcaggtttgcaagcacttggtcctgcagtcagccccgaaaggttcagcattgcttaagaccagccatgactctggatatccctgaatcccttcacttatgaagcctatgaagatgggggcaaggatacatcagagaattcctgcctcatctcacgctcactccaaggtagagaatggtgtgttgggtgattgccagccagataggatcctgcaaaagatggtcgggggcagcgggtggtgggcagaagaggccgtgctgttgaattgatcttctatttttccctctggtcattttctctctctctctgctcttcagttgtctgttttccagtctctctgtgtgtctgtctctgtatctctctcctcctttgaacctatcttctccctgcttcctctccatctcatctctgtaattttgagtgtgtgtctttactccttcttcctctccatagaattgaattctctttagatcatgtgtgtgtaaatttcaccagtttaccctcccaaccttagccctctcccctgcaactgtggtgctcttgagactgaggtttctgcagccagtaagtcacctgctcctgtccgcaagcttacctaccttgtttggttgggtgattaagctgtcaccccttttcaatgagaatcctttgctttcagtaacgtcctcatatttctttccattcttacctgtgtcatgttctgttgaatactgcagccgctgcccgcttccaaatccatctgcgtgtagaatgtactgtagattgtaagaatgtaatatatatttataaacttactgactgtaaatataaagtttgcattcagtggct

SEQ ID NO: 21679 - DNA, 5776 bp, Homo sapiens
  misc_feature 1..5776: note = ENST00000422113
  source 1..5776: mol_type = unassigned DNA; mol_type = unassigned DNA
ccactcttcgctcgggtaaacaggaaaggaaataccccctgtggattaaaatttaaaaaaaattctgttggggtcgaaggagggaggtggggtttgcctgcgcgcgtgttggactccggagagcaactcaggagcccgcgcggtcgtcgcctcccggcctggccatggactggcgggaagagggagcagggcgcccgggctgctcgggcccctagccgggcgctccctcgccaccggccccgctgcgggcctctaggggactgagacggtctcttgttcgcctggacggcgccggggagcggaggatctgcgctccgggtctccaggatgtgcccgtctgagatggggacgctgtggcaccactggtcgccggtactcatcagcctggccgccctgttttccaaagtgacggaaggtcgagggatccttgagagcatccagaggttttccttgctgcccacctacctccccgtgacctaccacatcaacaacgcggacgtctccttcttcctgaaggaggccaaccaggatatcatgaggaactccagcctgcagtcccgggtggagtcatttctgatttacaaatccaggaggctgcctgtcctcaatgccagctacgggcctttctccatcgagcaagtggtgccccaggatttaatgctaccttccaacccatttggattcaccaacaaattttctcttaactggaaactaaaagcccacatcctgcgggacaaagtctacctgagccggcccaaagtgcaggttctgttccacatcatgggcagagactgggacgaccgcagcgccggggagaagctgccgtgcctgagggtctttgctttccgagagacccgagaggtgcggggcagctgccggctgcagggggacctggggctgtgcgtggccgagctggagctcctgtccagctggttcagcccccccacggtggttgccgggaggaggaagtccgtggaccagccggaggggacccccgtggagctctactacaccgtgcacccagggggtgagagaggggactgcgtcagggaagacgcgaggagaagcaatgggatccggacaggccacagtgacatcgatgagtccgggccccccttgcagaggatcgggagcatcttcctttatcagacacacaggaaaccctccctgagagaactgcgtctggacaacagcgtggccatccactatataccaaagaccgtgaggaaaggagacgtgctgacttttcctgtttccatctccagaaattccactgaagatcgcttcacgttgagggcaaaggtgaagaaaggcgtgaacatcatcggcgtgcgagccagcagcccttccatttgggatgtcaaggagcgcacggattatactggaaagtatgcaccagctgtcatcgtttgtcagaagaaagcagctggctcagaaaacagtgcggatggcgcctcctacgaggtcatgcagatcgatgtggaggtggaagagcctggtgacctgccagccacacagctggtcacgtggcaggtcgagtaccccggagagatcacgtctgacttgggagtgtccaagatctatgtgagcccaaaggacttgattggagttgtgccgctggctatggaggcagaaatcctgaacacagccatcctcacggggaagacggtggccgtcccggtgaaagtggtctccgtggaggacgacggcacagtgacagagctgctggagtctgtggagtgtagatcgtctgatgaagacgtgattaaggtttctgacagatgtgactacgtctttgtcaatgggaaagaaatgaaaggcaaggtcaacgtggtggtgaacttcacctaccagcacctgagcagccccctggagatgacggtgtgggtgccccggcttccgctgcagatcgaggtctccgacaccgagctcaatcagatcaagggttggagagtgcccatcgtctccagcaggaggcctgccggggacagtgaagaggaggaggatgatgagcggaggggccgcggctgcaccctgcagtaccagcacgccatggtgcgggtcctgacgcagtttgtggctgaggcggccggccctgggggacacctggcccacctgctgggctcagactggcaagtggacatcacggagctgataaatgacttcatgcaggtggaggagcccaggatcgccaagctgcaaggcggacagatcctgatggggcaggagcttgggatgaccaccattcagatcctgtctcctctgtcagacaccatcctcgctgaaaagaccatcactgtgctggacgagaaggtgaccatcacagacctcggggtgcagctggtgacagggctgtcactctccttgcagctcagcccaggaagcaacagggccatctttgccactgcagtggctcaggaacttctgcagaggccaaaacaggaagcagccatcagttgctgggtccagttcagtgatggctcagtcacgcccttggatatttacgatgggaaagacttctccttgatggccacatctttggatgagaaggtagtctccatccaccaagaccccaaattcaagtggcctatcattgctgcggaaacagaaggacaaggcaccctggtcaaggtggaaatggttattagtgaatcctgccagaaatccaagcggaagagtgtgttagctgttggaacggcaaacatcaaagttaaatttggccaaaacgatgctaaccccaacaccagtgacagcagacacacaggggcaggggttcacatggaaaacaatgtcagtgacagaaggcccaaaaaaccctcgcaggaatgggggagtcaggaaggacagtactatggcagttcttctatgggactcatggagggacggggcaccacgacagacaggtccatcctgcagaagaagaaaggccaggaaagccttttagatgacaacagccacttgcagaccatccccagcgacctcaccagcttcccagcccaggtggacctccccagaagcaatggggaaatggatgggaatgaccttatgcaggcatccaaagggctgagcgacttagaaattgggatgtatgctttgttgggagtcttctgtttggccattttggtcttcttgataaactgtgtgacctttgcattaaaatacagacacaaacaggttcccttcgaggagcaggaagggatgagtcactctcatgactgggttgggttaagcaaccggacagagctgttggagaatcacatcaactttgcctcctcgcaagatgagcaaatcactgccattgacaggggcatggatttcgaggaaagtaaatatctcctcagcacaaactcccaaaaaagcatcaatgggcagctgttcaaacctttgggacccatcatcattgatgggaaagatcagaaaagtgagcccccaacatcccctacctcaaaaaggaaaagggtaaaatttaccaccttcaccgccgtctcctcagacgacgagtaccccaccaggaactccatcgtgatgagtagcgaggatgacattaagtgggtctgccaggatctggaccctggggactgcaaagagctgcacaactacatggagaggttacatgaaaatgtgtaagccagacacacacagacattggttctcactcacctttcagcctttaattccaggatgtgtagcaacggtgcccccggaagagaaacaaagcagcaggacaaaataaggatgacactatccatacagcctcagccaatgaccccggctcggcggcgaggcctggagtccgcatcgacgcacacattccagagtacagtgtcttgcttaagaggtttatcatgcatggcaagatttttaagacttgaaacaaaaacgagttctgaatcactgagcgtctgagagcgtccaggaaagaacagcctctctctctcgaatcaaagcaatttggatattgtaaaatccacatggctccaatattcaatattgcagactatggaagaaaagtacaactcaggtggagcatccatggatcgcatccatggatcaatgggaggaagcgtgtcatcgaaactggagcagcacatcttgctgtgagcgcgatcacaggcagtccagtgccgccgtcagctgtgggaggcatgattgtgagtcattgtctctcaaaggctgggccagagctgtctcagatcatggacaggccaaggaagtggctgacaaggactgaaagggaacatgtgggctaacaggccacaaatacctttgtaactacatgccaaggacaaacacatggacgcaaatcctctgagcccttcagggtacttctttatttgtaaactaaggatactgggcatagaatttgaatcaggttcaaagaaccacgctcttttgattcatatcaagttcacaatgtatccatttctattcctccactgcattgccatcctccccaaagccgttggtcacctgtgggtgggggagggagagggcagtttgtagtatttgctgggtcttttttctccccctgggttttgtgtcaactcccaagtgacattctgtagagaagctccccccgcaacctgggcatatgtcccacgccgtccgtctttgaagaggctggtctctaggcatgggcggtagtcacggtgaattccataccaggggatatacattcccttgctttactagaaagaaaacagggccacttgggatgggtctttcactgttcatggcagatctcctgtccaaagatgtggcctcgaggctgttgagacaaatcggggtgcctgtgtggaacgtgcagggcgtgtggagttgggggggttctgggtgtgaaagtggtggatccagcaggaagcccagcctcacacacaccggacagcacagaaaccttcttcatcttggaggtgcgaagggataaggggcatcagtgcatgtggtgaagatgcaggtttgcaagcacttggtcctgcagtcagccccgaaaggttcagcattgcttaagaccagccatgactctggatatccctgaatcccttcacttatgaagcctatgaagatgggggcaaggatacatcagagaattcctgcctcatctcacgctcactccaaggtagagaatggtgtgttgggtgattgccagccagataggatcctgcaaaagatggtcgggggcagcgggtggtgggcagaagaggccgtgctgttgaattgatcttctatttttccctctggtcattttctctctctctctgctcttcagttgtctgttttccagtctctctgtgtgtctgtctctgtatctctctcctcctttgaacctatcttctccctgcttcctctccatctcatctctgtaattttgagtgtgtgtctttactccttcttcctctccatagaattgaattctctttagatcatgtgtgtgtaaatttcaccagtttaccctcccaaccttagccctctcccctgcaactgtggtgctcttgagactgaggtttctgcagccagtaagtcacctgctcctgtccgcaagcttacctaccttgtttggttgggtgattaagctgtcaccccttttcaatgagaatcctttgctttcagtaacgtcctcatatttctttccattcttacctgtgtcatgttctgttgaatactgcagccgctgcccgcttccaaatccatctgcgtgtagaatgtactgtagattgtaagaatgtaatatatatttataaacttactgactgtaaatataaagtttgcattcagtggc

SEQ ID NO: 21680 - DNA, 5631 bp, Homo sapiens
  misc_feature 1..5631: note = ENST00000321639
  source 1..5631: mol_type = unassigned DNA; mol_type = unassigned DNA
gcgcgccaagctcggcgcccgcttctgcccgggtgggcgctgaatcccggacggaggaggagggcgggcgagcgcgagtgtgtgtgtctctctcgagtcatttacggcggagcagccggcgcgagcgccgaggaggcggcgacggcggcggcggctgcttcgtgcaactgtggcttcccccacctcctcttcctttttgctcctcgattcttcttcttcccccacacacgtccatggggagccggctcccctgccagcacctcctctcctctcggccccgtaggcaccagctgccgcttccctggccgcaagctgcgcaggtgccggctgccctggcccctggcgccgcgcccgcgtctcaccgcccgcagcccggactggcgcggcgatccgctcgcccaaactgactcggagggagcgggagccgatgcccggcagcatcgagacagcgggcgaacgggcgtccggggacagggtgggggcggcggggaggaggcgtcggagactctgaaccccagaaaagttcaaggtttgtgcaggttcccccagggaaggcgaggagcgaggcggggcagcgcgcctctctgccgagacagcgagaccttagcggggtggcccggagctgccgtgagctgcaggagcccctctgcatcttacagcgtttatggtcatcaagctggagtcgacgtcctgggcaggaagggctcggggcagggcgcattagccggctttctcgctccctcgcttctccaagccccatctacatggggcagcccgttctggccgcgccacccttgccccagccgccgagcggctgcctgggcaggaggcgctgagccggcctgtgtggagcctgggccctgatccagactggagaaagcgcgctggagcggaggagcgagccttgcgaggggacaaacatctggccgcccgcctcgggcatccggtctgggcgtcgcctagggtggtggcgaccggcgtcgccagtttcagcaccgcacggaaacttttccttctccagatggattaaagttgtctggattttctctttctttgagaaagacagcattcatttgcacctgacctgggatttttatgctgggctgctgcaggggcttggaggaagaaagcggcgctatccatgtgcggttactaccgaaaccgaggaaactggggattgcgttggaagtcggcaccctcgagtgagttcggattcgagctgggccgtgaggccgggagattcagcactgggctctaggtagcccccgggacgcccgcggccaccgggctccggactgcacgtgcagctccccccgcgcctcgcagatcctgcagggggcaccagctgggggaggtggaggctcctcccgcccggagctgcgcccccaccggctccgagggtgtagccgccagcgcctgggacgccccctccccgcaaagtgtccccgaattgcactctctggtcccggagctgcatctgagacagccgggcgccacggcagccctgagttggatgtgaccaagcccagcctggggccaagtcgtcgtcgactgttgctctctcggacccctcccgcccccgcctcggccatggccccggggatgtcgggccgcggcggcgccgccctgctctgcctctcagcgctactcgcccacgcctctggccgctcccacccggccagccccagcccgccggggccgcaggccagcccggtgctgccagtcagctaccgcctgtcgcacacgcggctggccttcttcctgcgggaggcgcggcccccgtcacccgcggtcgccaacagctctctgcagcgctccgagcccttcgtggtgttccagaccaaggagctgccggtcctcaacgtctctctggggcccttcagcaccagccaggtggtggcgcgggagctcctgcagccgtccagcaccctggacatccccgagcgcctgacggtgaactggaaggtgcgggccttcatcgtccgctcgcacgtgcccgcctcgcagcccgtggtccaggtgctgttctacgtagccggccgggactgggacgacttcggcgtcaccgagcggctgccctgtgtccgcctgcatgccttccgggatgcccgggaacaccccctgctgcgcatcgggagcatcagcctgttccgcccgccccccaggaggaccctgcaggagcacaggctggacagcaacctgatgatccgcctgccagaccggcccctcaagcccggggaagtgctcagcatcctcctctatctggcccccaactcctcctcgccctccagccccagcgtggagcacttcacactcagggtgaaggccaagaagggtgtgacccttttaggtaccaagtcacggagtggccagtggcatgtgacctcggagctgctgactggggcaaagcactcaacagccaccgtggatgtggcctgggctcagagcacacccctgccccccagggagggccagggccccttggagatcttgcagctggactttgaaatggagaacttcaccagccagtcagtcaagcggaggatcatgtggcacattgactaccgtggccacggcgccctgcctgacctggagcgggcagtcactgagctgacggtcattcagcgggatgtgcaagccatcctgcccctggccatggacacagagatcatcaacacggccattctgactggccggacagtggccatccctgtcaaggtcattgccatcgaggtgaatggcctcgtcctggacatctccgccctagtggaatgcgagtctgacaatgaagacatcatcaaggtatccagcagctgtgactacgtgtttgtgagtggaaaagagtctcgagggtccatgaacgccagggtcaccttccgctacgacgtcctcaatgctcccctggaaatgacagtctgggtccccaagctgcccttgcacattgagctctcagatgcccgcctcagccaagtgaagggctggagggtacctatcctccccgaccggaggtcagtccgggaaagcgaggatgaggatgaggaggaggaggagcggcggcagagtgcaagccgtggctgcaccctgcagtaccagcatgccaccctgcaggtcttcacccagttccacacgacatcatccgagggcactgaccaggtggtcaccatgttaggcccggactggctggtggaggtcaccgacctagtcagtgacttcatgcgggtgggcgatccccgagtggcacacatggtggacagcagcacgctggcaggactggagccaggcaccaccccctttaaggtggtgtctccgctgacggaggctgtgctcggggagacgctgctgacggtgactgaggagaaggtcagcatcacacagcttcaggcccaggtggtggccagcctggccctctccctgcggcccagccctgggagcagccacaccatcctagccaccacagctgcccaacagaccttgagcttcctcaagcaggaagccctactgagcctctggctctcctacagtgatggcaccacagccccactctccctctacagcccacgagactatggactgctagtgagcagcctggatgagcatgtggccactgtgacccaggaccgggccttccctctggtagtggctgaggccgaggggtcaggggagctgcttcgcgcagagctaaccatcgctgagagctgccagaaaaccaaacgcaagagtgtgctcgccacgacccctgtgggcctgcgggtgcactttgggagggacgaggaggaccccacttatgactacccgggccccagccaaccagggcccggcgggggcgaggacgaggcccggggagctggcccgccgggctctgcgctacccgcaccggaggctccaggcccgggcaccgccagccccgtcgtgccacccacagaagacttcctgccgctgcccaccggcttcctgcaggtgccacggggtctgacagacctggagatcggcatgtacgcgctgctgggcgtcttctgcctcgccatcctcgtcttcctcatcaactgcatcgtttttgtgctgcgctaccggcacaagcgcatcccgcccgagggccagaccagcatggaccactctcaccactgggtgttcctgggcaacgggcagccgctgcgggtgcaaggagagctgtcgccgccagcaggcaacccgctggaaaccgtgcccgccttctgccacggcgaccaccacagcagcggcagctcgcagaccagcgtccagagccaggtgcacggcaggggcgacggctcctcgggcggctcagcccgagaccaagccgaggaccccgccagctcgcccacctccaagcgcaagcgggtcaagttcaccaccttcaccacgctgccgtcagaggagctggcctatgactcggtgcccgcgggcgaagaggacgaggaggaggaagaggacctgggttggggctgcccggatgtggcgggccccacgcggcccactgcacccccggacctgcacaattacatgcgcagaatcaaagagattgcatagaggcgccagccggagtagcagggacccccccccccaacggggtcagctcggggtaggacacagccgggaccccggttcacactgactctgggcggctgaattgattttgtactccctgcccctgcagcttggctccgtgcggagcgggccgcctcagtgtctgggccttccctcgcctcacgccattaccctcttctgccccctgcaggtggagggctcttcctccagtggctcgtaaggaggaaagcaaccccagcctctgttctgccctttccaaacctcctcccatcttaagcaaccccctgccccaagagtgaggcaaggaggtccagcttggggtcaggtgggcccacgctgtgtcccgggcccgcctcccgtcccccgtgtcgtccccctgtgcagggggttctgtgggggtcttgtgtcacaggctgcacaaagactttcctcaaactaatattcagggatttctgtcctgcagggtggggaggtggcagctgcctgccctgccaaggatcttgctgtggacgaaatatctgggggttagggggacagttgtagcatctgctggcattcgggtgcctcccaggacctgggagctgactctacagagaggtctggtgccaagccaggcaccttcctgagttctcaggactcccacctctgccccaagggctttgggcagggacctaaaggggaaagagtcctggatccatctctagccaaatcacaccccagagccagaggcctggggacctccttgccttccccgtcccccacagcaaggtcaacactactacgccttagccacccgtcaccctgctgactgcgacttccctctgcagcacagggcaggcagccacctatgccccacaagacggaacccgggaggggagtagagggcaccagggaatgctgtgagggacttcagggtgggcaaatgcagaagggagccagtgtcgcccctaccccatcccacagccatttttctctcgggttctacccaccactgtgtcggatttttcttaaataaatggaagcggtcagactggaggtgggggcagcagctcccatgaacagagagta

SEQ ID NO: 21681 - DNA, 4379 bp, Homo sapiens
  misc_feature 1..4379: note = ENST00000631683
  source 1..4379: mol_type = unassigned DNA; mol_type = unassigned DNA
agcccagcctggggccaagtcgtcgtcgactgttgctctctcggacccctcccgcccccgcctcggccatggccccggggatgtcgggccgcggcggcgccgccctgctctgcctctcagcgctactcgcccacgcctctggccgctcccacccggccagccccagcccgccggggccgcaggccagcccggtgctgccagtcagctaccgcctgtcgcacacgcggctggccttcttcctgcgggaggcgcggcccccgtcacccgcggtcgccaacagctctctgcagcgctccgagcccttcgtggtgttccagaccaaggagctgccggtcctcaacgtctctctggggcccttcagcaccagccaggtggtggcgcgggagctcctgcagccgtccagcaccctggacatccccgagcgcctgacggtgaactggaaggtgcgggccttcatcgtccgctcgcacgtgcccgcctcgcagcccgtggtccaggtgctgttctacgtagccggccgggactgggacgacttcggcgtcaccgagcggctgccctgtgtccgcctgcatgccttccgggatgcccgggaagtcaagagctcctgccgcctcagcgggggcctggccacttgtctggtgcgggcagagctgcccctggcctggttcgggcccccagcccccgctgcgccacccacggcccgccgcaagtccccggacgggctggagcccgaggcgacgggggagagccagcaggccgagctctactacacgctccacgcccctgatgcgtcggggggctgcgggggctcccgccggggggccgggcccggggtgggggcccgagcggaaagccctacccagcaccccctgctgcgcatcgggagcatcagcctgttccgcccgccccccaggaggaccctgcaggagcacaggctggacagcaacctgatgatccgcctgccagaccggcccctcaagcccggggaagtgctcagcatcctcctctatctggcccccaactcctcctcgccctccagccccagcgtggagcacttcacactcagggtgaaggccaagaagggtgtgacccttttaggtaccaagtcacggagtggccagtggcatgtgacctcggagctgctgactggggcaaagcactcaacagccaccgtggatgtggcctgggctcagagcacacccctgccccccagggagggccagggccccttggagatcttgcagctggactttgaaatggagaacttcaccagccagtcagtcaagcggaggatcatgtggcacattgactaccgtggccacggcgccctgcctgacctggagcgggcagtcactgagctgacggtcattcagcgggatgtgcaagccatcctgcccctggccatggacacagagatcatcaacacggccattctgactggccggacagtggccatccctgtcaaggtcattgccatcgaggtgaatggcctcgtcctggacatctccgccctagtggaatgcgagtctgacaatgaagacatcatcaaggtatccagcagctgtgactacgtgtttgtgagtggaaaagagtctcgagggtccatgaacgccagggtcaccttccgctacgacgtcctcaatgctcccctggaaatgacagtctgggtccccaagctgcccttgcacattgagctctcagatgcccgcctcagccaagtgaagggctggagggtacctatcctccccgaccggaggtcagtccgggaaagcgaggatgaggatgaggaggaggaggagcggcggcagagtgcaagccgtggctgcaccctgcagtaccagcatgccaccctgcaggtcttcacccagttccacacgacatcatccgagggcactgaccaggtggtcaccatgttaggcccggactggctggtggaggtcaccgacctagtcagtgacttcatgcgggtgggcgatccccgagtggcacacatggtggacagcagcacgctggcaggactggagccaggcaccaccccctttaaggtggtgtctccgctgacggaggctgtgctcggggagacgctgctgacggtgactgaggagaaggtcagcatcacacagcttcaggcccaggtggtggccagcctggccctctccctgcggcccagccctgggagcagccacaccatcctagccaccacagctgcccaacagaccttgagcttcctcaagcaggaagccctactgagcctctggctctcctacagtgatggcaccacagccccactctccctctacagcccacgagactatggactgctagtgagcagcctggatgagcatgtggccactgtgacccaggaccgggccttccctctggtagtggctgaggccgaggggtcaggggagctgcttcgcgcagagctaaccatcgctgagagctgccagaaaaccaaacgcaagagtgtgctcgccacgacccctgtgggcctgcgggtgcactttgggagggacgaggaggaccccacttatgactacccgggccccagccaaccagggcccggcgggggcgaggacgaggcccggggagctggcccgccgggctctgcgctacccgcaccggaggctccaggcccgggcaccgccagccccgtcgtgccacccacagaagacttcctgccgctgcccaccggcttcctgcaggtgccacggggtctgacagacctggagatcggcatgtacgcgctgctgggcgtcttctgcctcgccatcctcgtcttcctcatcaactgcatcgtttttgtgctgcgctaccggcacaagcgcatcccgcccgagggccagaccagcatggaccactctcaccactgggtgttcctgggcaacgggcagccgctgcgggtgcaaggagagctgtcgccgccagcaggcaacccgctggaaaccgtgcccgccttctgccacggcgaccaccacagcagcggcagctcgcagaccagcgtccagagccaggtgcacggcaggggcgacggctcctcgggcggctcagcccgagaccaagccgaggaccccgccagctcgcccacctccaagcgcaagcgggtcaagttcaccaccttcaccacgctgccgtcagaggagctggcctatgactcggtgcccgcgggcgaagaggacgaggaggaggaagaggacctgggttggggctgcccggatgtggcgggccccacgcggcccactgcacccccggacctgcacaattacatgcgcagaatcaaagagattgcatagaggcgccagccggagtagcagggacccccccccccaacggggtcagctcggggtaggacacagccgggaccccggttcacactgactctgggcggctgaattgattttgtactccctgcccctgcagcttggctccgtgcggagcgggccgcctcagtgtctgggccttccctcgcctcacgccattaccctcttctgccccctgcaggtggagggctcttcctccagtggctcgtaaggaggaaagcaaccccagcctctgttctgccctttccaaacctcctcccatcttaagcaaccccctgccccaagagtgaggcaaggaggtccagcttggggtcaggtgggcccacgctgtgtcccgggcccgcctcccgtcccccgtgtcgtccccctgtgcagggggttctgtgggggtcttgtgtcacaggctgcacaaagactttcctcaaactaatattcagggatttctgtcctgcagggtggggaggtggcagctgcctgccctgccaaggatcttgctgtggacgaaatatctgggggttagggggacagttgtagcatctgctggcattcgggtgcctcccaggacctgggagctgactctacagagaggtctggtgccaagccaggcaccttcctgagttctcaggactcccacctctgccccaagggctttgggcagggacctaaaggggaaagagtcctggatccatctctagccaaatcacaccccagagccagaggcctggggacctccttgccttccccgtcccccacagcaaggtcaacactactacgccttagccacccgtcaccctgctgactgcgacttccctctgcagcacagggcaggcagccacctatgccccacaagacggaacccgggaggggagtagagggcaccagggaatgctgtgagggacttcagggtgggcaaatgcagaagggagccagtgtcgcccctaccccatcccacagccatttttctctcgggttctacccaccactgtgtcggatttttcttaaataaatggaagcggtcagactggaggtgggggcagcagctcccatgaacagagagta

SEQ ID NO: 21682 - DNA, 736 bp, Homo sapiens
  misc_feature 1..736: note = ENST00000577271
  source 1..736: mol_type = unassigned DNA; mol_type = unassigned DNA
gcctggctcctgtgagcccccgaccctctcatgacctctggacactggttcctggttgcagacctgaggcagagctgcgaagtcctgcctcccagcctgcctcacccttcaggcccctcttccagcagtgctgggatttctccctagctgggggtcttgggcaggggggtgtgctttcctggttctctcccaccccggtcccgctctgcctcaggtggtgtctccgctgacggaggctgtgctcggggagacgctgctgacggtgactgaggagaaggtcagcatcacacagcttcaggcccaggtggtggccagcctggccctctccctgcggcccagccctgggagcagccacaccatcctagccaccacagctgcccaacagaccttgagcttcctcaagcaggaagccctactgagcctctggctctcctacagtgatggcaccacagccccactctccctctacagcccacgagactatggactgctagtgagcagcctggatgagcatgtggccactgtgacccaggaccgggccttccctctggtagtggctgaggccgaggggtcaggggagctgcttcgcgcagagctaaccatcgctgagagctgccagaaaaccaaacgcaagagtgtgctcgccacgacccctgtgggcctgcgggtgcactttgggagggacgaggaggaccccacttatgactacccgggccccagccaaccagggcccggc

SEQ ID NO: 21683 - DNA, 575 bp, Homo sapiens
  misc_feature 1..575: note = ENST00000505049
  source 1..575: mol_type = unassigned DNA; mol_type = unassigned DNA
agtgacattccatgagacaagcagtcctgtggtgaggcccatgtcaagaaggcctgagatctcccaccatcagctacagccaatttgtcagtcacagatcctcaaaatgagcagcagatacactcagtctgtaggatcatttagcaactcggggaaggaggtcataggttagcttttcaagacacttcctgcatctctgacctgttgcacctctgttatcttggcacctctgttatcttagcagcaagcacctgcctcagctgacccttgagccataacccataagctcctgaaaagtacatcaagtctaaagtgaaccagctaactcattaagactggaatcatgagcaacaatggagcagacctaacctttggttacatctcctgttttgtagctatccttttgtttggctcaaattttgtgccacttaaaaaatttgatactggtgatggaatgtttctccagtgggttctttgtgctgccatatggttggttgccttggttgtcaatctgatattacattgtccaaagttttggccttttgcaatgcttgggggctgcatttgggcaacag

SEQ ID NO: 21684 - DNA, 764 bp, Homo sapiens
  misc_feature 1..764: note = ENST00000505189
  source 1..764: mol_type = unassigned DNA; mol_type = unassigned DNA
agtgacattccatgagacaagcagtcctgtggtgaggcccatgtcaagaaggcctgagatctcccaccatcagctacagccaatttgtcagtcacagatcctcaaaatgagcagcagatacactcagtctgtaggatcatttagcaactcggggaaggaggtcataggttagcttttcaagacacttcctgcatctctgacctgttgcacctctgttatcttggcacctctgttatcttagcagcaagcacctgcctcagctgacccttgagccataacccatagggcttattccaaagggccagtgtgcaaaatatgaatccaagatggcattgtggaaagacgctgtacctcctgtgataaaattactttggtggtgcttttttctcatgtatctcgggaaactaaaaatctgaattgtattcagtggccttttccaaatgaagctcctgaaaagtacatcaagtctaaagtgaaccagctaactcattaagactggaatcatgagcaacaatggagcagacctaacctttggttacatctcctgttttgtagctatccttttgtttggctcaaattttgtgccacttaaaaaatttgatactggtgatggaatgtttctccagtgggttctttgtgctgccatatggttggttgccttggttgtcaatctgatattacattgtccaaagttttggccttttgcaatgcttgggggctgcatttgggcaacagggaacattgctgttgtcccaattatcaaa

SEQ ID NO: 21685 - DNA, 546 bp, Homo sapiens
  misc_feature 1..546: note = ENST00000511038
  source 1..546: mol_type = unassigned DNA; mol_type = unassigned DNA
atgagacaagcagtcctgtggtgaggcccatgtcaagaaggcctgagatctcccaccatcagctacagccaatttgtcagtcactcatcatttctcattatacacagagatcctcaaaatgagcagcagatacactcagtctgtaggatcatttagcaactcggggaaggaggtcataggttagcttttcaagacacttcctgcatctctgacctgttgcacctctgttatcttggcacctctgttatcttagcagcaagcacctgcctcagctgacccttgagccataacccatagggcttattccaaagggccagtgtgcaaaatatgaatccaagatggcattgtggaaagacgctgtacctcctgtgataaaattactttggtggtgcttttttctcatgtatctcgggaaactaaaaatctgaattgtattcagtggccttttccaaatgaagctcctgaaaagtacatcaagtctaaagtgaaccagctaactcattaagactggaatcatgagcaacaatggagcagacctaacctttg

SEQ ID NO: 21686 - DNA, 1070 bp, Homo sapiens
  misc_feature 1..1070: note = ENST00000508243
  source 1..1070: mol_type = unassigned DNA; mol_type = unassigned DNA
ttttgagccacctgacaattcagtccagcacagcaactgaaggaaggcgttccccaacctgctgtcctatgaaggcctctaggtcaccggtgctaaagccctcctttctccaccctccttaagtggaggtaaacgtcccagcaggaagtcaaggctggattggcgctcttcgcgagcaccctgggaacgggagtctgggtcacgggtgctagagccctcccctctcctcccggccggtgtatgggaaattgtccccgcagaaagtaaaggctggccaggccgcccccagcacgtagagggaatgagtcaggctccggctccacactggcacgtagtgggcggatcgcgccggcgctgagtaggaaggagcttcagccgccagcccggaacgcagttagcttttcaagacacttcctgcatctctgacctgttgcacctctgttatcttggcacctctgttatcttagcagcaagcacctgcctcagctgacccttgagccataacccataagctcctgaaaagtacatcaagtctaaagtgaaccagctaactcattaagactggaatcatgagcaacaatggagcagacctaacctttggttacatctcctgttttgtagctatccttttgtttggctcaaattttgtgccacttaaaaaatttgatactggtgatggaatgtttctccagtgggttctttgtgctgccatatggttggttgccttggttgtcaatctgatattacattgtccaaagttttggccttttgcaatgcttgggggctgcatttgggcaacagggaacattgctgttgtcccaattatcaaaaccattggtttaggccttggaatcttaatctggggatcatttaatgccttaactggctgggcaagctcaaggtttggctggtttggattggatgcagaagaagtatcaaatccgctgctaaattacattggagctgggctatcagtagtaagtgctttcatatttttgttcatcaaaagtgaaataccaaataacacgtgttccatggataccactccattaataacagagcatgtgatc

SEQ ID NO: 21687 - DNA, 3442 bp, Homo sapiens
  misc_feature 1..3442: note = ENST00000296529
  source 1..3442: mol_type = unassigned DNA; mol_type = unassigned DNA
aacctgctgtcctatgaaggcctctaggtcaccggtgctaaagccctcctttctccaccctccttaagtggaggtaaacgtcccagcaggaagtcaaggctggattggcgctcttcgcgagcaccctgggaacgggagtctgggtcacgggtgctagagccctcccctctcctcccggccggtgtatgggaaattgtccccgcagaaagtaaaggctggccaggccgcccccagcacgtagagggaatgagtcaggctccggctccacactggcacgtagtgggcggatcgcgccggcgctgagtaggaaggagcttcagccgccagcccggaacgcatcataggttagcttttcaagacacttcctgcatctctgacctgttgcacctctgttatcttggcacctctgttatcttagcagcaagcacctgcctcagctgacccttgagccataacccataagctcctgaaaagtacatcaagtctaaagtgaaccagctaactcattaagactggaatcatgagcaacaatggagcagacctaacctttggttacatctcctgttttgtagctatccttttgtttggctcaaattttgtgccacttaaaaaatttgatactggtgatggaatgtttctccagtgggttctttgtgctgccatatggttggttgccttggttgtcaatctgatattacattgtccaaagttttggccttttgcaatgcttgggggctgcatttgggcaacagggaacattgctgttgtcccaattatcaaaaccattggtttaggccttggaatcttaatctggggatcatttaatgccttaactggctgggcaagctcaaggtttggctggtttggattggatgcagaagaagtatcaaatccgctgctaaattacattggagctgggctatcagtagtaagtgctttcatatttttgttcatcaaaagtgaaataccaaataacacgtgttccatggataccactccattaataacagagcatgtgatcaacacaacccaagacccctgttcctgggtggataaactttctacagtacaccaccgcatagtgggctgcagtcttgcagtgatatctggagtactctatggatctacatttgtgccaatcatctacatcaaggaccacagcaaaagaaatgatagtatatatgcaggggcaagccaatatgatttagactatgtgtttgcgcacttcagtggcatctttcttacaagtactgtctactttctggcctactgcatagccatgaaaaatagtcctaaactatatcctgaagcagtcctaccaggattcctgtcaggagtactttgggctatagctacctgctgttggttcatagcaaatcactctctgagtgctgtggtcagttttccaataatcactgctggtccaggatttatagctgcaatgtggggtatcttcatgtttaaggaaataaagggtctacaaaactacctattaatgatacttgcattttgcatcatcttgactggagccttatgcactgctttttctaaaatctaacaatgacaaaaccagcaggtggcagcagtagttaagagaacgcgtctatcggacagcggagagatcatgctgagaaaagagtgcattttcatatagcaaatggatctcagccactgttggagtgggtaaatgatttttttccccaaaaatgtgagaatgaaggaagattgagtttcattcaagtataaaaatgaaaatttcttctgatgaactgtttatgaaggtagtactttactgggtgactaaaatgtctacattattatagcattacatacgaggatgctctttttaccacagtatgtacctagtgttgcataatctagaacacagtatagagtccatatacaaagaagttacagtccatatttctcacctattaccccagtgaagtgaggcagaaataccttgggcgaggagggagagccttaccttctaatggaattagattccaaagatatttggatcctttgtttcataaagtaaatgcatagttggtaactaaatgttaaaaaggccattttattattgttagccaaaacttctgtttatttcaagttaatatcgcccaactctacatcatctacccattttagctcataatgcttttgattatcgccagataaagtccattctcagagaacaaaaatttttcatcattgagaaaatgtgcataacataatacatacatacacaagtatattcacgtacataaatacacacagatatgttgctaaagtgagattgtaggttatcagtaacaatttaaaggaaacaaccactcttttgaatgtacaacttttttttctgaaatacacttttctaaaaccctcttaactggaggtttcctgttttcttcttgttttaactggtggtttccagtaggcaaaataaaatgacaggcatgctagttttttttttttttttttttttttaagaaaactgaaattaagccaggcagggtggcgcactactataatcccagctgctggggcggctgaagtaggagggtcacttagcccaagagtgcaaatctgccagcctaggcaacatagcaaggtcccatctctaaaaaagaaatttaatttaaatttgtaagaaaaaagaaaactgaaacagaactgccagtacaatgtttgttgcaattgtttccaaaactttgagataacgaaacccctattcaaatgtaaattttacccattcccacctgatagtactgtttattactttgctatgcaggagaaacaaaacagctttttatttgtgtgtatactctgaagtcaatgtgcatgggttaaatcccacctctgcttcattttatttgtgtggctttggacaagttcctaagccctctgtgtcaggcccctcattaacaaaatggagtttatgatggcatctacctcacatggttattgtgtggttgaaattagttcaaatctgtaaagtatgttgatgagtatctggtacttggcaaacactatataattgttagctttattattatgtgttgtttgaaggggaaaaaagtttttgtagattggagaacaccatgtaagagctactaagctcaccaccttcccatccaaacaattattactcctctaaatgaatactacttaaaagtgatggagcttctgtttgtttattgaattgctaatacaaataaatatttgactataacttcttatactcattttaattttaacctgaaatgtcattaaattatgctgataaactttgaataaattgtgatacaaaagctatttttctcatttaaatatattttagaattttatattggataacttttaattattctttagttgggatttccaatttatatgcaaaattttaaatgtgaagtaaagcagtttcagaagaaaaatg

SEQ ID NO: 21688 - DNA, 731 bp, Homo sapiens
  misc_feature 1..731: note = ENST00000512481
  source 1..731: mol_type = unassigned DNA; mol_type = unassigned DNA
aaaggctggccaggccgcccccagcacgtagagggaatgagtcaggctccggctccacactggcacgtagtgggcggatcgcgccggcgctgagtaggaaggagcttcagccgccagcccggaacgcatcataggttagcttttcaagacacttcctgcatctctgacctgttgcacctctgttatcttggcacctctgttatcttagcagcaagcacctgcctcagctgacccttgagccataacccatagggcttattccaaagggccagtgtgcaaaatatgaatccaagatggcattgtggaaagacgctgtacctcctgtgataaaattactttggtggtgcttttttctcatgtatctcgggaaactaaaaatctgaattgtattcagtggccttttccaaatgaagctcctgaaaagtacatcaagtctaaagtgaaccagctaactcattaagactggaatcatgagcaacaatggagcagacctaacctttggttacatctcctgttttgtagctatccttttgtttggctcaaattttgtgccacttaaaaaatttgatactggtgatggaatgtttctccagtgggttctttgtgctgccatatggttggttgccttggttgtcaatctgatattacattgtccaaagttttggccttttgcaatgcttgggggctgcatttgggcaacagggaacattgctgttgtcccaattatcaaa

SEQ ID NO: 21689 - DNA, 576 bp, Homo sapiens
  misc_feature 1..576: note = ENST00000504569
  source 1..576: mol_type = unassigned DNA; mol_type = unassigned DNA
acgtagagggaatgagtcaggctccggctccacactggcacgtagtgggcggatcgcgccggcgctgagtaggaaggagcttcagccgccagcccggaacgcaaagctcctgaaaagtacatcaagtctaaagtgaaccagctaactcattaagactggaatcatgagcaacaatggagcagacctaacctttggttacatctcctgttttgtagctatccttttgtttggctcaaattttgtgccacttaaaaaatttgatactggtgatggaatgtttctccagtgggttctttgtgctgccatatggttggttgccttggttgtcaatctgatattacattgtccaaagttttggccttttgcaatgcttgggggctgcatttgggcaacagggaacattgctgttgtcccaattatcaaaaccattggtttaggccttggaatcttaatctggggatcatttaatgccttaactggctgggcaagctcaaggtttggctggtttggattggatgcagaagaagtatcaaatccgctgctaaattacattggagctgggctatcagtagtaag

SEQ ID NO: 21690 - DNA, 1633 bp, Homo sapiens
  misc_feature 1..1633: note = ENST00000509278
  source 1..1633: mol_type = unassigned DNA; mol_type = unassigned DNA
cgtagagggaatgagtcaggctccggctccacactggcacgtagtgggcggatcgcgccggcgctgagtaggaaggagcttcagccgccagcccggaacgcatcataggttagcttttcaagacacttcctgcatctctgacctgttgcacctctgttatcttggcacctctgttatcttagcagcaagcacctgcctcagctgacccttgagccataacccataagctcctgaaaagtacatcaagtctaaagtgaaccagctaactcattaagactggaatcatgagcaacaatggagcagacctaacctttggttacatctcctgttttgtagctatccttttgtttggctcaaattttgtgccacttaaaaaatttgatactggtgatggtaattatttttccttgattgttaacgttatattatttttaaaaatgaagttccttttttggtcttttaaaagtatagctacaaaaataaatcatgttgatcttgatacctagtgaatagagcttaaaattagtcatttgacagtgctcataccagtttgtctgaaagtcagaataggagaaccattaaggttgtttcatggtaaagttagggagggtacagtcaggaaatctcttgggccattatatgaatggaagaaatttatagtcagttctactataacacctgttttgaaaacatgaatcttcaacatgattgatatattagagaacaatgtaagcataacagatttttggcttgcttatgtgcaattttgtccctgagaaacctctagataggcacagaagactgcacctagatgaataaagatgtgtgataatacacataatgcacgcagacacacgtacaatcttcaaatatcgaccagctcccttagttcatcacatgtggttatgatgtattccacccaaccacatctcctgtcccaactcctcacccaataccttcacagtaactcgtaagctgcaaccctttggatgctcacttccaggagcaaacttctggtgtttttcaattaaaatgccctatttattacagcatcatgtaattaaccagttaaccagttaaaactgtactactattttaattaggttgagtgttgttctcctagccccattttcccattatgctctgtagtttttactgcatgattttgcatagtgcagtgatttcaaggaatgcacatgttacattatagcagaactgactaatgtgaattttggggaaggagaagcaagagttatttgtatttgcctgacttccatattaaagccaggagaaggaattgagatttatggtgaacacatgttgggaattacttccttggtagtatttatcacctgacagcagttgtgttatttccccaattctttgtcttcgtgcacttagaaaataggattacctcctattttcctccagggcctttcttctcttttcctctggagttaggacaagaatgggaactacccgaagaacaaaaaaatgggtagaggatctagcttttttagtcttccacaattagctttgtgatcctgggcaaatattaccagctctgctgttttcagtttctcatttgtaaagtgaacaacttataaaatgaagtttcttttcatctctgtga

SEQ ID NO: 21691 - DNA, 3699 bp, Homo sapiens
  misc_feature 1..3699: note = ENST00000514558
  source 1..3699: mol_type = unassigned DNA; mol_type = unassigned DNA
cgtagagggaatgagtcaggctccggctccacactggcacgtagtgggcggatcgcgccggcgctgagtaggaaggagcttcagccgccagcccggaacgcagtgagtacagccactcaaaggaaagccaagtcgctttgcaggggagcgtctcatgatttttcagaaacgtgctcatggttaaaaagaaaaatcaaggctcggaataaatacattcaagcactgttaattttagcccaaagacaggcggtacttgcctggagatttgggaaaatcaacatgaaactaaaaatgaaattttagttggagtggagcaagcagtattgatcagaacataccaaatacgaattttttcaaagtctgcgtagaagtttaaattactaggaaaaatgtaaaggagaagtatttactaataaatgaaacaaaagtaataaaataaaaatgaattaatatagtttgacaaaatatcagcgaacgctgaaaagaaaacattaaaataatgtttgagactttttaggttttgtgcaggaagaattgggaaaaatgtgctggatggagtgatactgcttttcttttccacaaaaatttcattattttagagagcggtagagcctttttaaagacagtaagttattgccaattcacaatgaaataagatcacatgctctgaaatgtacaagagctgcatgcaataaacttcatttatctataggtaataactgattgatgtttattcagtagtcgaaatgcacctcatgcactctaattagcacgtcaaattagtctctccgtttcagaggtgtagggcctttgtggagccttctcaataaaataatttgccactcttgaaggttagacattctcttctatcaatgtacacataaaggttttgttttgctttgcttgttgtgaattaaaatggggagaaaatgatgtgttagctatcacccagtcatgtgtctttttagtcataggttagcttttcaagacacttcctgcatctctgacctgttgcacctctgttatcttggcacctctgttatcttagcagcaagcacctgcctcagctgacccttgagccataacccatgtaagtcactgcagggctgaacctctctttgagcctaacagtagaataataattatttttattgaatagtgttaatgtgtcaatgttgaaatgtgcctcagtgtgtcttcctcaaccacatccctatagaggatgttttcttaatagcaatgtgtttttgttttaagaaagtccacacaatttcaaatacacattttctttactaaagtttattgaccagttttgaagtgatccttgttttcagttaaactatctttaataatggtaaataacatattttgtaggttgttgtatatttaatattctctgcaagaacacataaggaacaatacatggacctttaaatatttgtcattgtgaaataaaataacaaggaaaggtgatttcaggtgtactttattcaatacatatatacaagaagttattactataacattaaatttgcaggaaaaaagaaaccactggattattctgcttctattccagagggcttattccaaagggccagtgtgcaaaatatgaatccaagatggcattgtggaaagacgctgtacctcctgtgataaaattactttggtggtgcttttttctcatgtatctcgggaaactaaaaatctgaattgtattcagtggccttttccaaatgaagctcctgaaaagtacatcaagtctaaagtgaaccagctaactcattaagactggaatcatgagcaacaatggagcagacctaacctttggttacatctcctgttttgtagctatccttttgtttggctcaaattttgtgccacttaaaaaatttgatactggtgatggaatgtttctccagtgggttctttgtgctgccatatggttggttgccttggttgtcaatctgatattacattgtccaaagttttggccttttgcaatgcttgggggctgcatttgggcaacagggaacattgctgttgtcccaattatcaaaaccattggtttaggccttggaatcttaatctggggatcatttaatgccttaactggctgggcaagctcaaggtttggctggtttggattggatgcagaagaagtatcaaatccgctgctaaattacattggagctgggctatcagtagtaagtgctttcatatttttgttcatcaaaagtgaaataccaaataacacgtgttccatggataccactccattaataacagagcatgtgagtatagtatgagagacaacttgatttgaaacataaaattaagataaatggataatacataaattttaaacacagatgaaaaagtggtgtttgctcatcactcctggctatgtaaaatatcttagcttatttattatgggtaggtctatgtagcaatcaatcaatatttccgcagttgagcttctcagcaagcacacgggtttatttattttgattaacagatctctactaggtgatatatatataaccccatttttgtaatgatttaaagattcctacaatagaggaaccctaaatactgtagaggaatgtgaaaataactttagaaagtcagaggaaggaggttttgaagttggtccaggggagaatagaccataggaggccaagaaaggtaagtgaagtcctatgagaataggaactggtatcccattctacccgaagtgaaaaacagaaaatatgataggagtcactgttttgatcttgaagaatctaaatcagtctggaatagtaaatctgaatgaaacaggagcaacttttaaaagggacctgataaagcgcaagtgtcagtagctacatatacaaaagtgacttcagggcaaagcctcattgtcatgaacccaggctctaatccttctcatctcaagaaatctctcctgtctgccctgggccagtgctatccagctgccctctgaatccagcgctcctcacccccagtggggtattgccccttggcagggtgcttatttaccccttacttcaaaattaatcttttctcctttccttcttcccctatccaaacttttatcaactaaaaccttagttaaattgacactaaagttgaatagtaattagcttaagtgtaaagagaagaggtttattaatccacaggcatctctaatcagggaaatgtttcagggagaagggaggagttggctttgggaaagggttccttgcctgcttcagggatccagacacctcctgcccaaccatcctccaaaacaatggaacaaaataataaaataaatgcagcttggtaaaagatacacagtaggctaactgcctgagatttttctaggcaataagtttaaagatccataaacagcatgattgatgggtacagaaccatgcatcatgagctccttatgatgaaagaaaccgttattgccaaaggaaaacttgacttagcacatgacaaagaattcaaatctactttcttgtctcttacaaaaataataggattataacatcaagaacacttcagttggccaggcgtgatggctcatgcccgtaatcccagcactgtgggaggtcaaggtgggcagatcacctgagttcaggagttcaagaccagcctgtccaacatggtgaaactctatctctactaagaatacaaaaaaaaaaaaaa

SEQ ID NO: 21692 - DNA, 555 bp, Homo sapiens
  misc_feature 1..555: note = ENST00000513744
  source 1..555: mol_type = unassigned DNA; mol_type = unassigned DNA
gtagagggaatgagtcaggctccggctccacactggcacgtagtgggcggatcgcgccggcgctgagtaggaaggagcttcagccgccagcccggaacgcatcataggttagcttttcaagacacttcctgcatctctgacctgttgcacctctgttatcttggcacctctgttatcttagcagcaagcacctgcctcagctgacccttgagccataacccatgtaagtcactgcagggctgaacctctctttgagcctaacagtagaataataattatttttattgaatagtgttaatgtgtcaatgttgaaatgtgcctcagtgtgtcttcctcaaccacatccctatagaggatgttttcttaatagcaatgtgtttttgttttaagaaagtccacacaatttcaaatacacattttctttactaaagtttattgaccagttttgaagtgatccttgttttcagttaaactatctttaataatggtaaataacatattttgtaggttgttgtatatttaatattctctgcaagaacacataaggaacaatac

SEQ ID NO: 21693 - DNA, 303 bp, Homo sapiens
  misc_feature 1..303: note = ENST00000514346
  source 1..303: mol_type = unassigned DNA; mol_type = unassigned DNA
gtagagggaatgagtcaggctccggctccacactggcacgtagtgggcggatcgcgccggcgctgagtaggaaggagcttcagccgccagcccggaacgcacagcaagcacctgcctcagctgacccttgagccataacccatagggcttattccaaagggccagtgtgcaaaatatgaatccaagatggcattgtggaaagacgctgtacctcctgtgataaaattactttggtggtgcttttttctcatgtatctcgggaaactaaaaatctgaattgtattcagtggccttttccaaatg

SEQ ID NO: 21694 - DNA, 535 bp, Homo sapiens
  misc_feature 1..535: note = ENST00000503200
  source 1..535: mol_type = unassigned DNA; mol_type = unassigned DNA
gtagagggaatgagtcaggctccggctccacactggcacgtagtgggcggatcgcgccggcgctgagtaggaaggagcttcagccgccagcccggaacgcacagcaagcacctgcctcagctgacccttgagccataacccataagctcctgaaaagtacatcaagtctaaagtgaaccagctaactcattaagactggaatcatgagcaacaatggagcagacctaacctttggttacatctcctgttttgtagctatccttttgtttggctcaaattttgtgccacttaaaaaatttgatactggtgatggaatgtttctccagtgggttctttgtgctgccatatggttggttgccttggttgtcaatctgatattacattgtccaaagttttggccttttgcaatgcttgggggctgcatttgggcaacagggaacattgctgttgtcccaattatcaaaaccattggtttaggccttggaatcttaatctggggatcatttaatgccttaactggctgggcaagctcaag

SEQ ID NO: 21695 - DNA, 2861 bp, Homo sapiens
  misc_feature 1..2861: note = ENST00000511532
  source 1..2861: mol_type = unassigned DNA; mol_type = unassigned DNA
ggaaggagcttcagccgccagcccggaacgcatcataggttagcttttcaagacacttcctgcatctctgacctgttgcacctctgttatcttggcacctctgttatcttagcagcaagcacctgcctcagctgacccttgagccataacccataagctcctgaaaagtacatcaagtctaaagtgaaccagctaactcattaagactggaatcatgagcaacaatggagcagacctaacctttggttacatctcctgttttgtagctatccttttgtttggctcaaattttgtgccacttaaaaaatttgatactggtgatggaatgtttctccagtgggttctttgtgctgccatatggttggttgccttggttgtcaatctgatattacattgtccaaagttttggccttttgcaatgcttgggggctgcatttgggcaacagggaacattgctgttgtcccaattatcaaaaccattggtttaggccttggaatcttaatctggggatcatttaatgccttaactggctgggcaagctcaaggtttggctggtttggattggatgcagaagaagtatcaaatccgctgctaaattacattggagctgggctatcagtagtaagtgctttcatatttttgttcatcaaaagtgaaataccaaataacacgtgttccatggataccactccattaataacagagcatgggctgcagtcttgcagtgatatctggagtactctatggatctacatttgtgccaatcatctacatcaaggaccacagcaaaagaaatgatagtatatatgcaggggcaagccaatatgatttagactatgtgtttgcgcacttcagtggcatctttcttacaagtactgtctactttctggcctactgcatagccatgaaaaatagtcctaaactatatcctgaagcagtcctaccaggattcctgtcaggagtactttgggctatagctacctgctgttggttcatagcaaatcactctctgagtgctgtggtcagttttccaataatcactgctggtccaggatttatagctgcaatgtggggtatcttcatgtttaaggaaataaagggtctacaaaactacctattaatgatacttgcattttgcatcatcttgactggagccttatgcactgctttttctaaaatctaacaatgacaaaaccagcaggtggcagcagtagttaagagaacgcgtctatcggacagcggagagatcatgctgagaaaagagtgcattttcatatagcaaatggatctcagccactgttggagtgggtaaatgatttttttccccaaaaatgtgagaatgaaggaagattgagtttcattcaagtataaaaatgaaaatttcttctgatgaactgtttatgaaggtagtactttactgggtgactaaaatgtctacattattatagcattacatacgaggatgctctttttaccacagtatgtacctagtgttgcataatctagaacacagtatagagtccatatacaaagaagttacagtccatatttctcacctattaccccagtgaagtgaggcagaaataccttgggcgaggagggagagccttaccttctaatggaattagattccaaagatatttggatcctttgtttcataaagtaaatgcatagttggtaactaaatgttaaaaaggccattttattattgttagccaaaacttctgtttatttcaagttaatatcgcccaactctacatcatctacccattttagctcataatgcttttgattatcgccagataaagtccattctcagagaacaaaaatttttcatcattgagaaaatgtgcataacataatacatacatacacaagtatattcacgtacataaatacacacagatatgttgctaaagtgagattgtaggttatcagtaacaatttaaaggaaacaaccactcttttgaatgtacaacttttttttctgaaatacacttttctaaaaccctcttaactggaggtttcctgttttcttcttgttttaactggtggtttccagtaggcaaaataaaatgacaggcatgctagttttttttttttttttttttttttaagaaaactgaaattaagccaggcagggtggcgcactactataatcccagctgctggggcggctgaagtaggagggtcacttagcccaagagtgcaaatctgccagcctaggcaacatagcaaggtcccatctctaaaaaagaaatttaatttaaatttgtaagaaaaaagaaaactgaaacagaactgccagtacaatgtttgttgcaattgtttccaaaactttgagataacgaaacccctattcaaatgtaaattttacccattcccacctgatagtactgtttattactttgctatgcaggagaaacaaaacagctttttatttgtgtgtatactctgaagtcaatgtgcatgggttaaatcccacctctgcttcattttatttgtgtggctttggacaagttcctaagccctctgtgtcaggcccctcattaacaaaatggagtttatgatggcatctacctcacatggttattgtgtggttgaaattagttcaaatctgtaaagtatgttgatgagtatctggtacttggcaaacactatataattgttagctttattattatgtgttgtttgaaggggaaaaaagtttttgtagattggagaacaccatgtaagagctactaagctcaccaccttcccatccaaacaattattactcctctaaatgaatactacttaaaagtgatggagcttctgtttgtttattgaattgctaatacaaataaatatttgactataa

SEQ ID NO: 21696 - DNA, 642 bp, Homo sapiens
  misc_feature 1..642: note = ENST00000502698
  source 1..642: mol_type = unassigned DNA; mol_type = unassigned DNA
gtcgaaatgcacctcatgcactctaattagcacgtcaaattagtctctccgtttcagaggtgtagggcctttgtggagccttctcaataaaataatttgccactcttgaaggttagacattctcttctatcaatgtacacataaaggttttgttttgctttgcttgttgtgaattaaaatggggagaaaatgatgtgttagctatcacccagtcatgtgtctttttagtcataggttagcttttcaagacacttcctgcatctctgacctgttgcacctctgttatcttggcacctctgttatcttagcagcaagcacctgcctcagctgacccttgagccataacccataagctcctgaaaagtacatcaagtctaaagtgaaccagctaactcattaagactggaatcatgagcaacaatggagcagacctaacctttggttacatctcctgttttgtagctatccttttgtttggctcaaattttgtgccacttaaaaaatttgatactggtgatggaatgtttctccagtgggttctttgtgctgccatatggttggttgccttggttgtcaatctgatattacattgtccaaagttttggccttttgcaatgcttgggggctgcatttgggcaacag

SEQ ID NO: 21697 - DNA, 525 bp, Homo sapiens
  misc_feature 1..525: note = ENST00000514971
  source 1..525: mol_type = unassigned DNA; mol_type = unassigned DNA
agtctctccgtttcagaggtgtagggcctttgtggagccttctcaataaaataatttgccactcttgaagtcataggttagcttttcaagacacttcctgcatctctgacctgttgcacctctgttatcttggcacctctgttatcttagcagcaagcacctgcctcagctgacccttgagccataacccataagctcctgaaaagtacatcaagtctaaagtgaaccagctaactcattaagactggaatcatgagcaacaatggagcagacctaacctttggttacatctcctgttttgtagctatccttttgtttggctcaaattttgtgccacttaaaaaatttgatactggtgatggaatgtttctccagtgggttctttgtgctgccatatggttggttgccttggttgtcaatctgatattacattgtccaaagttttggccttttgcaatgcttgggggctgcatttgggcaacagggaacattgctgttgtcccaattatcaaaaccattggttta

SEQ ID NO: 21698 - DNA, 4872 bp, Homo sapiens
  misc_feature 1..4872: note = ENST00000503404
  source 1..4872: mol_type = unassigned DNA; mol_type = unassigned DNA
gataatacataaattttaaacacagatgaaaaagtggtgtttgctcatcactcctggctatgtaaaatatcttagcttatttattatgggtaggtctatgtagcaatcaatcaatatttccgcagttgagcttctcagcaagcacacgggtttatttattttgattaacagatctctactaggtgatatatatataaccccatttttgtaatgatttaaagattcctacaatagaggaaccctaaatactgtagaggaatgtgaaaataactttagaaagtcagaggaaggaggttttgaagttggtccaggggagaatagaccataggaggccaagaaaggtaagtgaagtcctatgagaataggaactggtatcccattctacccgaagtgaaaaacagaaaatatgataggagtcactgttttgatcttgaagaatctaaatcagtctggaatagtaaatctgaatgaaacaggagcaacttttaaaagggacctgataaagcgcaagtgtcagtagctacatatacaaaagtgacttcagggcaaagcctcattgtcatgaacccaggctctaatccttctcatctcaagaaatctctcctgtctgccctgggccagtgctatccagctgccctctgaatccagcgctcctcacccccagtggggtattgccccttggcagggtgcttatttaccccttacttcaaaattaatcttttctcctttccttcttcccctatccaaacttttatcaactaaaaccttagttaaattgacactaaagttgaatagtaattagcttaagtgtaaagagaagaggtttattaatccacaggcatctctaatcagggaaatgtttcagggagaagggaggagttggctttgggaaagggttccttgcctgcttcagggatccagacacctcctgcccaaccatcctccaaaacaatggaacaaaataataaaataaatgcagcttggtaaaagatacacagtaggctaactgcctgagatttttctaggcaataagtttaaagatccataaacagcatgattgatgggtacagaaccatgcatcatgagctccttatgatgaaagaaaccgttattgccaaaggaaaacttgacttagcacatgacaaagaattcaaatctactttcttgtctcttacaaaaataataggattataacatcaagaacacttcagttggccaggcgtgatggctcatgcccgtaatcccagcactgtgggaggtcaaggtgggcagatcacctgagttcaggagttcaagaccagcctgtccaacatggtgaaactctatctctactaagaatacaaaaaaaaaaaaaatgagctgggtgtggtggcacacacctgtaatcccagctacttgggaggctgaggcaggagaatcacttgaacctgggaggaggaggttgcagtgaatcaagatcacaccactgcactccagcctggacaacaagaatgaaactccatctcaaaaaaaaaaaaccaaaaaaacacttcggctatagtattataatataccccccttatccacagggaatatgttccaagacacccaaggaatgcctgaaaccacagatagtaccaaacctatatatagtatgtctttgtatctgatcactaagacagctactaagtgactcgggggcaggcagtgtatacgatatgaataggctggacatagggatcattcacgttccaggtgagatggagaaggacgatgcagggtttcatcacactattcagaacagtgtgaaattgaaaacttatgaattattcatttccagaatttttcatttaatgtctttggactactgttgacagtgagtaactgaaaccacagaaagtgaaagtacagataagggaggggtactgtaattccatagtagaaatatgaatttgctcataatttttcctggcttagaatatcagcctaatattgaaacatggcttggaatgttttattaactaatttagtaaaaaaaacaaatcagtataagaaatgctcattgatcttaagcattccataggaggagagtctaatttccttacagattatgcagaccattaaaatatgcaaatgaaacatgagataataagttttattagtttttataggtgtatcacaatagccacatattaaatgtgagaatttgaaatggaagacttgccaactgccaagtcatcctaaatgaaagaggaaacaattagaaacagttgagtttagagatatcagaatgcataggtgacatgtttattatattttaaagcatgtttgaaagagaagagaaaagcactagaaatattgtcaccagtgtgattatcaattgaatgttcttttgttttaatttgggccaatgttttcaataggtgatcaacacaacccaagacccctgttcctgggtggataaactttctacagtacaccaccgcatagtgtaaggagaggttacttctttgctctattactctgtttcatatttggttaaagcagggattaccagcatgaagtaatgttcatctgagttcaagaagaaaattgtaatgcaagctttgacttctatctccatgcggcgaggtttttttgtccccagctgaattttaggggctgcagtcttgcagtgatatctggagtactctatggatctacatttgtgccaatcatctacatcaaggaccacagcaaaagaaatgatagtatatatgcaggggcaagccaatatgatttagactatgtgtttgcgcacttcagtggcatctttcttacaagtactgtctactttctggcctactgcatagccatgaaaaatagtcctaaactatatcctgaagcagtcctaccaggattcctgtcaggagtactttgggctatagctacctgctgttggttcatagcaaatcactctctgagtgctgtggtcagttttccaataatcactgctggtccaggatttatagctgcaatgtggggtatcttcatgtttaaggaaataaagggtctacaaaactacctattaatgatacttgcattttgcatcatcttgactggagccttatgcactgctttttctaaaatctaacaatgacaaaaccagcaggtggcagcagtagttaagagaacgcgtctatcggacagcggagagatcatgctgagaaaagagtgcattttcatatagcaaatggatctcagccactgttggagtgggtaaatgatttttttccccaaaaatgtgagaatgaaggaagattgagtttcattcaagtataaaaatgaaaatttcttctgatgaactgtttatgaaggtagtactttactgggtgactaaaatgtctacattattatagcattacatacgaggatgctctttttaccacagtatgtacctagtgttgcataatctagaacacagtatagagtccatatacaaagaagttacagtccatatttctcacctattaccccagtgaagtgaggcagaaataccttgggcgaggagggagagccttaccttctaatggaattagattccaaagatatttggatcctttgtttcataaagtaaatgcatagttggtaactaaatgttaaaaaggccattttattattgttagccaaaacttctgtttatttcaagttaatatcgcccaactctacatcatctacccattttagctcataatgcttttgattatcgccagataaagtccattctcagagaacaaaaatttttcatcattgagaaaatgtgcataacataatacatacatacacaagtatattcacgtacataaatacacacagatatgttgctaaagtgagattgtaggttatcagtaacaatttaaaggaaacaaccactcttttgaatgtacaacttttttttctgaaatacacttttctaaaaccctcttaactggaggtttcctgttttcttcttgttttaactggtggtttccagtaggcaaaataaaatgacaggcatgctagttttttttttttttttttttttttaagaaaactgaaattaagccaggcagggtggcgcactactataatcccagctgctggggcggctgaagtaggagggtcacttagcccaagagtgcaaatctgccagcctaggcaacatagcaaggtcccatctctaaaaaagaaatttaatttaaatttgtaagaaaaaagaaaactgaaacagaactgccagtacaatgtttgttgcaattgtttccaaaactttgagataacgaaacccctattcaaatgtaaattttacccattcccacctgatagtactgtttattactttgctatgcaggagaaacaaaacagctttttatttgtgtgtatactctgaagtcaatgtgcatgggttaaatcccacctctgcttcattttatttgtgtggctttggacaagttcctaagccctctgtgtcaggcccctcattaacaaaatggagtttatgatggcatctacctcacatggttattgtgtggttgaaattagttcaaatctgtaaagtatgttgatgagtatctggtacttggcaaacactatataattgttagctttattattatgtgttgtttgaaggggaaaaaagtttttgtagattggagaacaccatgtaagagctactaagctcaccaccttcccatccaaacaattattactcctctaaatgaatactacttaaaagtgatggagcttctgtttgtttattgaattgctaatacaaataaatatttgactataacttcttatactcattttaattttaacctgaaatgtcattaaattatgctgataaactttgaataaattgtgatacaaaagcta

SEQ ID NO: 21699 - DNA, 558 bp, Homo sapiens
  misc_feature 1..558: note = ENST00000512272
  source 1..558: mol_type = unassigned DNA; mol_type = unassigned DNA
tagtcctgatgccactttaatactgcagggtatttctgtgacttccgccagtcacagagcttgagataaatggatggtttttgcttgtttgtgatttgccttttgaagcatgtttatgattccatttgtgcgtttgtcagaaatactgctttgagccaagattaatagtgatttatttgttttgtaaggggctgcagtcttgcagtgatatctggagtactctatggatctacatttgtgccaatcatctacatcaaggaccacagcaaaagaaatgatagtatatatgcaggggcaagccaatatgatttagactatgtgtttgcgcacttcagtggcatctttcttacaagtactgtctactttctggcctactgcatagccatgaaaaatagtcctaaactatatcctgaagcagtcctaccaggattcctgtcaggagtactttgggctatagctacctgctgttggttcatagcaaatcactctctgagtgctgtggtcagttttccaataatcactgctggtccaggatttatagctgcaatgtggggtatc

SEQ ID NO: 21700 - DNA, 3296 bp, Homo sapiens
  misc_feature 1..3296: note = ENST00000515780
  source 1..3296: mol_type = unassigned DNA; mol_type = unassigned DNA
ttgtgcaaaaaccctaggtgtgcggacgaaagagagccaggcagaaggttacaacaggtcaggaataaataaccaccaggcggaggatccaagattctgtccttccttttgttggatgaggagcgccaggcaaacgcgtccacaaaggcttcggaaggaagcggctcgcccgcccacacccggctcctgccccggtggtacaggcatggatgggaagaaatgcagcgtatggatgttcctacctcttgtatttactttgtttacttcagctggattgtggatagtatacttcatagctgtggaagatgacaaaattttaccattaaattcagctgaaaggaaacctggtgtgaagcatgcaccatatataagcattgcaggtgatgatcctcctgcaagctgtgtgtttagtcaagttatgaacatggcagccttcctagcccttgtggtagctgttctgcgcttcatacaactgaaaccgaaggttttaaacccgtggctgaatattagtggattggtggctctgtgtctggcttccttcggaatgaccttacttggtaattttcagctcacaaatgatgaagaaatccataacgtcggaacttccttgacctttggatttggcacattgacctgctggatccaggctgcgctgacactcaaggtcaacatcaagaatgaaggacggagagttggaattccacgggttattctgtcggcatctatcactctctgtgtggtcctctacttcatcctcatggcccaaagcatccacatgtatgcagccagggtccagtggggcctggtcatgtgcttcctgtcttattttggcacctttgccgtggagttccggcattaccgctatgagattgtttgctctgagtaccaggagaatttcctaagcttctcagaaagcctgtcagaagcttctgaatatcagactgaccaggtgtaaaccatcagtttttccttgctggtgaggtgggtgtgacagtgggggaggggccagtaggacacactcacaggacttgacatagaacctcatttcacacacacacacacacacacattcatggccacatttgccaaatgagcttttcagggcgagttatttctttaatgaaaaagcacaagcccttatgtgtcgaaatacacgctgttacactgaaaatatatgcacgacagagcaagaagcttgtgcatgatcacttcttatccgtccccttcccagcactccctcctcttcccattctctccacatgtctcaagcaccctaccgagtagggcaggccaaatgttccttgggagtaatgccaactcccgacgttgccttcaggtccaaagggcttggaaccagctcgtgaggaagttctgaatctggcactaatattcttgagtggataatagtgtatcatagaataggacggaaattgtattgagatgtgaccctgtgtcgcctgtggaaaggcatagtgagaagaactttcccacgaaagcccccttcatcgttgttcagtggtcggctgtgtggatcccaggagagacatatgccacagactgtgagagcaaagcccgccgctgtgatctggacttgatgcactgtgactgagaatgatttccaaatgtgaatatgtgtagggacgtggtctatcaggcctggaacaagatgggggcagtgaaggtatggtttagtgtttgctttcatagtatgccatgtacaatgttttatatttcatagtttcttttaagtaactaccatgagtctctctaagcctcatggacaaagatgtagaccaaatgcaagagctgagcttgctttgggttcaaccatgatcaaagaaaaactgaggtcacctgcaggcttacgtgggaagctaagaaaatatcacagaaaaatggaaagaaatatggatgtgcagaggtaataaaaagagctgctgctggacatttatcaaagataggcaccttacagtatcttgttgcaagtccaaatcaggggagactttgttaatatgtatcttttgctcaaatttagtagggttttttttttttttggattaagggcttttcaaatttggaatttgtagaagccaattaaaagaatacccttcctaaaaaccaaattgacacagctggcccccctgctagccaacccgcagttcccagttcccacctgctgagagttcagaactcagaccgtaggtgtgggcttatgagactgtgcttcatgaagaaaagcagaattccaaattcaaactgttggagtgagccaagtggacagaccctccatgagtgcactttcttccaagaaatccccagatttaccccatagaggtctgggattacctggaatataatatgaaaaacattttttaggctgggtgtggggctcacacctgtaatcccagcactttgggaggctgaggcgggcggatcacctgaggttgggagctcgagaccagcctgaccaatgtgaagaaaccccgtctctactaaaaaaaatacaaaattagcctggtgtggtggcgcatgcctgtaatcccggctactcaggaggcggaggcaggagaatcacttgaacccgggaggcaggttgcggtgagacgagatcacgccattgcactccagcctgggcaaaaagagctaaaaactccatctcaaaaaaaaaagaaaaaaagaaaaacgttttttaattcaacccaaagtctgaatttcttgaggaaaaggtcaatgtcttttcatctctgtattgttccccacctcttaacacagtgcctggcacatactaggtgctcaataaatgtctgttgaatagaattattaataatttaagagtaggaaaaaggagtgtcagagagagactcaaagatgagtgagagagcatggaagatggctgtttcatgtgagacaggaatggaagaagttatgaatagggatcagatgggggagtgagaatccctgtaagtaaaatgtgaggaaaagaacaagctgagaacaagattctcctgtcaaaaaggcgtcttactgtaaatagtccaaggtgacatttgttagttttgaatactgcttttgggtttctttttttcatttttatattttaaaatttttatcaaagaacaaagacttatgtagttttcttttattctacacaatccaaattaaacagcttttggtgatgcaattgtacactttcttaagaatatatctaataccacattttagcagaaccaagcaatgactgacattattcattgggatctggccactaaataaaattcttttatgcataattgtta

SEQ ID NO: 21701 - DNA, 1990 bp, Homo sapiens
  misc_feature 1..1990: note = ENST00000449862
  source 1..1990: mol_type = unassigned DNA; mol_type = unassigned DNA
aaaggcttcggaaggaagcggctcgcccgcccacacccggctcctgccccgggtgactattaggggccccgggggggtggcagaagcccgagacccaggggatcaactctccccgaaggcctagcagcggggaccccagaataagtcgggggcgggccccggcgcggcaggagggggccgggcgggcgggtgagcagatcccaccccttcctgaaggaagcgccctacccgccgctactgctgccgccgccgccaccgcagcaggtcacagcccctcgaggcgacagcggccccgccgcaccagagcagtggtacaggcatggatgggaagaaatgcagcgtatggatgttcctacctcttgtatttactttgtttacttcagctggattgtggatagtatacttcatagctgtggaagatgacaaaattttaccattaaattcagctgaaaggaaacctggtgtgaagcatgcaccatatataagcattgcaggtgatgatcctcctgcaagctgtgtgtttagtcaagttatgaacatggcagccttcctagcccttgtggtagctgttctgcgcttcatacaactgaaaccgaaggttttaaacccgtggctgaatattagtggattggtggctctgtgtctggcttccttcggaatgaccttacttggtaattttcagctcacaaatgatgaagaaatccataacgtcggaacttccttgacctttggatttggcacattgacctgctggatccaggctgcgctgacactcaaggtcaacatcaagaatgaaggacggagagttggaattccacgggttattctgtcggcatctatcactctctgtgtggtcctctacttcatcctcatggcccaaagcatccacatgtatgcagccagggtccagtggggcctggtcatgtgcttcctgtcttattttggcacctttgccgtggagttccggcattaccgctatgagattgtttgctctgagtaccaggagaatttcctaagcttctcagaaagcctgtcagaagcttctgaatatcagactgaccaggtgtaaaccatcagtttttccttgctggtgaggtgggtgtgacagtgggggaggggccagtaggacacactcacaggacttgacatagaacctcatttcacacacacacacacacacacattcatggccacatttgccaaatgagcttttcagggcgagttatttctttaatgaaaaagcacaagcccttatgtgtcgaaatacacgctgttacactgaaaatatatgcacgacagagcaagaagcttgtgcatgatcacttcttatccgtccccttcccagcactccctcctcttcccattctctccacatgtctcaagcaccctaccgagtagggcaggccaaatgttccttgggagtaatgccaactcccgacgttgccttcaggtccaaagggcttggaaccagctcgtgaggaagttctgaatctggcactaatattcttgagtggataatagtgtatcatagaataggacggaaattgtattgagatgtgaccctgtgtcgcctgtggaaaggcatagtgagaagaactttcccacgaaagcccccttcatcgttgttcagtggtcggctgtgtggatcccaggagagacatatgccacagactgtgagagcaaagcccgccgctgtgatctggacttgatgcactgtgactgagaatgatttccaaatgtgaatatgtgtagggacgtggtctatcaggcctggaacaagatgggggcagtgaaggtatggtttagtgtttgctttcatagtatgccatgtacaatgttttatatttcatagtttcttttaagtaactaccatgagtctctctaagcctcatggacaaagatgtagaccaaatgcaagagctgagcttgctttgggttcaaccatgatcaaagaaaaactgaggtcacctgcaggcttacgtgggaagct

SEQ ID NO: 21702 - DNA, 566 bp, Homo sapiens
  misc_feature 1..566: note = ENST00000508701
  source 1..566: mol_type = unassigned DNA; mol_type = unassigned DNA
agcaggtcacagcccctcgaggcgacagcggccccgccgcaccagagcagtggtacaggcatggatgggaagaaatgcagcgtatggatgttcctacctcttgtatttactttgtttacttcagctggattgtggatagtatacttcatagctgtggaagatgacaaaattttaccattaaattcagctgaaaggaaacctggtgtgaagcatgcaccatatataagcattgcaggtgatgatcctcctgcaagctgtgtgtttagtcaagttatgaacatggcagccttcctagcccttgtggtagctgttctgcgcttcatacaactgaaaccgaaggttttaaacccgtggctgaatattagtggattggtggctctgtgtctggcttccttcggaatgaccttacttgctcacaaatgatgaagaaatccataacgtcggaacttccttgacctttggatttggcacattgacctgctggatccaggctgcgctgacactcaaggtcaacatcaagaatgaaggacggagagttggaattccacgggttattctgtcggcat

SEQ ID NO: 21703 - DNA, 403 bp, Homo sapiens
  misc_feature 1..403: note = ENST00000454948
  source 1..403: mol_type = unassigned DNA; mol_type = unassigned DNA
actgctgccgccgccgccaccgcagcaggtcacagcccctcgaggcgacagcggccccgccgcaccagagcagagtctcactctgtcacccaggctggagtgaagtggagcgatctcggctcactgcaacctccgcctcctgggctcaagcgattctcctgccttagcctcctgcatagctgggactacagtggtacaggcatggatgggaagaaatgcagcgtatggatgttcctacctcttgtatttactttgtttacttcagctggattgtggatagtatacttcatagctgtggaagatgacaaaattttaccattaaattcagctgaaaggaaacctggtgtgaagcatgcaccatatataagcattgcaggtgatgatcctcctgcaagctgtgtgt

SEQ ID NO: 21704 - DNA, 1892 bp, Homo sapiens
  misc_feature 1..1892: note = ENST00000281924
  source 1..1892: mol_type = unassigned DNA; mol_type = unassigned DNA
gcacttctgactcgagtccccgccgcgcttgtcgtcgccgccgccgggatccgcagccccgcgccatggagccggccgcgggcatccagcgccgcagctcccaggggcccaccgtcccgccgccgccccggggccacgcgccaccggctgccgcccccggcccggccccgctgagctccccggtgcgcgagccgccccagctggaggaggagcggcaggtgcggatcagcgagagcggccagttcagcgacgggctggaggaccgaggcttactagaaagcagcacccgcctgaaacctcacgaagcccagaactacaggaagaaggcattgtgggtgtcctggttctccatcattgtcaccctggccctcgcggtggctgcctttactgtctccgttatgaggtacagcgcctctgcttttgggtttgcatttgatgccatcctggacgtcctgtcatcggcgattgtcctgtggcgttacagcaacgcggccgctgtgcactctgcccatagggagtacatagcctgtgtcatcttgggggtgatattccttctgtcatccatatgtatagtggtcaaagccatccatgacctctcaactaggctgctcccagaagtggacgatttcctgttcagtgtctccattttaagtgggattctttgcagcatcctggccgtgttgaagttcatgctggggaaggttctgaccagtagagcactcataacagatgggtttaactccctcgtgggtggcgtgatgggcttctccattcttctgagcgcggaagtgttcaagcatgactcggcggtctggtacctggacggcagcataggcgttctgatcggcctcaccatatttgcctatggggtcaaactcctcatcgacatggtgccgagggtgaggcagacacgtcactacgagatgtttgagtgaagggggccagcatccgcatgagaccatcgagatgaggagtttccacataggcaaagggtgccaatatttaactgaacatctggtttctttttggaagttttctttcacatggtttgtcattacaagacaaggtctgcccagccaggtggatctaccttgcccccatcacctgccgcccccatcaaacatgttgggacaatgcccataggaatggacctccttccccgtctccagctgggactggcgttttttagtctctggagtatgatggttctcatgggtaggatgagatctttggcagaaaggtcttcggtggtgctctgagcctgcgctgcataggactgagcagacccacctcctccagcttgggtggccctgccactcctggttccaagtctctcctttcctggcaggtcttaagggaagattgtacccctcaccctttacatacccagaatcatcagtatgtcacttcctaatttctatcagtgtatctcattatttcatactgttttactaatcctaagtctaaacagatttgctcaaaaggagaccattctattttttaaagtacttagtgatacacgtataagctttgcatggacgaattaaataagcacattgaccttttcttgtacattcagaacctgaacatccatgtgaaaactgggtccatttttgagagatgtgaaactacagtttatttgtaataaataaatataatctatccgtatatgcatatatctatatgctgtgttaagtggtaatgggtacattacagtctgtgagagatggatcgctccctctgtaaggaacaagacgttctcagctgatgtcacggtaggtttagattctgtagagtgttccccaacccgcaccgttctgtacctctcacaccactgcttgcccgggcagtagtggctgaccaataaagacctttacctgttttgtatggca

SEQ ID NO: 21705 - DNA, 2260 bp, Homo sapiens
  misc_feature 1..2260: note = ENST00000467316
  source 1..2260: mol_type = unassigned DNA; mol_type = unassigned DNA
tcatcttccattcctgtgagcggccattgcatccctgccttggatcctgagtagatttgctcaggtcatccctgcctggcaatcttcctctgccccaggggaagccaggcctggcgtgggaggttacgggcctgcacaaacctaccagcagggcctccttgggcagcgtggacctggagcttctcttggggccaccagtgtgttggggcaggggaggagctggtgtccttcgcggggagaccctagaagctaccttaagccattcccttcccttcccatgtggcctttgacagctctggtaaagtagaagtatcacatgtaagctgggagccccagtgggctgctgtgtgaaaggagatggcagtcactatctagtagctccagttctgtttttatggccatttctccaaccatgtagccaatactttgcaaaaaacttagcataatagactttacatttctcttctggagggaaaggaaaaaacctcaggttacttagaggagactcgggagggaaaggatgcaggttgggatagaatgcccttctcaatctggataacctccatcaatgtatttaacctcattcttagttttctcatcggaaagcagggatgatgatgataatgtgacgtcacacgattgagaaaggttataggtaaccacacgtcctgaacacccaactcggaatctggcccagcagacactcagatatgagtccccaagtatttgaatgtctactgtgagcctggaactgtcctggggactgtggactcaacagaaaaccacacccctgcctctaggaggtttgcgttctagcgggcacgggcgagaccagctataaaccacatatggcgtcagttcccagaagagaaataaagcaggtacagaatgatggtgggggtgacggctctattctgggaggtatctggtgacatttgagcagagacttgatgggcccaggtggtggctatcactcgtgagagctttgggcatcattcctcccagcacatgctccagttacgtggaggcaggactggcatttgggtgattttcttggattgcttggcactgccatctagcctctctccacttcctttgcagggtttaactccctcgtgggtggcgtgatgggcttctccattcttctgagcgcggaagtgttcaagcatgactcggcggtctggtacctggacggcagcataggcgttctgatcggcctcaccatatttgcctatggggtcaaactcctcatcgacatggtgccgagggtgaggcagacacgtcactacgagatgtttgagtgaagggggccagcatccgcatgagaccatcgagatgaggagtttccacataggcaaagggtgccaatatttaactgaacatctggtttctttttggaagttttctttcacatggtttgtcattacaagacaaggtctgcccagccaggtggatctaccttgcccccatcacctgccgcccccatcaaacatgttgggacaatgcccataggaatggacctccttccccgtctccagctgggactggcgttttttagtctctggagtatgatggttctcatgggtaggatgagatctttggcagaaaggtcttcggtggtgctctgagcctgcgctgcataggactgagcagacccacctcctccagcttgggtggccctgccactcctggttccaagtctctcctttcctggcaggtcttaagggaagattgtacccctcaccctttacatacccagaatcatcagtatgtcacttcctaatttctatcagtgtatctcattatttcatactgttttactaatcctaagtctaaacagatttgctcaaaaggagaccattctattttttaaagtacttagtgatacacgtataagctttgcatggacgaattaaataagcacattgaccttttcttgtacattcagaacctgaacatccatgtgaaaactgggtccatttttgagagatgtgaaactacagtttatttgtaataaataaatataatctatccgtatatgcatatatctatatgctgtgttaagtggtaatgggtacattacagtctgtgagagatggatcgctccctctgtaaggaacaagacgttctcagctgatgtcacggtaggtttagattctgtagagtgttccccaacccgcaccgttctgtacctctcacaccactgcttgcccgggcagtagtggctgaccaataaagacctttacctgttttgtatggc

SEQ ID NO: 21706 - DNA, 5078 bp, Homo sapiens
  misc_feature 1..5078: note = ENST00000476823
  source 1..5078: mol_type = unassigned DNA; mol_type = unassigned DNA
aacccctctaagtgatgcagaataggggtttgtggcaggggtgcgactttccacatggtggttgctggtgccgacgtcctggtaaagcggttgcctctgagtgtggtgttggtctgaagtcagcagccgtgcagtcaggaaagaaggctgggcaaagagaaaggcgcaaggacaaactggcgcccatgaagatggcctggacctgtacgtgaccctcactgtctcagcctccatgacattgggcatcctgcagaagaagctggcgcctttgccacagagctatatgcacgcctggcttatgactcagcgaagctggagcggggagatgcagcaggagcggagaatccatgggctcggtgcggcccctctctcccctgggcgagcccgtggagccacagaatgcagaatgtgcctggctgagctgcggcagcaccggagccgcttcacctccacctttcactcatgcagatgtctctgggagtcagcttcaactgggaaccacgtaggaaggaaattctgggcaacgtagttccagttgagctctgtgcacgcagtatatgcagccaccgtgagggagtctgttatttttttccactttataggtaggacagtggagggagggaggggttaagtgacctgcccagagtcacctagctagtaagtgggactcccgcttcagtgcttttgaagctgccacccagtgcttctactttttcgctccaggaagcccacccgagtcctccaggagctggacctcggggccctccggtccatcgagagctcccccgagatgaagcctcccaggtacaggaaacttcccgcacagcccctggataggccgcggtggagctcagtcctggtctcttggaagttgaagtttctttatgtttcaccatgcatacttatttctcggtgacaagcttcctgtgtctctcttacgagaatgctgaccaggcttgtctggggctcaccgtgagcacccgatgcggctggcaggtggaggacgtttgtgtgtggatcatgtgtttgggccccttcacaacaactcgtaccttttactgccagctgctgccaggggctgtaggcatcccactgccgcttacagagatccaagtgtttgtttcccagtaagccatggagtttagagttgagcaaaggcctgcctggcacacgactgccactgggtcggccgagccctgggtctgcagctccctttaggagctggaggaagggccaccaaagccatgggtggcgtttcttgagctgcatctcagggtggggcagcacaccccaggccctgtgccctaggggcctagatggggtaagcacagattttctctaccgctggaaacttagggaggagggctttgcaaacagcgactgaatggagccaaaggggattcaggcatcatgggataagcaaagtgagtattcagtctccaaatctgagacctcaaagttcttgaatttcctgactgcctcagtctcccagcctatgcttcctgagtcctgttagcacctggggctgttgacatgcaattctttggtcatgtgtcttagtcagttctagctgttataacaaaacaccacagactgggtggcttataaaccacagacacttccatctcacagttctggaggctgggagtccaagacaaggtgccagcagattcagtgcctggtggggccccttttcctggttcatgagatggtggcttcttcctgtgtcctcacatgcggagggggcaagctggcactatgggacctcttttataagggcactcattccattagtgagggctctgtccttgcagcctaatcacctcccagaggccccacctcctcataccgtcaccctggcaattaggtttccatgtgtgaattttggagggacacatactcagattgtagcatcatgttcaccttattttctgtgggtgctgtctcctggacttaggctgagtcctgcacaaagagagcttccatgtggggctcctgaccccctcccactgtgtcccctgctgtgtaacctctgcataggagggactgaagagttgtcaagaggcctggtttgggacggtccttactggtcatttgaggaggtaaaacttccgtgaggtgattactttaaataagcttttaaatgtgaaataattttagattaatagaagagttttacagatagtacagagagtgcccatatcccctccatccagcctgacctactgttaacatcgcacacagccacggcaaattaatctctaccatgagatgacagcactattcacgaaaccctagactttcttctcatgtccccggttttcccactgatgacctttttgtgttccaggatccagtctggatgccatgctgcatttacttgtcacatctccttaagtctccagtgtgtgacagtctctcggtcgttcctcatgtttcatgaccttgacacgtgaggagtcgggtattttgtagacggtccctccgtttgggtttgtttgatgttgtttcgcagttaaaatgaggttatggatttggggatggaacaccgtggaggtaaagtgcccttcttgtcacatcgtatcaggggccacatgttaccaacacaacttaataatggtgatgtgaaccttgatcacttggctaaggtggtgtctgcttggtttctccattggtaagctactgtttttccctttctctactctgtgttagatttgagtctgttaagtccagcccaaactcaagggcaggggatggggtggggagattaatctccaactcttggaggatggagtagcaaagaatttgtgaacataggttgccaaaaccaccaccgtcattgacccatgttttcggagagatgctttgaccctatacagataccctgtttccagtgaagttgcttttcaaatggctttgttcagttttgaacatgatgcaggctgtctccctcttcccaggttctgacatgaggtttgtgaatttgattaataaaatgcatagggagaagccgatttctttgcctatttatgatgctgcatcagagttctgctggccgttgcattttaatattgggaaatctgaaggctgtgtctcttgggggtgacacatgggagcttgaagcagaagagctggatgggccccaatgtcaggagaatagtggtgcttacttattgcatatgggactcacttgtttgcttgcgaaggtaaggtaacaacttagaggaagtgttaagataacgtcagtagcagacgatatttttagatgctattttctctacccatgtctatgaactctcaattgccctgtgtgaatttaaggggaaaaaatatggttttaagtagctctggccctaactgaccctgtggcaaattcagttggctctgttgaaggattgttaggctggtggtgtgtttacgtgttccaaaattctcagtcaactgcttggtgagttatctgtggaaaattctatatagaagatgctgttcttagcattctgaccaactctgttattgatctatgactgctactcattttagcagaatagtggggaggtcaatctcctacaggaaaataaatacgtaatggttttttaagtaaatataaattgggattatctgtttttgagcatcttttccaattcctggtgacacataactgaggtgtgaaagcatgcagtatacccccacctggtggcagcacacctgactatttgtacttggaacaaggctgatctgtaaggcaagtgggttgcagatgatctgctccagcaggaggtgaactgttgaaatctggaactttctcttgcaggacgatttcctgttcagtgtctccattttaagtgggattctttgcagcatcctggccgtgttgaagttcatgctggggaaggttctgaccagtagagcactcataacagatgggtttaactccctcgtgggtggcgtgatgggcttctccattcttctgagcgcggaagtgttcaagcatgactcggcggtctggtacctggacggcagcataggcgttctgatcggcctcaccatatttgcctatggggtcaaactcctcatcgacatggtgccgagggtgaggcagacacgtcactacgagatgtttgagtgaagggggccagcatccgcatgagaccatcgagatgaggagtttccacataggcaaagggtgccaatatttaactgaacatctggtttctttttggaagttttctttcacatggtttgtcattacaagacaaggtctgcccagccaggtggatctaccttgcccccatcacctgccgcccccatcaaacatgttgggacaatgcccataggaatggacctccttccccgtctccagctgggactggcgttttttagtctctggagtatgatggttctcatgggtaggatgagatctttggcagaaaggtcttcggtggtgctctgagcctgcgctgcataggactgagcagacccacctcctccagcttgggtggccctgccactcctggttccaagtctctcctttcctggcaggtcttaagggaagattgtacccctcaccctttacatacccagaatcatcagtatgtcacttcctaatttctatcagtgtatctcattatttcatactgttttactaatcctaagtctaaacagatttgctcaaaaggagaccattctattttttaaagtacttagtgatacacgtataagctttgcatggacgaattaaataagcacattgaccttttcttgtacattcagaacctgaacatccatgtgaaaactgggtccatttttgagagatgtgaaactacagtttatttgtaataaataaatataatctatccgtatatgcatatatctatatgctgtgttaagtggtaatgggtacattacagtctgtgagagatggatcgctccctctgtaaggaacaagacgttctcagctgatgtcacggtaggtttagattctgtagagtgttccccaacccgcaccgttctgtacctctcacaccactgcttgcccgggcagtagtggctgaccaataaagacctttacctgttttgta

SEQ ID NO: 21707 - DNA, 525 bp, Homo sapiens
  misc_feature 1..525: note = ENST00000507319
  source 1..525: mol_type = unassigned DNA; mol_type = unassigned DNA
acttcctggctgcgcgcgcaggcgcggaggtctgacggagacagcgcgtgcgcggcgtcgccgggcttgcgatgaacttccggctgtcaagctcccggccgggctgactcaagcggaggcgcgcggaacagtcgccgaggcgattcccgcccaggctcctgtaaccgccaggcagcggccccgccatgtcccagccccggaccccagagcaggcactggatacaccgggggactgccccccaggcaggagagacgaggacgctggggaggggatccagtgctcccaacgcatgctcagcttcagtgacgccctgctgtccatcatcgccaccgtcatgatcctgcctgtgacccacacggagatctccccagaacagttcgacagaagtgtacagaggcttctggcaacacggattgccgtctacctgatgacctttctcatcgtgacagtggcctgggcagcacacacaaggttgttccaagttgttgggaaaacagacgacacacttgccctgctcaacctgg

SEQ ID NO: 21708 - DNA, 1860 bp, Homo sapiens
  misc_feature 1..1860: note = ENST00000264771
  source 1..1860: mol_type = unassigned DNA; mol_type = unassigned DNA
acttcctggctgcgcgcgcaggcgcggaggtctgacggagacagcgcgtgcgcggcgtcgccgggcttgcgatgaacttccggctgtcaagctcccggccgggctgactcaagcggaggcgcgcggaacagtcgccgaggcgattcccgcccaggctcctgtaaccgccaggcagcggccccgccatgtcccagccccggaccccagagcaggcactggatacaccgggggactgccccccaggcaggagagacgaggacgctggggaggggatccagtgctcccaacgcatgctcagcttcagtgacgccctgctgtccatcatcgccaccgtcatgatcctgcctgtgacccacacggagatctccccagaacagcagttcgacagaagtgtacagaggcttctggcaacacggattgccgtctacctgatgacctttctcatcgtgacagtggcctgggcagcacacacaaggttgttccaagttgttgggaaaacagacgacacacttgccctgctcaacctggcctgcatgatgaccatcaccttcctgccttacacgttttcgttaatggtgaccttccctgatgtgcctctgggcatcttcttgttctgtgtgtgtgtgatcgccattggggtcgtgcaggcactgattgtggggtacgcattccacttcccgcacctgctgagcccgcagatccagcgctctgcccacagggctctgtaccgacgacacgtcctgggcatcgtcctccaaggcccggccctgtgctttgcagcggccatcttctctctcttctttgtccccttgtcttacctgctgatggtgactgtcatcctcctcccctatgtcagcaaggtcaccggctggtgcagagacaggctcctgggccacagggagccctcggctcacccagtggaagtcttctcgtttgacctccacgagccactcagcaaggagcgcgtggaagccttcagcgacggagtctacgccatcgtggccacgcttctcatcctggacatctgcgaagacaacgtcccggaccccaaggatgtgaaggagaggttcagcggcagcctcgtggccgccctgagtgcgaccgggccgcgcttcctggcgtacttcggctccttcgccacagtgggactgctgtggttcgcccaccactcactcttcctgcatgtgcgcaaggccacgcgggccatggggctgctgaacacgctctcgctggccttcgtgggtggcctcccactagcctaccagcagacctcggccttcgcccggcagccccgcgatgagctggagcgcgtgcgtgtcagctgcaccatcatcttcctggccagcatcttccagctggccatgtggaccacggcgctgctgcaccaggcggagacgctgcagccctcggtgtggtttggcggccgggagcatgtgctcatgttcgccaagctggcgctgtacccctgtgccagcctgctggccttcgcctccacctgcctgctgagcaggttcagtgtgggcatcttccacctcatgcagatcgccgtgccctgcgccttcctgttgctgcgcctgctcgtgggcctggccctggccaccctgcgggtcctgcggggcctcgcccggcccgaacaccccccgccagcccccacgggccaggacgacccacagtcccagctcctccctgccccctgctagcagccacagagcccactcccagccgtcctcaccagagatggaccagggaggacaggatgctgggcaggggaagccaagtcacgggcaggccgcagtggttcttgcgtggcctggttttattttcattgtgaaatatcatgctcttatttcagtcctcaaa

SEQ ID NO: 21709 - DNA, 2084 bp, Homo sapiens
  misc_feature 1..2084: note = ENST00000513952
  source 1..2084: mol_type = unassigned DNA; mol_type = unassigned DNA
gcaggcgcggaggtctgacggagacagcgcgtgcgcggcgtcgccgggcttgcgatgaacttccggctgtcaagctcccggccgggctgactcaagcggaggcgcgcggaacagtcgccgaggcgattcccgcccaggctcctgtaaccgccaggcagcggccccgccatgtcccagccccggaccccagagcaggcactggatacaccgggggactgccccccaggcaggagagacgaggacgctggggaggggatccagtgctcccaacgcatgctcagcttcagtgacgccctgctgtccatcatcgccaccgtcatgatcctgcctgtgacccacacggagatctccccagaacagtggacaaaggcagcaccctggaagtgagccagaggacaggttggaagaggaaggttccgggcctgccccaaggacagaagtttcctctgcgggagggcagctgccccagcaggcaggccccttacgtagctgctctgagtaaacgcggccagcgccccgtctcagcggggacactcccaccccggctgctcctgcaggcctggagcagttcgacagaagtgtacagaggcttctggcaacacggattgccgtctacctgatgacctttctcatcgtgacagtggcctgggcagcacacacaaggttgttccaagttgttgggaaaacagacgacacacttgccctgctcaacctggccgcatcatggctgtgatgccctccctccctccaggcctgcatgatgaccatcaccttcctgccttacacgttttcgttaatggtgaccttccctgatgtgcctctgggcatcttcttgttctgtgtgtgtgtgatcgccattggggtcgtgcaggcactgattgtggggtacgcattccacttcccgcacctgctgagcccgcagatccagcgctctgcccacagggctctgtaccgacgacacgtcctgggcatcgtcctccaaggcccggccctgtgctttgcagcggccatcttctctctcttctttgtccccttgtcttacctgctgatggtgactgtcatcctcctcccctatgtcagcaaggtcaccggctggtgcagagacaggctcctgggccacagggagccctcggctcacccagtggaagtcttctcgtttgacctccacgagccactcagcaaggagcgcgtggaagccttcagcgacggagtctacgccatcgtggccacgcttctcatcctggacatctgcgaagacaacgtcccggaccccaaggatgtgaaggagaggttcagcggcagcctcgtggccgccctgagtgcgaccgggccgcgcttcctggcgtacttcggctccttcgccacagtgggactgctgtggttcgcccaccactcactcttcctgcatgtgcgcaaggccacgcgggccatggggctgctgaacacgctctcgctggccttcgtgggtggcctcccactagcctaccagcagacctcggccttcgcccggcagccccgcgatgagctggagcgcgtgcgtgtcagctgcaccatcatcttcctggccagcatcttccagctggccatgtggaccacggcgctgctgcaccaggcggagacgctgcagccctcggtgtggtttggcggccgggagcatgtgctcatgttcgccaagctggcgctgtacccctgtgccagcctgctggccttcgcctccacctgcctgctgagcaggttcagtgtgggcatcttccacctcatgcagatcgccgtgccctgcgccttcctgttgctgcgcctgctcgtgggcctggccctggccaccctgcgggtcctgcggggcctcgcccggcccgaacaccccccgccagcccccacgggccaggacgacccacagtcccagctcctccctgccccctgctagcagccacagagcccactcccagccgtcctcaccagagatggaccagggaggacaggatgctgggcaggggaagccaagtcacgggcaggccgcagtggttcttgcgtggcctggttttattttcattgtgaaatatcatgctcttatttcagtcctcaaa

SEQ ID NO: 21710 - DNA, 683 bp, Homo sapiens
  misc_feature 1..683: note = ENST00000514453
  source 1..683: mol_type = unassigned DNA; mol_type = unassigned DNA
gacagcgcgtgcgcggcgtcgccgggcttgcgatgaacttccggctgtcaagctcccggccgggctgactcaagcggaggcgcgcggaacagtcgccgaggcgattcccgcccaggctcctgtaaccgccaggcagcggccccgccatgtcccagccccggaccccagagcaggcactggatacaccgggggactgccccccaggcaggagagacgaggacgctggggaggggatccagtgctcccaacgcatgctcagcttcagtgacgccctgctgtccatcatcgccaccgtcatgcagttcgacagaagtgtacagaggcttctggcaacacggattgccgtctacctgatgacctttctcatcgtgacagtggcctgggcagcacacacaaggttgttccaagttgttgggaaaacagacgacacacttgccctgctcaacctggcctgcatgatgaccatcaccttcctgccttacacgttttcgttaatggtgaccttccctgatgtgcctctgggcatcttcttgttctgtgtgtgtgtgatcgccattggggtcgtgcaggcactgattgtggggtacgcattccacttcccgcacctgctgagcccgcagatccagcgctctgcccacagggctctgtaccgacgacacgtcctgggcatcgtcctccaaggc

SEQ ID NO: 21711 - DNA, 990 bp, Homo sapiens
  misc_feature 1..990: note = ENST00000505734
  source 1..990: mol_type = unassigned DNA; mol_type = unassigned DNA
gcgtgcgcggcgtcgccgggcttgcgatgaacttccggctgtcaagctcccggccgggctgactcaagcggaggcgcgcggaacagtcgccgaggcgattcccgcccaggctcctgtaaccgccaggcagcggccccgccatgtcccagccccggaccccagagcaggcactggatacaccgggggactgccccccaggcaggagagacgaggacgctggggaggggatccagtgctcccaacgcatgctcagcttcagtgacgccctgctgtccatcatcgccaccgtcatggtctgtacggggcccctgcttaggcctgccccaccccgagcctctcgaggcactgcccagcccacctcagacctgtctaggtcttgccagcatccttgggtcccccagctcctcaggcagcttaggggggcccagcactgccctcgagtccccagtactgccacacccaatccaacaagcgtctcttgctctcctgcttccttctgtctctttgccccctcagatcctgcctgtgacccacacggagatctccccagaacaggtaacggggcaggctgtgctctgcgtggtgtggccctgcgaagatatagggtccccgaggctcgacctggcacagggtgctgaccctgcacgcctcgaagcttctgaggcttaggaggcagaggcgggaggcgggggcctccttggaaagggagggagccaacaagtcctgctcagcctgtgctcaccccggcggaggtcctggcctcctgggagggtgggagactgggctcctagggctctgtttccgagttcagtggacaaaggcagcaccctggaagtgagccagaggacaggttggaagaggaaggttccgggcctgccccaaggacagaagtttcctctgcgggagggcagctgccccagcaggcaggccccttacgtagctgctctgagtaaacgcggccagcgccccgtctcagcggggacactccca

SEQ ID NO: 21712 - DNA, 784 bp, Homo sapiens
  misc_feature 1..784: note = ENST00000515492
  source 1..784: mol_type = unassigned DNA; mol_type = unassigned DNA
tcgccgggcttgcgatgaacttccggctgtcaagctcccggccgggctgactcaagcggaggcgcgcggaacagtcgccgaggcgattcccgcccagttcgacagaagtgtacagaggcttctggcaacacggattgccgtctacctgatgacctttctcatcgtgacagtggcctgggcagcacacacaaggttgttccaagttgttgggaaaacagacgacacacttgccctgctcaacctggcctgcatgatgaccatcaccttcctgccttacacgttttcgttaatggtgaccttccctgatgtgcctctgggcatcttcttgttctgtgtgtgtgtgatcgccattggggtcgtgcaggcactgattgtggggtacgcattccacttcccgcacctgctgagcccgcagatccagcgctctgcccacagggctctgtaccgacgacacgtcctgggcatcgtcctccaaggcccggccctgtgctttgcagcggccatcttctctctcttctttgtccccttgtcttacctgctgatggtgactgtcatcctcctcccctatgtcagcaaggtcaccggctggtgcagagacaggctcctgggccacagggagccctcggctcacccagtggaagtcttctcgtttgacctccacgagccactcagcaaggagcgcgtggaagccttcagcgacggagtctacgccatcgtggccacgcttctcatcctggacatctgcgaagacaacgtcccggaccccaaggatgtgaaggagagg

SEQ ID NO: 21713 - DNA, 776 bp, Homo sapiens
  misc_feature 1..776: note = ENST00000504744
  source 1..776: mol_type = unassigned DNA
gccgggcttgcgatgaacttccggctgtcaagctcccggccgggctgactcaagcggaggcgcgcggaacagtcgccgaggcgattcccgcccaggctcctgtaaccgccaggcagcggccccgccatgtcccagccccggaccccagagcaggcactggatacaccgggggactgccccccaggcaggagagacgaggacgctggggaggggatccagtgctcccaacgcatgctcagcttcagtgacgccctgctgtccatcatcgccaccgtcatgatcctgcctgtgacccacacggagatctccccagaacagtggacaaaggcagcaccctggaagtgagccagaggacaggttggaagaggaaggttccgggcctgccccaaggacagaagtttcctctgcgggagggcagctgccccagcaggcaggccccttacgtagctgctctgagtaaacgcggccagcgccccgtctcagcggggacactcccaccccggctgctcctgcaggcctggagttcgacagaagtgtacagaggcttctggcaacacggattgccgtctacctgatgacctttctcatcgtgacagtggcctgggcagcacacacaaggttgttccaagttgttgggaaaacagacgacacacttgccctgctcaacctggcctgcatgatgaccatcaccttcctgccttacacgttttcgttaatggtgaccttccctgatgtgcctctgggcatcttcttgttctgtgtgtgtgtgatcgcca

SEQ ID NO: 21714 - DNA, 621 bp, Homo sapiens
  misc_feature 1..621: note = ENST00000509508
  source 1..621: mol_type = unassigned DNA
gaacttccggctgtcaagctcccggccgggctgactcaagcggaggcgcgcggaacagtcgccgaggcgattcccgcccagcagttcgacagaagtgtacagaggcttctggcaacacggattgccgtctacctgatgacctttctcatcgtgacagtggcctgggcagcacacacaaggttgttccaagttgttgggaaaacagacgacacacttgccctgctcaacctgttttcgttaatggtgaccttccctgatgtgcctctgggcatcttcttgttctgtgtgtgtgtgatcgccattggggtcgtgcaggcactgattgtggggtacgcattccacttcccgcacctgctgagcccgcagatccagcgctctgcccacagggctctgtaccgacgacacgtcctgggcatcgtcctccaaggcccggccctgtgctttgcagcggccatcttctctctcttctttgtccccttgtcttacctgctgatggtgactgtcatcctcctcccctatgtcagcaaggtcaccggctggtgcagagacaggctcctgggccacagggagccctcggctcacccagtggaagtcttctcgtttgacctccacgagccactc

SEQ ID NO: 21715 - DNA, 2011 bp, Homo sapiens
  misc_feature 1..2011: note = ENST00000452360
  source 1..2011: mol_type = unassigned DNA; mol_type = unassigned DNA
gaacttccggctgtcaagctcccggccgggctgactcaagcggaggcgcgcggaacagtcgccgaggcgattcccgcccaggctcctgtaaccgccaggcagcggccccgccatgtcccagccccggaccccagagcaggcactggatacaccgggggactgccccccaggcaggagagacgaggacgctggggaggggatccagtgctcccaacgcatgctcagcttcagtgacgccctgctgtccatcatcgccaccgtcatgatcctgcctgtgacccacacggagatctccccagaacaggtaacggggcaggctgtgctctgcgtggtgtggccctgcgaagatatagggtccccgaggctcgacctggcacagggtgctgaccctgcacgcctcgaagcttctgaggcttaggaggcagaggcgggaggcgggggcctccttggaaagggagggagccaacaagtcctgctcagcctgtgctcaccccggcggaggtcctggcctcctgggagggtgggagactgggctcctagggctctgtttccgagttcagtggacaaaggcagcaccctggaagtgagccagaggacaggttggaagaggaaggttccgggcctgccccaaggacagaagtttcctctgcgggagggcagctgccccagcaggcaggccccttacgtagctgctctgagtaaacgcggccagcgccccgtctcagcggggacactcccaccccggctgctcctgcaggcctggagcagttcgacagaagtgtacagaggcttctggcaacacggattgccgtctacctgatgacctttctcatcgtgacagtggcctgggcagcacacacaaggttgttccaagttgttgggaaaacagacgacacacttgccctgctcaacctggcctgcatgatgaccatcaccttcctgccttacacgttttcgttaatggtgaccttccctgatgtgcctctgggcatcttcttgttctgtgtgtgtgtgatcgccattggggtcgtgcaggcactgattgtggggtacgcattccacttcccgcacctgctgagcccgcagatccagcgctctgcccacagggctctgtaccgacgacacgtcctgggcatcgtcctccaaggcccggccctgtgctttgcagcggccatcttctctctcttctttgtccccttgtcttacctgctgatggtgactgtcatcctcctcccctatgtcagcaaggtcaccggctggtgcagagacaggctcctgggccacagggagccctcggctcacccagtggaagtcttctcgtttgacctccacgagccactcagcaaggagcgcgtggaagccttcagcgacggagtctacgccatcgtggccacgcttctcatcctggacatctgtgccccccatcgcttcgcagcccctcctgctccctttggctggctgttgcttccttccagcgtctgctcctccgcggcctcatctgcctcttcgtctgttagagcgcgcgtctcgtctcagtcgtcacgtttttggtttttgtggggtttttttttttttttttttgagacagtcctgctgtgtcgcccaggctggagtatagtggctcaagctcagctcactgcaacctccgcctcccaggttcaagcaattctcctgcctcagcctcccaagtagttgggattacaagcacccaccaccatgcccagctaactttttgcatttttaatagagatgaggtttcaccaagttggccaggctggtcttgaactcctgacctcaggtgatctgcccacctcggcctcccaaagtgctgggattacaggtgtaagccaccgtgcccggccatcgtaatgtttgaatttgcttttttacatcttccatccttttggagtgtcttgttccctcgtcatagttcagcactgtgaccaccttggggttagacactatggttttatatcctgtacttgatattctcgagtccaagtctcctgat

SEQ ID NO: 21716 - DNA, 1007 bp, Homo sapiens
  misc_feature 1..1007: note = ENST00000515876
  source 1..1007: mol_type = unassigned DNA; mol_type = unassigned DNA
aacttccggctgtcaagctcccggccgggctgactcaagcggaggcgcgcggaacagtcgccgaggcgattcccgcccaggctcctgtaaccgccaggcagcggccccgccatgtcccagccccggaccccagagcaggcactggatacaccgggggactgccccccaggcaggagagacgaggacgctggggaggggatccagtgctcccaacgcatgctcagcttcagtgacgccctgctgtccatcatcgccaccgtcatgatcctgcctgtgacccacacggagatctccccagaacagcagttcgacagaagtgtacagaggcttctggcaacacggattgccgtctacctgatgacctttctcatcgtgacagtggcctgggcagcacacacaaggttgttccaagttgttgggaaaacagacgacacacttgccctgctcaacctggcctgcatgatgaccatcaccttcctgccttacacgttttcgttaatggtgaccttccctgatgtgcctctgggcatcttcttgttctgtgtgtgtgtgatcgccattggggtcgtgcaggcactgattgtggggtacgcattccacttcccgcacctgctgagcccgcagatccagcgctctgcccacagggctctgtaccgacgacacgtcctgggcatcgtcctccaaggcccggccctgtgctttgcagcggccatcttctctctcttctttgtccccttgtcttacctgctgatggtgactgtcatcctcctcccctatgtcagcaaggtcaccggctggtgcagagacaggctcctgggccacagggagccctcggctcacccagtggaagtcttctcgtttgacctccacgagccactcagcaaggagcgcgtggaagccttcagcgacggagtctacgccatcgtggccacgcttctcatcctggacatctggtgaggaccccgcgtcacctgccccagctatcaggtggccaatgtgtcttgagt

SEQ ID NO: 21717 - DNA, 581 bp, Homo sapiens
  misc_feature 1..581: note = ENST00000513682
  source 1..581: mol_type = unassigned DNA; mol_type = unassigned DNA
acttccggctgtcaagctcccggccgggctgactcaagcggaggcgcgcggaacagtcgccgaggcgattcccgcccaggctcctgtaaccgccaggcagcggccccgccatgtcccagccccggaccccagagcaggcactggatacaccgggggactgccccccaggcaggagagacgaggacgctggggaggggatccagtgctcccaacgcatgctcagcttcagtgacgccctgctgtccatcatcgccaccgtcatgatcctgcctgtgacccacacggagatctccccagaacagctgccccagcaggcaggccccttacgtagctgctctgagtaaacgcggccagcgccccgtctcagcggggacactcccaccccggctgctcctgcaggcctggagcagttcgacagaagtgtacagaggcttctggcaacacggattgccgtctacctgatgacctttctcatcgtgacagtggcctgggcagcacacacaaggttgttccaagttgttgggaaaacagacgacacacttgccctgctcaacctggcctgcatgatgaccatcaccttc

SEQ ID NO: 21718 - DNA, 1514 bp, Homo sapiens
  misc_feature 1..1514: note = ENST00000515740
  source 1..1514: mol_type = unassigned DNA; mol_type = unassigned DNA
tccggctgtcaagctcccggccgggctgactcaagcggaggcgcgcggaacagtcgccgaggcgattcccgcccagcagttcgacagaagtgtacagaggcttctggcaacacggattgccgtctacctgatgacctttctcatcgtgacagtggcctgggcagcacacacaaggttgttccaagttgttgggaaaacagacgacacacttgccctgctcaacctggccgcatcatggctgtgatgccctccctccctccaggcctgcatgatgaccatcaccttcctgccttacacgttttcgttaatggtgaccttccctgatgtgcctctgggcatcttcttgttctgtgtgtgtgtgatcgccattggggtcgtgcaggcactgattgtggggtacgcattccacttcccgcacctgctgagcccgcagatccagcgctctgcccacagggctctgtaccgacgacacgtcctgggcatcgtcctccaaggcccggccctgtgctttgcagcggccatcttctctctcttctttgtccccttgtcttacctgctgatggtgactgtcatcctcctcccctatgtcagcaaggtcaccggctggtgcagagacaggctcctgggccacagggagccctcggctcacccagtggaagtcttctcgtttgacctccacgagccactcagcaaggagcgcgtggaagccttcagcgacggagtctacgccatcgtggccacgcttctcatcctggacatctgcgaagacaacgtcccggaccccaaggatgtgaaggagaggttcagcggcagcctcgtggccgccctgagtgcgaccgggccgcgcttcctggcgtacttcggctccttcgccacagtgggactgctgtggttcgcccaccactcactcttcctgcatgtgcgcaaggccacgcgggccatggggctgctgaacacgctctcgctggccttcgtgggtggcctcccactagcctaccagcagacctcggccttcgcccggcagccccgcgatgagctggagcgcgtgcgtgtcagctgcaccatcatcttcctggccagcatcttccagctggccatgtggaccacggcgctgctgcaccaggcggagacgctgcagccctcggtgtggtttggcggccgggagcatgtgctcatgttcgccaagctggcgctgtacccctgtgccagcctgctggccttcgcctccacctgcctgctgagcaggttcagtgtgggcatcttccacctcatgcagatcgccgtgccctgcgccttcctgttgctgcgcctgctcgtgggcctggccctggccaccctgcgggtcctgcggggcctcgcccggcccgaacaccccccgccagcccccacgggccaggacgacccacagtcccagctcctccctgccccctgctagcagccacagagcccactcccagccgtcctcaccagagatggaccagggaggacaggatgctgggcaggggaagccaagt

SEQ ID NO: 21719 - DNA, 2236 bp, Homo sapiens
  misc_feature 1..2236: note = ENST00000438836
  source 1..2236: mol_type = unassigned DNA; mol_type = unassigned DNA
gtcaagctcccggccgggctgactcaagcggaggcgcgcggaacagtcgccgaggcgattcccgcccaggctcctgtaaccgccaggcagcggccccgccatgtcccagccccggaccccagagcaggcactggatacaccgggggactgccccccaggcaggagagacgaggacgctggggaggggatccagtgctcccaacgcatgctcagcttcagtgacgccctgctgtccatcatcgccaccgtcatgatcctgcctgtgacccacacggagatctccccagaacaggtaacggggcaggctgtgctctgcgtggtgtggccctgcgaagatatagggtccccgaggctcgacctggcacagggtgctgaccctgcacgcctcgaagcttctgaggcttaggaggcagaggcgggaggcgggggcctccttggaaagggagggagccaacaagtcctgctcagcctgtgctcaccccggcggaggtcctggcctcctgggagggtgggagactgggctcctagggctctgtttccgagttcagtggacaaaggcagcaccctggaagtgagccagaggacaggttggaagaggaaggttccgggcctgccccaaggacagaagtttcctctgcgggagggcagctgccccagcaggcaggccccttacgtagctgctctgagtaaacgcggccagcgccccgtctcagcggggacactcccaccccggctgctcctgcaggcctggagcagttcgacagaagtgtacagaggcttctggcaacacggattgccgtctacctgatgacctttctcatcgtgacagtggcctgggcagcacacacaaggttgttccaagttgttgggaaaacagacgacacacttgccctgctcaacctggcctgcatgatgaccatcaccttcctgccttacacgttttcgttaatggtgaccttccctgatgtgcctctgggcatcttcttgttctgtgtgtgtgtgatcgccattggggtcgtgcaggcactgattgtggggtacgcattccacttcccgcacctgctgagcccgcagatccagcgctctgcccacagggctctgtaccgacgacacgtcctgggcatcgtcctccaaggcccggccctgtgctttgcagcggccatcttctctctcttctttgtccccttgtcttacctgctgatggtgactgtcatcctcctcccctatgtcagcaaggtcaccggctggtgcagagacaggctcctgggccacagggagccctcggctcacccagtggaagtcttctcgtttgacctccacgagccactcagcaaggagcgcgtggaagccttcagcgacggagtctacgccatcgtggccacgcttctcatcctggacatctgcgaagacaacgtcccggaccccaaggatgtgaaggagaggttcagcggcagcctcgtggccgccctgagtgcgaccgggccgcgcttcctggcgtacttcggctccttcgccacagtgggactgctgtggttcgcccaccactcactcttcctgcatgtgcgcaaggccacgcgggccatggggctgctgaacacgctctcgctggccttcgtgggtggcctcccactagcctaccagcagacctcggccttcgcccggcagccccgcgatgagctggagcgcgtgcgtgtcagctgcaccatcatcttcctggccagcatcttccagctggccatgtggaccacggcgctgctgcaccaggcggagacgctgcagccctcggtgtggtttggcggccgggagcatgtgctcatgttcgccaagctggcgctgtacccctgtgccagcctgctggccttcgcctccacctgcctgctgagcaggttcagtgtgggcatcttccacctcatgcagatcgccgtgccctgcgccttcctgttgctgcgcctgctcgtgggcctggccctggccaccctgcgggtcctgcggggcctcgcccggcccgaacaccccccgccagcccccacgggccaggacgacccacagtcccagctcctccctgccccctgctagcagccacagagcccactcccagccgtcctcaccagagatggaccagggaggacaggatgctgggcaggggaagccaagtcacgggcaggccgcagtggttcttgcgtggcctggttttattttcattgtgaaatatcatgctcttatttcagtcctcaaa

SEQ ID NO: 21720 - DNA, 583 bp, Homo sapiens
  misc_feature 1..583: note = ENST00000504505
  source 1..583: mol_type = unassigned DNA; mol_type = unassigned DNA
aagctcccggccgggctgactcaagcggaggcgcgcggaacagtcgccgaggcgattcccgcccaggctcctgtaaccgccaggcagcggccccgccatgtcccagccccggaccccagagcaggcactggatacaccgggggactgccccccaggcaggagagacgaggacgctggggaggggatccagtgctcccaacgcatgctcagcttcagtgacgccctgctgtccatcatcgccaccgtcatggtctgtacggggcccctgcttaggcctgccccaccccgagcctctcgaggcactgcccagcccacctcagacctgtctaggtcttgccagcatccttgggtcccccagctcctcaggcagcttaggggggcccagcactgccctcgagtccccagtactgccacacccaatccaacaagcgtctcttgctctcctgcttccttctgtctctttgccccctcagatcctgcctgtgacccacacggagatctccccagaacagcagttcgacagaagtgtacagaggcttctggcaacacggattgccgtctacctgatgacctttctcatcgt

SEQ ID NO: 21721 - DNA, 1399 bp, Homo sapiens
  misc_feature 1..1399: note = ENST00000508204
  source 1..1399: mol_type = unassigned DNA; mol_type = unassigned DNA
ctcccggccgggctgactcaagcggaggcgcgcggaacagtcgccgaggcgattcccgcccagcagttcgacagaagtgtacagaggcttctggcaacacggattgccgtctacctgatgacctttctcatcgtgacagtggcctgggcagcacacacaaggttgttccaagttgttgggaaaacagacgacacacttgccctgctcaacctggcctgcatgatgaccatcaccttcctgccttacacgttttcgttaatggtgaccttccctgatgtgcctctgggcatcttcttgttctgtgtgtgtgtgatcgccattggggtcgtgcaggcactgattgtggggtacgcattccacttcccgcacctgctgagcccgcagatccagcgctctgcccacagggctctgtaccgacgacacgtcctgggcatcgtcctccaaggcccggccctgtgctttgcagcggccatcttctctctcttctttgtccccttgtcttacctgctgatggtgactgtcatcctcctcccctatgtcagcaaggtcaccggctggtgcagagacaggctcctgggccacagggagccctcggctcacccagtggaagtcttctcgtttgacctccacgagccactcagcaaggagcgcgtggaagccttcagcgacggagtctacgccatcgtggccacgcttctcatcctggacatctgcgaagacaacgtcccggaccccaaggatgtgaaggagaggttcagcggcagcctcgtggccgccctgagtgcgaccgggccgcgcttcctggcgtacttcggctccttcgccacagtgggactgctgtggttcgcccaccactcactcttcctgcatgtgcgcaaggccacgcgggccatggggctgctgaacacgctctcgctggccttcgtgggtggcctcccactagcctaccagcagacctcggccttcgcccggcagccccgcgatgagctggagcgcgtgcgtgtcagctgcaccatcatcttcctggccagcatcttccagctggccatgtggaccacggcgctgctgcaccaggcggagacgctgcagccctcggtgtggtttggcggccgggagcatgtgctcatgttcgccaagctggcgctgtacccctgtgccagcctgctggccttcgcctccacctgcctgctgagcaggttcagtgtgggcatcttccacctcatgcagatcgccgtgccctgcgccttcctgttgctgcgcctgctcgtgggcctggccctggccaccctgcgggtcctgcggggcctcgcccggcccgaacaccccccgccagcccccacgggccaggacgacccacagtcccagctcctccctgccccctgctagcagccacagagcc

SEQ ID NO: 21722 - DNA, 1006 bp, Homo sapiens
  misc_feature 1..1006: note = ENST00000510493
  source 1..1006: mol_type = unassigned DNA; mol_type = unassigned DNA
cccggccgggctgactcaagcggaggcgcgcggaacagtcgccgaggcgattcccgcccagatcctgcctgtgacccacacggagatctccccagaacagcagttcgacagaagtgtacagaggcttctggcaacacggattgccgtctacctgatgacctttctcatcgtgacagtggcctgggcagcacacacaaggttgttccaagttgttgggaaaacagacgacacacttgccctgctcaacctggcctgcatgatgaccatcaccttcctgccttacacgttttcgttaatggtgaccttccctgatgtgcctctgggcatcttcttgttctgtgtgtgtgtgatcgccattggggtcgtgcaggcactgattgtggggtacgcattccacttcccgcacctgctgagcccgcagatccagcgctctgcccacagggctctgtaccgacgacacgtcctgggcatcgtcctccaaggcccggccctgtgctttgcagcggccatcttctctctcttctttgtccccttgtcttacctgctgatggtgactgtcatcctcctcccctatgtcagcaaggtcaccggctggtgcagagacaggctcctgggccacagggagccctcggctcacccagtggaagtcttctcgtttgacctccacgagccactcagcaaggagcgcgtggaagccttcagcgacggagtctacgccatcgtggccacgcttctcatcctggacatctgcgaagacaacgtcccggaccccaaggatgtgaaggagaggttcagcggcagcctcgtggccgccctgagtgcgaccgggccgcgcttcctggcgtacttcggctccttcgccacagtgggactgctgtggttcgcccaccactcactcttcctgcatgtgcgcaaggccacgcgggccatggggctgctgaacacgctctcgctggccttcgtgggtggcctcccactagcctaccagcagacctcggccttcgcc

SEQ ID NO: 21723 - DNA, 619 bp, Homo sapiens
  misc_feature 1..619: note = ENST00000514546
  source 1..619: mol_type = unassigned DNA; mol_type = unassigned DNA
cggccgggctgactcaagcggaggcgcgcggaacagtcgccgaggcgattcccgcccagctcccctgccctgagacagcctccggtgcttctgctgtgtcccaggaaacaagcctgaagcaagcactcaccatccctcaagaatgtgccctgacctaccttcctcaccacggtggcatcagggccaggctcctgtaaccgccaggcagcggccccgccatgtcccagccccggaccccagagcaggcactggatacaccgggggactgccccccaggcaggagagacgaggacgctggggaggggatccagtgctcccaacgcatgctcagcttcagtgacgccctgctgtccatcatcgccaccgtcatgatcctgcctgtgacccacacggagatctccccagaacagcagttcgacagaagtgtacagaggcttctggcaacacggattgccgtctacctgatgacctttctcatcgtgacagtggcctgggcagcacacacaaggttgttccaagttgttgggaaaacagacgacacacttgccctgctcaacctggcctgcatgatgaccatcaccttcctgccttacacgttttcgttaatggtgaccttccc

SEQ ID NO: 21724 - DNA, 984 bp, Homo sapiens
  misc_feature 1..984: note = ENST00000504850
  source 1..984: mol_type = unassigned DNA; mol_type = unassigned DNA
gggctgactcaagcggaggcgcgcggaacagtcgccgaggcgattcccgcccagctcccctgccctgagacagcctccggtgcttctgctgtgtcccaggaaacaagcctgaagcaagcactcaccatccctcaagaatgtgccctgacctaccttcctcaccacggtggcatcagggccaggctcctgtaaccgccaggcagcggccccgccatgtcccagccccggaccccagagcaggcactggatacaccgggggactgccccccaggcaggagagacgaggacgctggggaggggatccagtgctcccaacgcatgctcagcttcagtgacgccctgctgtccatcatcgccaccgtcatggtctgtacggggcccctgcttaggcctgccccaccccgagcctctcgaggcactgcccagcccacctcagacctgtctaggtcttgccagcatccttgggtcccccagctcctcaggcagcttaggggggcccagcactgccctcgagtccccagtactgccacacccaatccaacaagcgtctcttgctctcctgcttccttctgtctctttgccccctcagatcctgcctgtgacccacacggagatctccccagaacaggtaacggggcaggctgtgctctgcgtggtgtggccctgcgaagatatagggtccccgaggctcgacctggcacagggtgctgaccctgcacgcctcgaagcttctgaggcttaggaggcagaggcgggaggcgggggcctccttggaaagggagggagccaacaagtcctgctcagcctgtgctcaccccggcggaggtcctggcctcctgggagggtgggagactgggctcctagggctctgtttccgagttcagtggacaaaggcagcaccctggaagtgagccagaggacaggttggaagaggaaggttccgggcctgccccaaggacagaagtttcctctgcgggagggcag

SEQ ID NO: 21725 - DNA, 673 bp, Homo sapiens
  misc_feature 1..673: note = ENST00000504180
  source 1..673: mol_type = unassigned DNA; mol_type = unassigned DNA
tggacaaaggcagcaccctggaagtgagccagaggacaggttggaagaggaaggttccgggcctgccccaaggacagaagtttcctctgcgggagggcagctgccccagcaggcaggccccttacgtagctgctctgagtaaacgcggccagcgccccgtctcagcggggacactcccaccccggctgctcctgcaggcctggagttcgacagaagtgtacagaggcttctggcaacacggattgccgtctacctgatgacctttctcatcgtgacagtggcctgggcagcacacacaaggttgttccaagttgttgggaaaacagacgacacacttgccctgctcaacctggccgcatcatggctgtgatgccctccctccctccaggcctgcatgatgaccatcaccttcctgccttacacgttttcgttaatggtgaccttccctgatgtgcctctgggcatcttcttgttctgtgtgtgtgtgatcgccattggggtcgtgcaggcactgattgtggggtacgcattccacttcccgcacctgctgagcccgcagatccagcgctctgcccacagggctctgtaccgacgacacgtcctgggcatcgtcctccaaggcccggccctgtgctttgcagcggccatcttctctctcttctttgtccccttg

SEQ ID NO: 21726 - DNA, 412 bp, Homo sapiens
  misc_feature 1..412: note = ENST00000502513
  source 1..412: mol_type = unassigned DNA; mol_type = unassigned DNA
gcaacacggattgccgtctacctgatgacctttctcatcgtgacagtggcctgggcagcacacacaaggttgttccaagttgttgggaaaacagacgacacacttgccctgctcaacctggcctgcatgatgaccatcaccttcctgccttacacggtgagcaacaccaggcccctgacaccctgaggctttgctgggcaccactggatttgacctgtcctcaaaagcagaccagctggatggcccagggcccaggccacacggttgtagagaagagagaaggttctggggagagccagctgttgggctgttgggggcttctttcaggctggcggggaggggaggcagtggccccgatgagggagtcaccggcgctcccagctcccacccggccctgagcccacagccccct

SEQ ID NO: 21727 - DNA, 292 bp, Homo sapiens
  misc_feature 1..292: note = ENST00000506669
  source 1..292: mol_type = unassigned DNA; mol_type = unassigned DNA
cttgttctgtgtgtgtgtgatcgccattggggtcgtgcaggcactgattgtggggtacgcattccacttcccgcacctgctgagcccgcagatccagcgctctgcccacagggctctgtaccgacgacacgtcctgggcatcgtcctccaaggcccggccctgtgctttgcagcggccatcttctctctcttctttgtccccttgtcttacctgctgatggtgactgtcatcctcctcccctatgtcagcaaggtcaccggctggtgcagagacaggctcctgggtaggtga

SEQ ID NO: 21728 - DNA, 1967 bp, Homo sapiens
  misc_feature 1..1967: note = ENST00000622959
  source 1..1967: mol_type = unassigned DNA; mol_type = unassigned DNA
gtcgccgaggcgattcccgcccaggctcctgtaaccgccaggcagcggccccgccatgtcccagccccggaccccagagcaggcactggatacaccgggggactgccccccaggcaggagagacgaggacgctggggaggggatccagtgctcccaacgcatgctcagcttcagtgacgccctgctgtccatcatcgccaccgtcatgatcctgcctgtgacccacacggagatctccccagaacagtggacaaaggcagcaccctggaagtgagccagaggacaggttggaagaggaaggttccgggcctgccccaaggacagaagtttcctctgcgggagggcagctgccccagcaggcaggccccttacgtagctgctctgagtaaacgcggccagcgccccgtctcagcggggacactcccaccccggctgctcctgcaggcctggagcagttcgacagaagtgtacagaggcttctggcaacacggattgccgtctacctgatgacctttctcatcgtgacagtggcctgggcagcacacacaaggttgttccaagttgttgggaaaacagacgacacacttgccctgctcaacctggccgcatcatggctgtgatgccctccctccctccaggcctgcatgatgaccatcaccttcctgccttacacgttttcgttaatggtgaccttccctgatgtgcctctgggcatcttcttgttctgtgtgtgtgtgatcgccattggggtcgtgcaggcactgattgtggggtacgcattccacttcccgcacctgctgagcccgcagatccagcgctctgcccacagggctctgtaccgacgacacgtcctgggcatcgtcctccaaggcccggccctgtgctttgcagcggccatcttctctctcttctttgtccccttgtcttacctgctgatggtgactgtcatcctcctcccctatgtcagcaaggtcaccggctggtgcagagacaggctcctgggccacagggagccctcggctcacccagtggaagtcttctcgtttgacctccacgagccactcagcaaggagcgcgtggaagccttcagcgacggagtctacgccatcgtggccacgcttctcatcctggacatctgcgaagacaacgtcccggaccccaaggatgtgaaggagaggttcagcggcagcctcgtggccgccctgagtgcgaccgggccgcgcttcctggcgtacttcggctccttcgccacagtgggactgctgtggttcgcccaccactcactcttcctgcatgtgcgcaaggccacgcgggccatggggctgctgaacacgctctcgctggccttcgtgggtggcctcccactagcctaccagcagacctcggccttcgcccggcagccccgcgatgagctggagcgcgtgcgtgtcagctgcaccatcatcttcctggccagcatcttccagctggccatgtggaccacggcgctgctgcaccaggcggagacgctgcagccctcggtgtggtttggcggccgggagcatgtgctcatgttcgccaagctggcgctgtacccctgtgccagcctgctggccttcgcctccacctgcctgctgagcaggttcagtgtgggcatcttccacctcatgcagatcgccgtgccctgcgccttcctgttgctgcgcctgctcgtgggcctggccctggccaccctgcgggtcctgcggggcctcgcccggcccgaacaccccccgccagcccccacgggccaggacgacccacagtcccagctcctccctgccccctgctagcagccacagagcccactcccagccgtcctcaccagagatggaccagggaggacaggatgctgggcaggggaagccaagtcacgggcaggccgcagtggttcttgcgtggcctggttttattttcattgtgaaatatcatgctcttatttcagtcct

SEQ ID NO: 21729 - DNA, 1530 bp, Homo sapiens
  misc_feature 1..1530: note = ENST00000484928
  source 1..1530: mol_type = unassigned DNA; mol_type = unassigned DNA
ggccccgcccaggctgcgcggtttcccgaaaccagctgcggcccgggggcccggcaaagggggttccgcccggaggagcggaccgggcgggagaagaccgagcccccgcgcgccccctgcgctcccactcgcgcacacttgcacgccggccctggccgggcggggctggaggcgagaacgaccccacgggctttcccagggccgtccgcccgcggaccctcccagctccccagagcccagtgaccctcgcgcagcaggagaaccccagacggaccccaggccctgcagcctgtcatgaacccgaggggctgaagttcagccccacccccgcctcccctccccgcctccccctccaactctcaacccacttctccagccagcgccccagccctcccgccgcccgctcgcaggtcccgaggagcgcaggtgaggcggcaccccactcccggcggcccccgggcctccttccgcacgcaccccgagctgcctccgcacagttggaggagcgtaggagggacccccacccagggatgacactccaggaaggggactgcagaggaagccagactgtgtccctgacaatgggaacagccgacagtgatgagatggccccggaggccccacagcacacccacatcgatgtgcacatccaccaggagtctgccctggccaagctcctgctcacctgctgctctgcgctgcggccccgggccacccaggccaggggcagcagccggctgctggtggcctcgtgggtgatgcagatcgtgctggggatcttgagtgcagtcctaggaggatttttctacatccgcgactacaccctcctcgtcacctcgggagctgccatctggacaggggctgtggctgtgctggctggagctgctgccttcatttacgagaaacggggtggtacatactgggccctgctgaggactctgctaacgctggcagctttctccacagccatcgctgccctcaaactttggaatgaagatttccgatatggctactcttattacaacagtgcctgccgcatctccagctcgagtgactggaacactccagcccccactcagagtccagaagaagtcagaaggctacacctatgtacctccttcatggacatgctgaaggccttgttcagaacccttcaggccatgctcttgggtgtctggattctgctgcttctggcatctctgacccctctgtggctgtactgctggagaatgttcccaaccaaagggaaaagagaccagaaggaaatgttggaagtgagtggaatctagccatgcctctcctgattattagtgcctggtgcttctgcaccgggcgtccctgcatctgactgctggaagaagaaccagactgaggaaaagaggctcttcaacagccccagttatcctggccccatgaccgtggccacagccctgctccagcagcacttgcccattccttacaccccttccccatcctgctccgcttcatgtcccctcctgagtagtcatgtgataataaactctcatgtta

SEQ ID NO: 21730 - DNA, 1261 bp, Homo sapiens
  misc_feature 1..1261: note = ENST00000004103
  source 1..1261: mol_type = unassigned DNA; mol_type = unassigned DNA
gcacgccggccctggccgggcggggctggaggcgagaacgaccccacgggctttcccagggccgtccgcccgcggaccctcccagctccccagagcccagtgaccctcgcgcagcaggagaaccccagacggaccccaggccctgcagcctgtcatgaacccgaggggctgaagttcagccccacccccgcctcccctccccgcctccccctccaactctcaacccacttctccagccagcgccccagccctcccgccgcccgctcgcaggtcccgaggagcgcagactgtgtccctgacaatgggaacagccgacagtgatgagatggccccggaggccccacagcacacccacatcgatgtgcacatccaccaggagtctgccctggccaagctcctgctcacctgctgctctgcgctgcggccccgggccacccaggccaggggcagcagccggctgctggtggcctcgtgggtgatgcagatcgtgctggggatcttgagtgcagtcctaggaggatttttctacatccgcgactacaccctcctcgtcacctcgggagctgccatctggacaggggctgtggctgtgctggctggagctgctgccttcatttacgagaaacggggtggtacatactgggccctgctgaggactctgctaacgctggcagctttctccacagccatcgctgccctcaaactttggaatgaagatttccgatatggctactcttattacaacagtgcctgccgcatctccagctcgagtgactggaacactccagcccccactcagagtccagaagaagtcagaaggctacacctatgtacctccttcatggacatgctgaaggccttgttcagaacccttcaggccatgctcttgggtgtctggattctgctgcttctggcatctctgacccctctgtggctgtactgctggagaatgttcccaaccaaagggaaaagagaccagaaggaaatgttggaagtgagtggaatctagccatgcctctcctgattattagtgcctggtgcttctgcaccgggcgtccctgcatctgactgctggaagaagaaccagactgaggaaaagaggctcttcaacagccccagttatcctggccccatgaccgtggccacagccctgctccagcagcacttgcccattccttacaccccttccccatcctgctccgcttcatgtcccctcctgagtagtcatgtgataataaactctcatgttattgttcccagg

SEQ ID NO: 21731 - DNA, 1504 bp, Homo sapiens
  misc_feature 1..1504: note = ENST00000494349
  source 1..1504: mol_type = unassigned DNA; mol_type = unassigned DNA
cagccctcccgccgcccgctcgcaggtcccgaggagcgcagactgtgtccctgacaatgggaacagccgacagtgatgagatggccccggaggccccacagcacacccacatcgatgtgcacatccaccaggagtctgccctggccaagctcctgctcacctgctgctctgcgctgcggccccgggccacccaggccaggggcagcagccggctgctggtggcctcgtgggtgagtgtgacggcctgcctcgtcgggcggcgggaggaactccccacctccagccgcagcagcactctctgccagcctccctctgaacaggacaccgagccagttatgtcttcttacttagcgatgtgattctctggccttctcagtaagagcctggggaggggaggctctgggctgaaggggtgtggaggagccactgaccatgcagagtcccaatcagtggagccctgagtccatcctttcctctgggccaaactcaggatgggccggctctcctctccttcctttcccttctcttttctcctcctcctgcctcttcttctttctccttctcctcctctttcttctccttttctcttctcttctcttctcttctcttctttctttctctctctctctacctctccctctctttttggggttttagcggttaatccctgcagtggcaggtccacctaggagccgggatcttgggtcctttgtctttcaggtgatgcagatcgtgctggggatcttgagtgcagtcctaggaggatttttctacatccgcgactacaccctcctcgtcacctcgggagctgccatctggacaggggctgtggctgtgctggctggagctgctgccttcatttacgagaaacggggtggtacatactgggccctgctgaggactctgctaacgctggcagctttctccacagccatcgctgccctcaaactttggaatgaagatttccgatatggctactcttattacaacagtgcctgccgcatctccagctcgagtgactggaacactccagcccccactcagagtccagaagaagtcagaaggctacacctatgtacctccttcatggacatgctgaaggccttgttcagaacccttcaggccatgctcttgggtgtctggattctgctgcttctggcatctctgacccctctgtggctgtactgctggagaatgttcccaaccaaagggaaaagagaccagaaggaaatgttggaagtgagtggaatctagccatgcctctcctgattattagtgcctggtgcttctgcaccgggcgtccctgcatctgactgctggaagaagaaccagactgaggaaaagaggctcttcaacagccccagttatcctggccccatgaccgtggccacagccctgctccagcagcacttgcccattccttacaccccttccccatcctgctccgcttcatgtcccctcctgagtagtcatgtgataataaactctcatgttattgttccca

SEQ ID NO: 21732 - DNA, 925 bp, Homo sapiens
  misc_feature 1..925: note = ENST00000475710
  source 1..925: mol_type = unassigned DNA; mol_type = unassigned DNA
gccgcccgctcgcaggtcccgaggagcgcaggtgaggcggcaccccactcccggcggcccccgggcctccttccgcacgcaccccgagctgcctccgcacagttggaggagcgtaggagggacccccacccagggatgacactccaggaaggggactgcagaggaagccagactgtgtccctgacaatgggaacagccgacagtgatgagatggccccggaggccccacagcacacccacatcgatgtgcacatccaccaggagtctgccctggccaagctcctgctcacctgctgctctgcgctgcggccccgggccacccaggccaggggcagcagccggctgctggtggcctcgtgggtgagtgtgacggcctgcctcgtcgggcggcgggaggaactccccacctccagccgcagcagcactctctgccagcctccctctgaacaggacaccgagccagttatgtcttcttacttagcgatgtgattctctggccttctcagtaagagcctggggaggggaggctctgggctgaaggggtgtggaggagccactgaccatgcagagtcccaatcagtggagccctgagtccatcctttcctctgggccaaactcaggatgggccggctctcctctccttcctttcccttctcttttctcctcctcctgcctcttcttctttctccttctcctcctctttcttctccttttctcttctcttctcttctcttctcttctttctttctctctctctctacctctccctctctttttggggttttagcggttaatccctgcagtggcaggtccacctaggagccgggatcttgggtcctttgtctttcaggtgatgcagatcgtgctggggatcttgagtgcagtcctaggaggatttttctacatccgcgactacaccctcctc

SEQ ID NO: 21733 - DNA, 635 bp, Homo sapiens
  misc_feature 1..635: note = ENST00000461345
  source 1..635: mol_type = unassigned DNA; mol_type = unassigned DNA
agactgtgtccctgacaatgggaacagccgacagtgatgcagatcgtgctggggatcttgagtgcagtcctaggaggatttttctacatccgcgactacaccctcctcgtcacctcgggagctgccatctggacaggggctgtggctgtgctggctggagctgctgccttcatttacgagaaacggggtggtacatactgggccctgctgaggactctgctaacgctggcagctttctccacagccatcgctgccctcaaactttggaatgaagatttccgatatggctactcttattacaacagtgcctgccgcatctccagctcgagtgactggaacactccagcccccactcagagtccagaagaagtcagaaggctacacctatgtacctccttcatggacatgctgaaggccttgttcagaacccttcaggccatgctcttgggtgtctggattctgctgcttctggcatctctgacccctctgtggctgtactgctggagaatgttcccaaccaaagggaaaagagaccagaaggaaatgttggaagtgagtggaatctagccatgcctctcctgattattagtgcctggtgcttctgcaccgggcgtccctgcatctgactgctggaa

SEQ ID NO: 21734 - DNA, 827 bp, Homo sapiens
  misc_feature 1..827: note = ENST00000475536
  source 1..827: mol_type = unassigned DNA; mol_type = unassigned DNA
ggcagcagccggctgctggtggcctcgtgggtgatgcagatcgtgctggggatcttgagtgcagtcctaggaggatttttctacatccgcgactacaccctcctcgtcacctcgggagctgccatctggacaggggctgtggctgtgctggctggagctgctgccttcatttacgagaaacggggtggtacatactgggccctgctgaggactctgctaacgctggcagctttctccacagccatcgctgccctcaaactttggaatgaagatttccgatatggctactcttattacaacagtgcctgccgcatctccagctcgagtgactggaacactccagcccccactcagagtccagaagaagtcagaaggctacacctatgtacctccttcatggacatgctgaaggccttgttcagaacccttcaggccatgctcttgggtgtctggattctgctgcttctggcatctctgacccctctgtggctgtactgctggagaatgttcccaaccaaaggggtgagtccctaagaaaagagaccagaaggaaatgttggaagtgagtggaatctagccatgcctctcctgattattagtgcctggtgcttctgcaccgggcgtccctgcatctgactgctggaagaagaaccagactgaggaaaagaggctcttcaacagccccagttatcctggccccatgaccgtggccacagccctgctccagcagcacttgcccattccttacaccccttccccatcctgctccgcttcatgtcccctcctgagtagtcatgtgataataaactctcatgttattgttccca

SEQ ID NO: 21735 - DNA, 469 bp, Homo sapiens
  misc_feature 1..469: note = ENST00000468689
  source 1..469: mol_type = unassigned DNA; mol_type = unassigned DNA
gaggaactccccacctccagccgcagcagcactctctgccagcctccctctgaacaggacaccgagccagttatgtcttcttacttagcgatgtgattctctggccttctcagtgatgcagatcgtgctggggatcttgagtgcagtcctaggaggatttttctacatccgcgactacaccctcctcgtcacctcgggagctgccatctggacaggggctgtggctgtgctggctggagctgctgccttcatttacgagaaacggggtggtacatactgggccctgctgaggactctgctaacgctggcagctttctccacagccatcgctgccctcaaactttggaatgaagatttccgatatggctactcttattacaacagtgcctgccgcatctccagctcgagtgactggaacactccagcccccactcagagtccagaagaagtcagaaggctacacctatgt

SEQ ID NO: 21736 - DNA, 2065 bp, Homo sapiens
  misc_feature 1..2065: note = ENST00000462826
  source 1..2065: mol_type = unassigned DNA; mol_type = unassigned DNA
ctcctcctctttcttctccttttctcttctcttctcttctcttctcttctttctttctctctctctctacctctccctctctttttggggttttagcggttaatccctgcagtggcaggtccacctaggagccgggatcttgggtcctttgtctttcaggtgatgcagatcgtgctggggatcttgagtgcagtcctaggaggatttttctacatccgcgactacaccctcctcgtcacctcgggagctgccatctggacaggggctgtggtgagtagagcaggacagtgcttgactgcctgtgagaggggtggggcattgctctcctgattgccttcctccaacatggcgccacagaatgctggcagtcggagagatctgattatctaggaccattccctgcctgttcagatgagcaaacagctgagggcggtggtggcatgtcctattcacactgtctgctctcccatacccttcccagtgctgttcccaccaggctggctgcctctccctgccttcaacagttaatgtcaactaaggatctaaggacctgctcatctccagatacttgcattgagatggggaaggcagagcgttccagatagtatgtggtcccccaggaagcatcaccccctggttattctcattgtcctccacaggccctgtacacaatggaaacccaggaattgttgtcaacagatgggtgtgtgcagtttgcacaggagctgggtaggctggtcatggtacctacactctcagaatagcactaaaacactcatatttactgacagaagccgagagtaattaccttcacccagcctgtggcaaaatacccagcttaattacagaattagccaaacaggattcaggtccacctgtccactgggacatactagatttcctgttcttcaagcccagctgagtggattattgggcactgttaggacaggcttctagacctaacagtgcccactctgtatagactcacccttcattgagatcttctccagcaccccatgacttttatccacaggatcccaccatccctagaactttcataaagcacttggtgttgtttaaaaaggaaggtttagaagggaagaggggctcacacctggcttgaccacaagctcttaggtgtcactaaagcagggccttttgcagcctcaggagttggatccaggctccaccctctcagcaattatcttaccatggataataaagcttagcatgaaacctcccgcccaagctgtgtgctggggaagggcctgcatggaggctctctcgtgggagaggagttgcatttcctgtactaagcctgctcctggctcaatctctccccaggctgtgctggctggagctgctgccttcatttacgagaaacggggtggtacatactgggtaagttcagggaagggcatgggaggggaccaggttcaggctggaggtcaccccaatctcctgccctgttgcaggcttctctgggccttgcccttttttcccccgactggactctgagagagactgaaacacaaagatttctctctgcctcctccctccccaggccctgctgaggactctgctaacgctggcagctttctccacagccatcgctgccctcaaactttggaatgaagatttccgatatggctactcttattacaacagtgcctgccgcatctccagctcgagtgactggaacactccagcccccactcagagtccagaagaagtcagaaggctacacctatgtacctccttcatggacatgctgaagaaaagagaccagaaggaaatgttggaagtgagtggaatctagccatgcctctcctgattattagtgcctggtgcttctgcaccgggcgtccctgcatctgactgctggaagaagaaccagactgaggaaaagaggctcttcaacagccccagttatcctggccccatgaccgtggccacagccctgctccagcagcacttgcccattccttacaccccttccccatcctgctccgcttcatgtcccctcctgagtagtcatgtgataataaactctcatgttattgtt

SEQ ID NO: 21737 - DNA, 862 bp, Homo sapiens
  misc_feature 1..862: note = ENST00000475007
  source 1..862: mol_type = unassigned DNA; mol_type = unassigned DNA
gcctcaggagttggatccaggctccaccctctcagcaattatcttaccatggataataaagcttagcatgaaacctcccgcccaagctgtgtgctggggaagggcctgcatggaggctctctcgtgggagaggagttgcatttcctgtactaagcctgctcctggctcaatctctccccaggctgtgctggctggagctgctgccttcatttacgagaaacggggtggtacatactgggccctgctgaggactctgctaacgctggcagctttctccacagccatcgctgccctcaaactttggaatgaagatttccgatatggctactcttattacaacagtgcctgccgcatctccagctcgagtgactggaacactccagcccccactcagagtccagaagaagtcagaaggctacacctatgtacctccttcatggacatgctgaaggccttgttcagaacccttcaggccatgctcttgggtgtctggattctgctgcttctggcatctctgacccctctgtggctgtactgctggagaatgttcccaaccaaaggggtgagtccctaagaaaagagaccagaaggaaatgttggaagtgagtggaatctagccatgcctctcctgattattagtgcctggtgcttctgcaccgggcgtccctgcatctgactgctggaagaagaaccagactgaggaaaagaggctcttcaacagccccagttatcctggccccatgaccgtggccacagccctgctccagcagcacttgcccattccttacaccccttccccatcctgctccgcttcatgtcccctcctgagtagtcatgtgataataaactctcatgttattgt

SEQ ID NO: 21738 - DNA, 652 bp, Homo sapiens
  misc_feature 1..652: note = ENST00000481305
  source 1..652: mol_type = unassigned DNA; mol_type = unassigned DNA
gctgtgtgctggggaagggcctgcatggaggctctctcgtgggagaggagttgcatttcctgtactaagcctgctcctggctcaatctctccccaggctgtgctggctggagctgctgccttcatttacgagaaacggggtggtacatactgggccctgctgaggactctgctaacgctggcagctttctccacagccatcgctgccctcaaactttggaatgaagatttccgatatggctactcttattacaacagtgcctgccgcatctccagctcgagtgactggaacactccagcccccactcagagtccagaagaagtcagaaggctacacctatgtacctccttcatggacatgctgaagaaaagagaccagaaggaaatgttggaagtgagtggaatctagccatgcctctcctgattattagtgcctggtgcttctgcaccgggcgtccctgcatctgactgctggaagaagaaccagactgaggaaaagaggctcttcaacagccccagttatcctggccccatgaccgtggccacagccctgctccagcagcacttgcccattccttacaccccttccccatcctgctccgcttcatgtcccctcctgagtagtcatgtgataataaactctcatgttattg

SEQ ID NO: 21739 - DNA, 534 bp, Homo sapiens
  misc_feature 1..534: note = ENST00000474166
  source 1..534: mol_type = unassigned DNA; mol_type = unassigned DNA
ggccctgctgaggactctgctaacgctggcagctttctccacagccatcgctgccctcaaactttggaatgaagatttccgatatggctactcttattacaacagtgcctgccgcatctccagctcgagtgactggaacactccagcccccactcagagtccagaagaagtcagaaggctacacctatgtacctccttcatggacatgctgaaggccttgttcagaacccttcaggccatgctcttgggtgtctggattctgctgcttctggcatctctgacccctctgtggctgtactgctggagaatgttcccaaccaaaggggtgagtccctaaggtgtgtgcctgtgtatttggggcagtggaactgctcaaaggagacaggaatggacagtggacagtttggggaggagaaaggggcccatgacccaagtcccacctattatcatgcctgtctttctacccagtggtggcccagcccagaaagcccctatccccaaccaagtggcccccaagtcaaagagcccaggaat

SEQ ID NO: 21740 - DNA, 1265 bp, Homo sapiens
  misc_feature 1..1265: note = ENST00000492607
  source 1..1265: mol_type = unassigned DNA; mol_type = unassigned DNA
ctcggggtcagctagtgtccgctctgctcggccgcgggctcccggaggactgcaggaggactcacgtaggagggagggacagctgggtgcaggtgtttctccccagaaaaacggctggagagcgggaggagaggcctggggctggcgcgtcccgtccaccttctgccgcctgcacgcctggaccctggctggagccctacggcaggatgacgcaaaacacggtgattgtgaatggagttgctatggcctctaggccatcccagcccacccacgtcaacgtccacatccaccaggagtcagctttgacacaactgctgaaagctggaggttctctgaagaagtttctttttcaccctggggacactgtgccttccacagccaggattggttatgagcagctggctctaggggtgactcagatattgctgggggttgtgagttgtgttcttggagtgtgtctcagcttggggccctggactgtgctgagtgcctcaggctgtgccttctgggcggggtctgtggtgatcgcagcaggagctggggccattgtccatgagaagcacccgggcaaacttgctggctatatatccagcctgctcaccctggcaggctttgctacagctatggctgctgttgtcctctgcgtgaatagcttcatctggcaaactgaaccctttttatacatcgacactgtgtgtgatcgctcagaccctgtcttccctaccactgggtacagatggatgcggcgaagtcaagagaaccaatggcagaaggaggagtgtagagcttacatgcagatgctgaggaagttgttcacagcaatccgtgccctgttcctggctgtctgtgtcttgaaggtcattgtgtccttggtttccttgggagtaggtcttcgaaacttgtgtggccagagctcccagcccctgaatgaggaaggatcagagaagaggctactgggggagaattcagtgcccccttcgccctctagggagcagacctccactgccattgtcctgtgagctgccaaagaccccacggggtgcccgcatgtccctgtctagggcagcccagggcccccactcctggctcctcacacttgcctcccctatggccgctctccagaccctcctcctttcttctccccacatccgcacctgctgttcccactctggggttctcaagtccatgaacagatattgttgcattttccacaatgctgattaaacataataaacaatccagaaaagcagttttgcccagaaaga

SEQ ID NO: 21741 - DNA, 1129 bp, Homo sapiens
  misc_feature 1..1129: note = ENST00000326442
  source 1..1129: mol_type = unassigned DNA; mol_type = unassigned DNA
gtcgctcccctgctcggggtcagctagtgtccgctctgctcggccgcgggctcccggaggactgcaggcaggatgacgcaaaacacggtgattgtgaatggagttgctatggcctctaggccatcccagcccacccacgtcaacgtccacatccaccaggagtcagctttgacacaactgctgaaagctggaggttctctgaagaagtttctttttcaccctggggacactgtgccttccacagccaggattggttatgagcagctggctctaggggtgactcagatattgctgggggttgtgagttgtgttcttggagtgtgtctcagcttggggccctggactgtgctgagtgcctcaggctgtgccttctgggcggggtctgtggtgatcgcagcaggagctggggccattgtccatgagaagcacccgggcaaacttgctggctatatatccagcctgctcaccctggcaggctttgctacagctatggctgctgttgtcctctgcgtgaatagcttcatctggcaaactgaaccctttttatacatcgacactgtgtgtgatcgctcagaccctgtcttccctaccactgggtacagatggatgcggcgaagtcaagagaaccaatggcagaaggaggagtgtagagcttacatgcagatgctgaggaagttgttcacagcaatccgtgccctgttcctggctgtctgtgtcttgaaggtcattgtgtccttggtttccttgggagtaggtcttcgaaacttgtgtggccagagctcccagcccctgaatgaggaaggatcagagaagaggctactgggggagaattcagtgcccccttcgccctctagggagcagacctccactgccattgtcctgtgagctgccaaagaccccacggggtgcccgcatgtccctgtctagggcagcccagggcccccactcctggctcctcacacttgcctcccctatggccgctctccagaccctcctcctttcttctccccacatccgcacctgctgttcccactctggggttctcaagtccatgaacagatattgttgcattttccacaatgctgattaaacataataaacaatccagaaaagcagttttgcccagaaa

SEQ ID NO: 21742 - DNA, 1430 bp, Homo sapiens
  misc_feature 1..1430: note = ENST00000447204
  source 1..1430: mol_type = unassigned DNA; mol_type = unassigned DNA
gctgaccatgctggaactgcggcgactacagagcctgcgggaacctcccctttcgcccaagatctgctctgtccccctcatcctcctcccagggccctggcgtctgggtcaagcagcgccccacacctcgacccctcaccccctcctcccgggctcttcctgcggcctcccctccacagtccgcaggctctgggacaggaccgagtccttggctgcctgtggagctcctgtgccagcagctgcgccccggctgcgctccggatacccccatccccgccaccgccgacctcccgctccaccgactgctgctcacgcccgacgggttcacgccgcccctgccccgtgaaggaccgcgctgcggtgcggaggcaggatgacgcaaaacacggtgattgtgaatggagttgctatggcctctaggccatcccagcccacccacgtcaacgtccacatccaccaggagtcagctttgacacaactgctgaaagctggaggttctctgaagaagtttctttttcaccctggggacactgtgccttccacagccaggattggttatgagcagctggctctaggggtgactcagatattgctgggggttgtgagttgtgttcttggagtgtgtctcagcttggggccctggactgtgctgagtgcctcaggctgtgccttctgggcggggtctgtggtgatcgcagcaggagctggggccattgtccatgagaagcacccgggcaaacttgctggctatatatccagcctgctcaccctggcaggctttgctacagctatggctgctgttgtcctctgcgtgaatagcttcatctggcaaactgaaccctttttatacatcgacactgtgtgtgatcgctcagaccctgtcttccctaccactgggtacagatggatgcggcgaagtcaagagaaccaatggcagaaggaggagtgtagagcttacatgcagatgctgaggaagttgttcacagcaatccgtgccctgttcctggctgtctgtgtcttgaaggtcattgtgtccttggtttccttgggagtaggtcttcgaaacttgtgtggccagagctcccagcccctgaatgaggaaggatcagagaagaggctactgggggagaattcagtgcccccttcgccctctagggagcagacctccactgccattgtcctgtgagctgccaaagaccccacggggtgcccgcatgtccctgtctagggcagcccagggcccccactcctggctcctcacacttgcctcccctatggccgctctccagaccctcctcctttcttctccccacatccgcacctgctgttcccactctggggttctcaagtccatgaacagatattgttgcattttccacaatgctgattaaacataataaacaatccagaaaagcagttttgcccagaaa

SEQ ID NO: 21743 - DNA, 1206 bp, Homo sapiens
  misc_feature 1..1206: note = ENST00000429904
  source 1..1206: mol_type = unassigned DNA; mol_type = unassigned DNA
cccacctcagcctcccaaagcactgggattacaggcgtgagctattgtgcccagctgggatcttgacaaagacactatttctctcctttcacctgtgctgtgtatttttccctcgcctagttcccagacctcactgctatatgtcttctccctggcaggcaggatgacgcaaaacacggtgattgtgaatggagttgctatggcctctaggccatcccagcccacccacgtcaacgtccacatccaccaggagtcagctttgacacaactgctgaaagctggaggttctctgaagaagtttctttttcaccctggggacactgtgccttccacagccaggattggttatgagcagctggctctaggggtgactcagatattgctgggggttgtgagttgtgttcttggagtgtgtctcagcttggggccctggactgtgctgagtgcctcaggctgtgccttctgggcggggtctgtggtgatcgcagcaggagctggggccattgtccatgagaagcacccgggcaaacttgctggctatatatccagcctgctcaccctggcaggctttgctacagctatggctgctgttgtcctctgcgtgaatagcttcatctggcaaactgaaccctttttatacatcgacactgtgtgtgatcgctcagaccctgtcttccctaccactgggtacagatggatgcggcgaagtcaagagaaccaatggcagaaggaggagtgtagagcttacatgcagatgctgaggaagttgttcacagcaatccgtgccctgttcctggctgtctgtgtcttgaaggtcattgtgtccttggtttccttgggagtaggtcttcgaaacttgtgtggccagagctcccagcccctgaatgaggaaggatcagagaagaggctactgggggagaattcagtgcccccttcgccctctagggagcagacctccactgccattgtcctgtgagctgccaaagaccccacggggtgcccgcatgtccctgtctagggcagcccagggcccccactcctggctcctcacacttgcctcccctatggccgctctccagaccctcctcctttcttctccccacatccgcacctgctgttcccactctggggttctcaagtccatgaacagatattgttgcattttccacaatgctgattaaacataataaacaatccagaaaagca

SEQ ID NO: 21744 - DNA, 1006 bp, Homo sapiens
  misc_feature 1..1006: note = ENST00000450753
  source 1..1006: mol_type = unassigned DNA; mol_type = unassigned DNA
cccgtcgctcccctgctcggggtcagctagtgtccgctctgctcggccgcgggctcccggaggactgcaggcaggatgacgcaaaacacggtgattgtgaatggagttgctatggcctctaggccatcccagcccacccacgtcaacgtccacatccaccaggagtcagctttgacacaactgctgaaagctggaggttctctgaagaagtttctttttcaccctggggacactgtgccttccacagccaggattggttatgagcagctggctctaggggtgatcgcagcaggagctggggccattgtccatgagaagcacccgggcaaacttgctggctatatatccagcctgctcaccctggcaggctttgctacagctatggctgctgttgtcctctgcgtgaatagcttcatctggcaaactgaaccctttttatacatcgacactgtgtgtgatcgctcagaccctgtcttccctaccactgggtacagatggatgcggcgaagtcaagagaaccaatggcagaaggaggagtgtagagcttacatgcagatgctgaggaagttgttcacagcaatccgtgccctgttcctggctgtctgtgtcttgaaggtcattgtgtccttggtttccttgggagtaggtcttcgaaacttgtgtggccagagctcccagcccctgaatgaggaaggatcagagaagaggctactgggggagaattcagtgcccccttcgccctctagggagcagacctccactgccattgtcctgtgagctgccaaagaccccacggggtgcccgcatgtccctgtctagggcagcccagggcccccactcctggctcctcacacttgcctcccctatggccgctctccagaccctcctcctttcttctccccacatccgcacctgctgttcccactctggggttctcaagtccatgaacagatattgttgcattttccacaatgctgattaaacataataaacaatccagaaaagc

SEQ ID NO: 21745 - DNA, 1303 bp, Homo sapiens
  misc_feature 1..1303: note = ENST00000434545
  source 1..1303: mol_type = unassigned DNA; mol_type = unassigned DNA
cgagtgggagcgcagggggcgcgcgggggctcggtcttctcccgcccggtccgctcctccgggcggaaccccctttgccgggcccccgggccgcagctggtttcgggaaaccgcgcagcctgggcggggccgcagcccccacccgtgcatctgccgtctccgccctcccgtcgctcccctgctcggggtcagctagtgtccgctctgctcggccgcgggctcccggaggactgcaggtgaggccaggcaggatgacgcaaaacacggtgattgtgaatggagttgctatggcctctaggccatcccagcccacccacgtcaacgtccacatccaccaggagtcagctttgacacaactgctgaaagctggaggttctctgaagaagtttctttttcaccctggggacactgtgccttccacagccaggattggttatgagcagctggctctaggggtgactcagatattgctgggggttgtgagttgtgttcttggagtgtgtctcagcttggggccctggactgtgctgagtgcctcaggctgtgccttctgggcggggtctgtggtgatcgcagcaggagctggggccattgtccatgagaagcacccgggcaaacttgctggctatatatccagcctgctcaccctggcaggctttgctacagctatggctgctgttgtcctctgcgtgaatagcttcatctggcaaactgaaccctttttatacatcgacactgtgtgtgatcgctcagaccctgtcttccctaccactgggtacagatggatgcggcgaagtcaagagaaccaatggcagaaggaggagtgtagagcttacatgcagatgctgaggaagttgttcacagcaatccgtgccctgttcctggctgtctgtgtcttgaaggtcattgtgtccttggtttccttgggagtaggtcttcgaaacttgtgtggccagagctcccagcccctgaatgaggaaggatcagagaagaggctactgggggagaattcagtgcccccttcgccctctagggagcagacctccactgccattgtcctgtgagctgccaaagaccccacggggtgcccgcatgtccctgtctagggcagcccagggcccccactcctggctcctcacacttgcctcccctatggccgctctccagaccctcctcctttcttctccccacatccgcacctgctgttcccactctggggttctcaagtccatgaacagatattgttgcattttccacaatgctgattaaacataataaacaatccagaaaagcagttttgccc

SEQ ID NO: 21746 - DNA, 569 bp, Homo sapiens
  misc_feature 1..569: note = ENST00000437068
  source 1..569: mol_type = unassigned DNA; mol_type = unassigned DNA
aacgaaaaaagaagtccatctcatagcaggttgaaatgaagtgggagaaaaatctctggtcatcgttctatcgctccactgacactcggtgtctttttctttcagaagaggggcttgagcagagagaatgcttagaggctaagcgatgggcaagtgagagggaaagagccgcgacagatagagctggctgcctaggggtctcagaggcttcatcctgcaggcggcaggcggcaggacaaagggaccttcggactccagatcaagattccaaggagttaaacgctaccacgcagcccgacctggatgggatttgctcctgggtacaaaacgggacactgatcaaaatcaacttggacaagtgacaagagtattgcgcagcgatgcacggccatcaagtaccacttttctcagcccatccgcttgcgaaacattccttttaatttaaccaagaccatacagcaagatgagtggcacctgcttcatttaagaagaatcactgctggcttcctcggcatggccgtagccgtccttctctgcggctgcattgtggccacagtcagtttcttctg

SEQ ID NO: 21747 - DNA, 836 bp, Homo sapiens
  misc_feature 1..836: note = ENST00000482239
  source 1..836: mol_type = unassigned DNA; mol_type = unassigned DNA
gggaaagtgtgagaggaagagttggagaaaagtcgggggaaagtagggacagggttaaggggagagaggaggatgagggcggcgaggagagattaaaaggggaaggggggtcgctggagaggagggcggactgtggatcggaggtattgcgcagcgatgcacggccatcaagtaccacttttctcagcccatccgcttgcgaaacattccttttaatttaaccaagaccatacagcaagatgagtggcacctgcttcatttaagaagaatcactgctggcttcctcggcatggccgtagccgtccttctctgcggctgcattgtggccacagtcagtttcttctgggaggagagcttgacccagcacgtggctggactcctgttcctcatgacagggatattttgcaccatttccctctgtacttatgccgccagtatctcgtatgatttgaaccggctcccaaagctaatttatagcctgcctgctgatgtggaacatggttacagctggtccatcttttgcgcctggtgcagtttaggctttattgtggcagctggaggtctctgcatcgcttatccgtttattagccggaccaagattgcacagctaaagtctggcagagactccacggtatgactgtcctcactgggcctgtccacagtgcgagcgactcctgaggggaacagcgcggagttcaggagtccaagcacaaagcggtcttttacattccaacctgttgcctgccagccctttctggattactgatagaaaatcatgcaaaacctcccaacctttctaaggacaagactactgtggattcaagtgctttaatgac

SEQ ID NO: 21748 - DNA, 1662 bp, Homo sapiens
  misc_feature 1..1662: note = ENST00000281961
  source 1..1662: mol_type = unassigned DNA; mol_type = unassigned DNA
attgtgtctggcggcggcgcgcgagcccaccggcggctgcggcggggcgggaagccatggagccgcgggcgctcgtcacggcgctcagcctcggcctcagcctgtgctccctggggctgctcgtcacggccatcttcaccgaccactggtacgagaccgacccccggcgccacaaggagagctgcgagcgcagccgcgcgggcgccgaccccccggaccagaagaaccgcctgatgccgctgtcgcacctgccgctgcgggactcgcccccgctggggcgccggctgctcccgggcggcccggggcgcgccgaccccgagtcctggcgctcgctcctggggctcggcgggctggacgccgagtgcggccggcccctcttcgccacctactcgggcctctggaggaagtgctacttcctgggcatcgaccgggacatcgacaccctcatcctgaaaggtattgcgcagcgatgcacggccatcaagtaccacttttctcagcccatccgcttgcgaaacattccttttaatttaaccaagaccatacagcaagatgagtggcacctgcttcatttaagaagaatcactgctggcttcctcggcatggccgtagccgtccttctctgcggctgcattgtggccacagtcagtttcttctgggaggagagcttgacccagcacgtggctggactcctgttcctcatgacagggatattttgcaccatttccctctgtacttatgccgccagtatctcgtatgatttgaaccggctcccaaagctaatttatagcctgcctgctgatgtggaacatggttacagctggtccatcttttgcgcctggtgcagtttaggctttattgtggcagctggaggtctctgcatcgcttatccgtttattagccggaccaagattgcacagctaaagtctggcagagactccacggtatgactgtcctcactgggcctgtccacagtgcgagcgactcctgaggggaacagcgcggagttcaggagtccaagcacaaagcggtcttttacattccaacctgttgcctgccagccctttctggattactgatagaaaatcatgcaaaacctcccaacctttctaaggacaagactactgtggattcaagtgctttaatgactatttatgcgttgactgtgagaatagggagcagtgccatgggacatttctaggtgtagagaaagaagaaactgcaatggaaaaatttgtatgatttccatttatttcagaaagtttgtatgtaacaattacccgagagtcatttctacttgcaaaaggattcgtaacaaagcgagtataattttcttgtcattgtatcatgcttgttaaattttaatgcagcatcttcagaacttgtcctgatggtgtcttattgtgtcagcaccaaatatttgtgcattatttgtggacgttccttgtcacaggaagattcttcttctgttgccttattgtttttttttttttaagtctcttctctgtctttgtactggaatcgaaatcataagataaacagatcaaacgtgcttaagagctaactcgtgacactatgcagtattgtttgaagacctgttgttcaacctctgtctctttatgttaactggatttctgcattaaatgactgcccccttgttaa

SEQ ID NO: 21749 - DNA, 571 bp, Homo sapiens
  misc_feature 1..571: note = ENST00000413011
  source 1..571: mol_type = unassigned DNA; mol_type = unassigned DNA
agtttagaaggcgcaactgtggggatgggcccccttttccccactcatagagagatttctgtctggagatgtcagttccacttggtcaagaggaggttttcccttcccatcctcaccaggtattgcgcagcgatgcacggccatcaagtaccacttttctcagcccatccgcttgcgaaacattccttttaatttaaccaagaccatacagcaagatgagtggcacctgcttcatttaagaagaatcactgctggcttcctcggcatggccgtagccgtccttctctgcggctgcattgtggccacagtcagtttcttctgggaggagagcttgacccagcacgtggctggactcctgttcctcatgacagggatattttgcaccatttccctctgtacttatgccgccagtatctcgtatgatttgaaccggctcccaaagctaatttatagcctgcctgctgatgtggaacatggttacagctggtccatcttttgcgcctggtgcagtttaggctttattgtggcagctggaggtctctgcatcgcttatccgtttattagccggacc

SEQ ID NO: 21750 - DNA, 515 bp, Homo sapiens
  misc_feature 1..515: note = ENST00000495402
  source 1..515: mol_type = unassigned DNA; mol_type = unassigned DNA
ttacaagcacggaacagaggaggagatgggtcttgagtatatttgcagtgatttaaaagggaccacacatttccctagcacagaagctgttctaaggccagctcttgtgagtctgagaaaatagtttctccccacttcacaccctctctccagcattaagcagcttctgtgagatgcaggtattgcgcagcgatgcacggccatcaagtaccacttttctcagcccatccgcttgcgaaacattccttttaatttaaccaagaccatacagcaagatgagtggcacctgcttcatttaagaagaatcactgctggcttcctcggcatggccgtagccgtccttctctgcggctgcattgtggccacagtcagtttcttctgggaggagagcttgacccagcacgtggctggactcctgttcctcatgacagggatattttgcaccatttccctctgtacttatgccgccagtatctcgtatgatttgaaccggctcccaaagctaatttatagcc

SEQ ID NO: 21751 - DNA, 1286 bp, Homo sapiens
  misc_feature 1..1286: note = ENST00000618232
  source 1..1286: mol_type = unassigned DNA; mol_type = unassigned DNA
gggaagccatggagccgcgggcgctcgtcacggcgctcagcctcggcctcagcctgtgctccctggggctgctcgtcacggccatcttcaccgaccactggtacgagaccgacccccggcgccacaaggagagctgcgagcgcagccgcgcgggcgccgaccccccggaccagaagaaccgcctgatgccgctgtcgcacctactcgggcctctggaggaagtgctacttcctgggcatcgaccgggacatcgacaccctcatcctgaaaggtattgcgcagcgatgcacggccatcaagtaccacttttctcagcccatccgcttgcgaaacattccttttaatttaaccaagaccatacagcaagatgagtggcacctgcttcggatattttgcaccatttccctctgtacttatgccgccagtatctcgtatgatttgaaccggctcccaaagctaatttatagcctgcctgctgatgtggaacatggttacagctggtccatcttttgcgcctggtgcagtttaggctttattgtggcagctggaggtctctgcatcgcttatccgtttattagccggaccaagattgcacagctaaagtctggcagagactccacggtatgactgtcctcactgggcctgtccacagcacaaagcggtcttttacattccaacctgttgcctgccagccctttctggattactgatagaaaatcatgcaaaacctcccaacctttctaaggacaagactactgtggattcaagtgctttaatgactatttatgcgttgactgtgagaatagggagcagtgccatgggacatttctaggtgtagagaaagaagaaactgcaatggaaaaatttgtatgatttccatttatttcagaaagtttgtatgtaacaattacccgagagtcatttctacttgcaaaaggattcgtaacaaagcgagtataattttcttgtcattgtatcatgcttgttaaattttaatgcagcatcttcagaacttgtcctgatggtgtcttattgtgtcagcaccaaatatttgtgcattatttgtggacgttccttgtcacaggaagattcttcttctgttgccttattgtttttttttttttaagtctcttctctgtctttgtactggaatcgaaatcataagataaacagatcaaacgtgcttaagagctaactcgtgacactatgcagtattgtttgaagacctgttgttcaacctctgtctctttatgttaactggatttctgcattaaatgactgccccc

SEQ ID NO: 21752 - DNA, 10558 bp, Homo sapiens
  misc_feature 1..10558: note = ENST00000565468
  source 1..10558: mol_type = unassigned DNA; mol_type = unassigned DNA
cgccgctttgttccgggtgcggcgagggaaggcgaggctgcggcggatcatgcccatggtgtagccgccaagcggaggcatggctgccggaaggttactgctctacactggcctctcgctagcgctctgcgccctcggcatgctggccgtggccatctgctcggaccactggtacgagacggacgccaggaagcacagggacaggtgcaaggccttcaacacccgccgggtcgaccccggcttcatttacaacaataacaacaacttgccgctccgggcgagccgctcgcgcctggaccgctgggagggcaaactcctccgggcccggaatcgccggcagctgttcgccatgagccccgcggacgagtgcagccggcagtacaactccaccaacatgggcctctggaggaagtgccaccggcagggcttcgaccccgagatcgccgccctcattcggaaaggagaaattgagcgatgtacgtacatcaaataccactactcctcagcaaccatccccaggaacctcactttcaatatcacgaagaccatccgtcaggatgagtggcatgccctacacctgcgcagaatgacggctggcttcatgggcatggcggtggccatcatcctctttggctggatcatcggcgtgctgggctgctgctgggaccgaggccttatgcagtacgtggcagggctgctcttcctcatgggaggaaccttctgcatcatttcactgtgcacctgtgtggccgggatcaactttgagctgtcacgctacccacgctacctgtacggactccctgatgacatcagccatggctatggctggtccatgttctgtgcatgggggggcctgggcctcacactcatctcgggattcttctgtaccttagccccttctgttcaacctgtcccgaggaccaactaccctaaatccagacccgagaatgggacagtgtgctaaaaaacaaacccatacatacatatatatatataaatatatatatataatatacatatataaaacaaaacaaaactaaatcaagacgatgccagtgccaaggtagagttgagttggctcaggcacctgcatctcgccggactttgtgttgcctcatctctgagatggggaaagtttttccatcctgtggctcttccatcagttcttgacttttggcttcatggtctcttgaagacagagcaaacaccaccacttgcgaccgcgtcttgatccccatcactggcgaggatggggtggtgaagggacagtggaaggggtctgaggcagcacagatgtagagaaggaagtgccacccactgggtcaacgggagaggacgccacccctaaccagtcatatcacagggtaacaaagccctcagttcctagaatgtaaccaaattattgaggccattttcagaatcacttcttctcctgctcttcctgttcggacttccttcccagcccaccagcaacacacaaggagtggaagagaaaacaaactgagaaggacgttttctctttgctgccaaacttttggaccatgtttcataggtgggaagggaagagaacatgctgagaggcaagatctgcatcaatgaaaggacgcttcggtggatgctcagacaacccagtcttaccttccagctgccttacacccagtgaaacaagaggccaccctgtccccagccgcacctgcactccctgggcagactggagccttggagtcatgctgtgatgtgtgtgtgtgggtgtgcgtgcatgtgtactttgggcggtttcctttttttcttttctaccttttaaatggaaatactgcattatgactgttgtctctcttatcactgtagtggtttcatggccccagatagaggcccagagacctagaaattgtcatgagggacaggcctataagggtgccaattctgcagctacagatccctggagtggtgtgtgtgtgcgtgtgtgtgtgtgtgtgtgtgtgtgtgtgtgtgtgtggtggatgtttcttgagcgtggggttttattgtttgtgttgtgtttttttaaattgtttctggtatagctgaaatttccagagggcagaaccaagaacaaagccactgggccagaggacccccgtggttctccacattacagctctgggactctgcacgatttagtcctctaattttggaagttcaagacacagctgggcacataagccatgagagaagagggggaacacacagttcaggagagagaagaaatgttgctctggttgctgttgtacaagaacataaaccaacaagaccttcactccccattatagaagctgtcctttgtcactggacatctcccctttccctaggggtgacctctgtacaaacgaaaggaagtgggtcacatgcagagagagcacctccatttcccatgggctcaagtttgtatgatattgtgtaaattaatgcagaactcttgactctttccatcctcttcctttccctcttgatattcaaggccatgaatcccaaaataacagtcttagtggctagcacccaaacagaggtggaataaatccaccccagtgtctcgggctcatttgagcaaattagcactgcaggtgctggcaagcaaagtcagccagagagttgtgaacgctgtaggggtgggagtctgctggagtgggctggagccgctcacagtcatctcagtgagcctgctggtgcccagcagccctggggaggccaggtgagaatccctgagctggtgtagccatggtcaactgtgtagcagagaatccccttgtttcataaacaaatatgctttgggagctttgccaggcactcagcagcctttcttccactgctgtgtaatctgtttcatttacacgtcttccaacccatcttcctaccactctcctccttttctcacctactaaccacttaccttctctctcttctatcttccaccctcatctgctcctttgaactgcgtgtatgtaattcatatctggatatgatatgacatctgatgtgcatgaatggggttgaatgtggatctctctgtatgtgtatctctctggtgcattttgtgtacgtttgtgtcagtacacacctgcacacaggtgtgggtgccctactcaagacttccttaccggggactctggtcagcttctgcaaaaggtctcatgtgtgagttccctgtgtgtgggtgtgctgggcgatagggtaaggtgtgcaacgggaaaagttgttagcttccagttggggttctaaggattatttttaaaacaaaggatttattctatgagaagggaaataattttcaggaaaacccagtttttcaattgggcattttatttctaattttctttgaaaagttagatttctcccttaaggggaagggcatacttgggcttaaggaaaagtgaagaaaagtatctcagattgagaggccttttgtcttccttccaagcgtcctgaaggggctctgccgaggaagggacagacaggttcacaagcatccatttgggggagagggcttgtctatgaccacactgaaattccagcttttttccagttgcaggagagaggggaaaaattctaaatggggaaatttgctatgaaccatttaaactttttgtaagtaatcatgtttgaggatgctggctcacagacctatcattatttatatcctctttttaaaaaaaaatcccatactttcaatgaatagattatctgctctatccaattattgtctttgtgacagacatttagcaaagcttactgcatccctttgaaaccttgagagttcctgaaatgttagaaagctcccaggaaagacgtaaacaacctgggctcaactcaccagcccagagcaggggctttgagtgacttctttgatagcaggaccagataaatacgaacacactttgggatctgatcctgctgggaagcaaaagacgcccagccacatgaccaggatagaggcccctttcagacggcaagtcctggccaatgggaggacttctcaggtgaccttgatccctctagcataagggcttgaccacagattaaaacatgtgactccaaccagttacggaagctttctggctgtgaggtagctgagggagatgaggaggaggaagagaggagccttgacttgtgaggctctgtaggtcagactctgctaactccaaatcaaagtggaacccaaccttatgagggcatttagggtcaatgacctcactaaagtcaccagccgcaaccccaggtcaagttcaaacttcttactggcatatgaacatgtatgtgctttgagctccatgcaagtcaaccttgagcctggggcccattgcaacttttatttccttccctactctactaccttgagattcaggaaagtgaggtattctacctagagagaggtcccatatctttttctccttattttgggagttacggtttcttcttctgtttccgtttcctctctctctactcactcctactttctcctgcatcaactttggtcaattaacatagacaagtgattcatctgtagagaggctcctagactccaagcagcccccttccttgttcattgtggctgtaggttttataaggaggtctgtggctccctggcatcaaaatatgaaaaataaaatctgtgcctgttccagcttcaatcctcctccaagccttagcttttcaacaaccctaccctttcaacttcagggatcatggagtcacagagactggacaactcctccaaatctagacaaagactttcttaagcgccctgagcccaggtgcatatcttcccatcagggatgagtggtcccacctagcaatgcttgcctctcctgtgacaagagggtaggatatcctaggactctgagactgggccctatatctcaatattcatccacactcatgataagatgccggaaatgaatgcactgtgtgtagctgtcttgatttagtgggaggatgtgctgcttaggtctccaaagatgcccacctgggtcaaattcagaataatgaactcaggtacatcacccagaggcatttagaatggactctctcttcacctggattatgtgctgagtgttaagtgatttttcaaatatctgggggaaggagtgggaagagatacactctggtcatcctttggtgtggtttgtgggggatacttggttgattcttgtagttaaagtgaagttgcttttctgaaaatgttccctgtcttcaggggacttacccatcccaggggacacatccatcccaggggacacagccagccctttccagggaaatacgatgtttctgagtgagaggtgatttcagtgcagataggaagagctggtgcacaccagcagggttgccttccatgccatcttccagctggtgtgggatagactaagggggcagatttttaagaaccccaccagagttgacatacacacgtgattctcgtgtctgtctctcaaagctctcaatgtctggggctgtgtttgccctcttttcattgatgctgccatgatgcaaaatgtttcttaaacattattcctggttcttagaatatgtgattactgagtattggatttctttcctgaataataactgctcattgtagaaaataagaaaaataaaatacaaaaaagactacaagatttttcataatccagtcactctgaggcatctaccgcgggcccaatccaaatggtcatgacctcaaaacttccccaatgagtgcttgtctctgggttggcagctggggccatgtgagcagtgtacaccacagaaccgcactggtctgcgttgagttgaccctgtgttcctggcagcaagagtgcagggccctgagcccccagagatagcaaagaggcctaaaagtttaatgccagaccttaggggcaggatggagcagggctaaaagatgtctctttgggcctgtctgcctgctttccttccttccttttctttcctttttttttttggtcagttgccatctcaatctaatcatagatgtaagaatgcggaagccagagtaactcactcattaagctacacttgtgtaacagttactgtaaatttcactacagctctgcactgaaatgatttgtgactctgggcactgtgtcttctccatacttgaacttcctcatctacaaaatgaggataagtgataacaccttacctcatggtatattaagggtgacaaagaaattgcaaagtgatttgcaaacatgaagtgtcatatgagttatgtatgttctaattatccctcagaagaccccccgctggaatggaattctcacatcaagtgtctgtgcctcgctgctgaaggataacccagagtgcaaggtcatctttgttgctgaacagggctggacctgtcgcacttaagcacacttaaaggattctattcttcattcaggtcccccagagaaattggctccttatttttctttacctattcctagacttccttttgtctagagccagttttgcaaagggcacttttatccatctcagttattcccagaggtgacagaatgagtaaaccatatggggcaaatagcatatatgagctaaaccagttaactgttaaccaaggcacatggtcaatgccttagtatttttttttttaattctcctaacgttatttctagctgtacattcccaaaaggaatgggtggaagcaaatcagattctgaaaggtttcaatgatctttcaagtttaggatgagaccaagtctcaaggagctgggatcttctttctcttgtcagttgctgaagccagtagcttcgtcaaaaacatatgaattcatataaggaagccctttagatggtacattcactaagacgtgtctgggtgtgatcctgtttgggaaaaacagaatcctaggttctaaacaagaaaagaacgcccttcccaaagggtccgcacactttctgctttgcagcggatcaagtgtccttgtgagggtgagacttccttcaagggaagggaagccattgctctctctgtagatagagcccagctggtaacgggggagccacccaactgcaggggggtgtatgttcaggtgtgaaaaacagaaaactgggtctgaacatgaagagttgcacagcagtagttcgaagaagctggcatctctttggcaaacaccaacctcagcaaatgcaactcctacacttcattcccaaggaccaggtgttgctccttaaggaactctgtatccctctctcctctccagaaccccattcctcccactggctgagcttttcctttcctttccgggtcacccatagaccctctccgtctgtaccagtgcgtctgtgttgtgagcgtgacgaagcctttcctgtgaagagctttcatgaactcattctcatactccttccccatttccacccatggtgtgactgttttgctattcaagactatctgtaaaaatgtacaaataaaagtgaaaactgaaaataaaggggagggagattgagattaaacaaatgcaatgatgtagcccttagttttctgaggacttctgtggacggccctaaaatcctgagttagggtgggatatgaagggagggataccattgacacaggaggtttttttctggttgtttctctcacagtcatcagtgtctgcttagaactctctgttctaaaggtttttccctgtaaagtagaatgcacttcccccaaaataaaagtaaatcagcaatgtttgaagggtcatggcaagggtcatgacaaagacctgactctggggtggcatgagtggccctgtcaccggctcactcagggccttgggggagtctcattacctcaccttgtctccacgtcttctcagccaaatggggatcaggggcttccagggctctgggggtgcgcagtccccttgtgtattttgctgctatttctagagagactttgagcccttgctagtgcgtgcttactgcatggaggtaaattaggagatgttttctctctgctactcctggcctctgctttcgcccctcagaaagtgaccttgagctagcagccagtttgcactcagagtccagagccttctatctaccgtttcattctcagattccttttcccacccactttgacgatctcattttactatcagtctctactgactgagctttgctgcactgggctggggtaggagaaagagcatccaaggagatgatgtgtgaattgctttgtaatttatgactcaccatataaatgtggcttgcagtgtcagaagcagggagtctggccaagggttgctaccaaataagactgaagatggtggaggcagtggtggcgtggaggcagtaggcagaagatgtgggttgggagcagaggtaagatgaacggagctttgggaaggacagatggcagaagcaccagaaaatcctcagcaaggcagcagagaaggatcctcaaagcagtaaccctgaagtaataggaagtaggaaagaggagcagggattaggtaaatctgcagcataaacagctgtctccctgcaggactgagaagaccagctgccccagagaggggaggcacgtcgagcttggccagtgacccaacccatgattagaggcaccttcaatcccaactttcctctcctctgctgggtcacagtgatggaaccagcttcaggaaggtagtatagaccagcgtcatccaatggaaccatgatccaagccacatatgcaatttaaaatattctagtagccacattttttaaagtccaaagaaacagctaaaatcagtgaaattaatttttagactacattttaacctaacatgtcaaaaatagtatcacttcagcatggaatcaatataaaaattactgggatattttacattcttttttccaaatgaagtcttcaaaatccaatgtgattttcctcttagaaaacatctcagtctggcccagccctatttccagtgttcaatagccacacctgactactggttgctgtataggacagcacggacttaggttcttcattaggagactgatggggggggtccttcctggtgggtcactcactgccatagctcttgtcatagctgatgaaggcaggagtgagtcttattatgttggcctagagtagaaagcacagagctatgtcgaggctgctgtctcagcctctggaagttctgcttcacctgcttagtaagaggagatgaccactcctgtggactgcatgtcccatctgcccccagagggtgtcggcgctgccccagtcatgtcccttatgacctgtccaagtcctagaggccaaagcaggtcatattcttcagctgcaggaatgtcagctactgcctcccaccccttaacctgatccccttatcatatagtggggaaggggcaggcaggccttctctctgtcaagaacaaagatctctacaacatttcgtcacctgggccagtcacctgctaatatcatctcaccaatatttggagctgttttctgaatcccttaattttcttaaatatttatcttaaagtcaaatgctataaaggagataccctgggaagggcagtggccacaggcagactgggtctcctaggaggtggtggtgttggtgacaagttctacttggactgggactcaacccaccattgcctacctctcttccctgcctggagaccttccttaggattgaagaaacctcttttgtttgtgaaaaagataggtatcgagatcttaatggagagaacagaataaaatgcaaggagccaacccctgggtattctcaaagcatttcaacggtcagtataacaaggtttgattgatttaaaatataacattctgagccctgtgttactgagcaaaaatgagctgatttggtgagtatgttttatatatggtcattagacagggaccataactgacaaaactctcaaacgcctggagtgtttatggcccaccagattattgctcagtcaatataaatttatttacctttattttaatttgcatagtgctttctgattggtcagacaaggagtggtgtgtactgcaggattctaacaatgcctctgcccttggaggcagcaattcctgtggttattggtgctaaaataagataaaatattatgttaatttgttctgatatgatgtgaataaatgtgttgtttaatcttaacaagaatgctacatcttatcagatctattgtactgtctgttccttctcataattaattaattacaggaaaggcgattcaaaccagatcttgaaactattgtgatgttctgagaggtaaatttaacagggaagtgggaggggggatgaaaagggaaattgccaggttcctgtgactttgaaaggactgaggaagcagagagcatttggggacttcactgaaactgactgcatcttgcaattttctttttcgaattggcagaaatattgtatttccattgattgaagaaaaacaagtgtctggtaattaattaaatgacttgttcatggaaaaaataaataatctgtcagttgtggaatgtaaactgattaaacaattaaataaagaagattatgttgtgtgttttaaa

SEQ ID NO: 21753 - DNA, 474 bp, Homo sapiens
  misc_feature 1..474: note = ENST00000563442
  source 1..474: mol_type = unassigned DNA; mol_type = unassigned DNA
cggaccactggtacgagacggacgccaggaagcacagggacaggtgcaaggccttcaacacccgccgggtcgaccccggcttcatttacaacaataacaacaacttgccgctccgggcgagccgctcgcgcctggaccgctgggagggcaaactcctccgggcccggaatcgccggcagctgttcgccatgagccccgcggacgagtgcagccggcagtacaactccaccaacatgggcctctggaggaagtgccaccggcagggcttcgaccccgagatcgccgccctcattcggaaaggagaaattgagcgatgtacgtacatcaaataccactactcctcagcaaccatccccaggaacctcactttcaatatcacgaagaccatccgtcaggatgagtggcatgccctacgtaagtgcacctgagtctcagtggctgtgactgtgctgtgaggtcccctttggagggatt

SEQ ID NO: 21754 - DNA, 10552 bp, Homo sapiens
  misc_feature 1..10552: note = ENST00000610315
  source 1..10552: mol_type = unassigned DNA; mol_type = unassigned DNA
cgccgctttgttccgggtgcggcgagggaaggcgaggctgcggcggatcatgcccatggtgtagccgccaagcggaggcatggctgccggaaggttactgctctacactggcctctcgctagcgctctgcgccctcggcatgctggccgtggccatctgctcggaccactggtacgagacggacgccaggaagcacagggacaggtgcaaggccttcaacacccgccgggtcgaccccggcttcatttacaacaataacaacaacttgccgctccgggcgagccgctcgcgcctggaccgctgggagggcaaactcctccgggcccggaatcgccggcagctgttcgccatgagccccgcggacgagtgcagccggcagtacaactccaccaacatgggcctctggaggaagtgccaccggcagggcttcgaccccgagatcgccgccctcattcggaaaggagaaattgagcgatgtacgtacatcaaataccactactcctcagcaaccatccccaggaacctcacttttaacgtgaccaagactttgcgttgtatgtactgtatgtacctgcgcagaatgacggctggcttcatgggcatggcggtggccatcatcctctttggctggatcatcggcgtgctgggctgctgctgggaccgaggccttatgcagtacgtggcagggctgctcttcctcatgggaggaaccttctgcatcatttcactgtgcacctgtgtggccgggatcaactttgagctgtcacgctacccacgctacctgtacggactccctgatgacatcagccatggctatggctggtccatgttctgtgcatgggggggcctgggcctcacactcatctcgggattcttctgtaccttagccccttctgttcaacctgtcccgaggaccaactaccctaaatccagacccgagaatgggacagtgtgctaaaaaacaaacccatacatacatatatatatataaatatatatatataatatacatatataaaacaaaacaaaactaaatcaagacgatgccagtgccaaggtagagttgagttggctcaggcacctgcatctcgccggactttgtgttgcctcatctctgagatggggaaagtttttccatcctgtggctcttccatcagttcttgacttttggcttcatggtctcttgaagacagagcaaacaccaccacttgcgaccgcgtcttgatccccatcactggcgaggatggggtggtgaagggacagtggaaggggtctgaggcagcacagatgtagagaaggaagtgccacccactgggtcaacgggagaggacgccacccctaaccagtcatatcacagggtaacaaagccctcagttcctagaatgtaaccaaattattgaggccattttcagaatcacttcttctcctgctcttcctgttcggacttccttcccagcccaccagcaacacacaaggagtggaagagaaaacaaactgagaaggacgttttctctttgctgccaaacttttggaccatgtttcataggtgggaagggaagagaacatgctgagaggcaagatctgcatcaatgaaaggacgcttcggtggatgctcagacaacccagtcttaccttccagctgccttacacccagtgaaacaagaggccaccctgtccccagccgcacctgcactccctgggcagactggagccttggagtcatgctgtgatgtgtgtgtgtgggtgtgcgtgcatgtgtactttgggcggtttcctttttttcttttctaccttttaaatggaaatactgcattatgactgttgtctctcttatcactgtagtggtttcatggccccagatagaggcccagagacctagaaattgtcatgagggacaggcctataagggtgccaattctgcagctacagatccctggagtggtgtgtgtgtgcgtgtgtgtgtgtgtgtgtgtgtgtgtgtgtgtgtgtggtggatgtttcttgagcgtggggttttattgtttgtgttgtgtttttttaaattgtttctggtatagctgaaatttccagagggcagaaccaagaacaaagccactgggccagaggacccccgtggttctccacattacagctctgggactctgcacgatttagtcctctaattttggaagttcaagacacagctgggcacataagccatgagagaagagggggaacacacagttcaggagagagaagaaatgttgctctggttgctgttgtacaagaacataaaccaacaagaccttcactccccattatagaagctgtcctttgtcactggacatctcccctttccctaggggtgacctctgtacaaacgaaaggaagtgggtcacatgcagagagagcacctccatttcccatgggctcaagtttgtatgatattgtgtaaattaatgcagaactcttgactctttccatcctcttcctttccctcttgatattcaaggccatgaatcccaaaataacagtcttagtggctagcacccaaacagaggtggaataaatccaccccagtgtctcgggctcatttgagcaaattagcactgcaggtgctggcaagcaaagtcagccagagagttgtgaacgctgtaggggtgggagtctgctggagtgggctggagccgctcacagtcatctcagtgagcctgctggtgcccagcagccctggggaggccaggtgagaatccctgagctggtgtagccatggtcaactgtgtagcagagaatccccttgtttcataaacaaatatgctttgggagctttgccaggcactcagcagcctttcttccactgctgtgtaatctgtttcatttacacgtcttccaacccatcttcctaccactctcctccttttctcacctactaaccacttaccttctctctcttctatcttccaccctcatctgctcctttgaactgcgtgtatgtaattcatatctggatatgatatgacatctgatgtgcatgaatggggttgaatgtggatctctctgtatgtgtatctctctggtgcattttgtgtacgtttgtgtcagtacacacctgcacacaggtgtgggtgccctactcaagacttccttaccggggactctggtcagcttctgcaaaaggtctcatgtgtgagttccctgtgtgtgggtgtgctgggcgatagggtaaggtgtgcaacgggaaaagttgttagcttccagttggggttctaaggattatttttaaaacaaaggatttattctatgagaagggaaataattttcaggaaaacccagtttttcaattgggcattttatttctaattttctttgaaaagttagatttctcccttaaggggaagggcatacttgggcttaaggaaaagtgaagaaaagtatctcagattgagaggccttttgtcttccttccaagcgtcctgaaggggctctgccgaggaagggacagacaggttcacaagcatccatttgggggagagggcttgtctatgaccacactgaaattccagcttttttccagttgcaggagagaggggaaaaattctaaatggggaaatttgctatgaaccatttaaactttttgtaagtaatcatgtttgaggatgctggctcacagacctatcattatttatatcctctttttaaaaaaaaatcccatactttcaatgaatagattatctgctctatccaattattgtctttgtgacagacatttagcaaagcttactgcatccctttgaaaccttgagagttcctgaaatgttagaaagctcccaggaaagacgtaaacaacctgggctcaactcaccagcccagagcaggggctttgagtgacttctttgatagcaggaccagataaatacgaacacactttgggatctgatcctgctgggaagcaaaagacgcccagccacatgaccaggatagaggcccctttcagacggcaagtcctggccaatgggaggacttctcaggtgaccttgatccctctagcataagggcttgaccacagattaaaacatgtgactccaaccagttacggaagctttctggctgtgaggtagctgagggagatgaggaggaggaagagaggagccttgacttgtgaggctctgtaggtcagactctgctaactccaaatcaaagtggaacccaaccttatgagggcatttagggtcaatgacctcactaaagtcaccagccgcaaccccaggtcaagttcaaacttcttactggcatatgaacatgtatgtgctttgagctccatgcaagtcaaccttgagcctggggcccattgcaacttttatttccttccctactctactaccttgagattcaggaaagtgaggtattctacctagagagaggtcccatatctttttctccttattttgggagttacggtttcttcttctgtttccgtttcctctctctctactcactcctactttctcctgcatcaactttggtcaattaacatagacaagtgattcatctgtagagaggctcctagactccaagcagcccccttccttgttcattgtggctgtaggttttataaggaggtctgtggctccctggcatcaaaatatgaaaaataaaatctgtgcctgttccagcttcaatcctcctccaagccttagcttttcaacaaccctaccctttcaacttcagggatcatggagtcacagagactggacaactcctccaaatctagacaaagactttcttaagcgccctgagcccaggtgcatatcttcccatcagggatgagtggtcccacctagcaatgcttgcctctcctgtgacaagagggtaggatatcctaggactctgagactgggccctatatctcaatattcatccacactcatgataagatgccggaaatgaatgcactgtgtgtagctgtcttgatttagtgggaggatgtgctgcttaggtctccaaagatgcccacctgggtcaaattcagaataatgaactcaggtacatcacccagaggcatttagaatggactctctcttcacctggattatgtgctgagtgttaagtgatttttcaaatatctgggggaaggagtgggaagagatacactctggtcatcctttggtgtggtttgtgggggatacttggttgattcttgtagttaaagtgaagttgcttttctgaaaatgttccctgtcttcaggggacttacccatcccaggggacacatccatcccaggggacacagccagccctttccagggaaatacgatgtttctgagtgagaggtgatttcagtgcagataggaagagctggtgcacaccagcagggttgccttccatgccatcttccagctggtgtgggatagactaagggggcagatttttaagaaccccaccagagttgacatacacacgtgattctcgtgtctgtctctcaaagctctcaatgtctggggctgtgtttgccctcttttcattgatgctgccatgatgcaaaatgtttcttaaacattattcctggttcttagaatatgtgattactgagtattggatttctttcctgaataataactgctcattgtagaaaataagaaaaataaaatacaaaaaagactacaagatttttcataatccagtcactctgaggcatctaccgcgggcccaatccaaatggtcatgacctcaaaacttccccaatgagtgcttgtctctgggttggcagctggggccatgtgagcagtgtacaccacagaaccgcactggtctgcgttgagttgaccctgtgttcctggcagcaagagtgcagggccctgagcccccagagatagcaaagaggcctaaaagtttaatgccagaccttaggggcaggatggagcagggctaaaagatgtctctttgggcctgtctgcctgctttccttccttccttttctttcctttttttttttggtcagttgccatctcaatctaatcatagatgtaagaatgcggaagccagagtaactcactcattaagctacacttgtgtaacagttactgtaaatttcactacagctctgcactgaaatgatttgtgactctgggcactgtgtcttctccatacttgaacttcctcatctacaaaatgaggataagtgataacaccttacctcatggtatattaagggtgacaaagaaattgcaaagtgatttgcaaacatgaagtgtcatatgagttatgtatgttctaattatccctcagaagaccccccgctggaatggaattctcacatcaagtgtctgtgcctcgctgctgaaggataacccagagtgcaaggtcatctttgttgctgaacagggctggacctgtcgcacttaagcacacttaaaggattctattcttcattcaggtcccccagagaaattggctccttatttttctttacctattcctagacttccttttgtctagagccagttttgcaaagggcacttttatccatctcagttattcccagaggtgacagaatgagtaaaccatatggggcaaatagcatatatgagctaaaccagttaactgttaaccaaggcacatggtcaatgccttagtatttttttttttaattctcctaacgttatttctagctgtacattcccaaaaggaatgggtggaagcaaatcagattctgaaaggtttcaatgatctttcaagtttaggatgagaccaagtctcaaggagctgggatcttctttctcttgtcagttgctgaagccagtagcttcgtcaaaaacatatgaattcatataaggaagccctttagatggtacattcactaagacgtgtctgggtgtgatcctgtttgggaaaaacagaatcctaggttctaaacaagaaaagaacgcccttcccaaagggtccgcacactttctgctttgcagcggatcaagtgtccttgtgagggtgagacttccttcaagggaagggaagccattgctctctctgtagatagagcccagctggtaacgggggagccacccaactgcaggggggtgtatgttcaggtgtgaaaaacagaaaactgggtctgaacatgaagagttgcacagcagtagttcgaagaagctggcatctctttggcaaacaccaacctcagcaaatgcaactcctacacttcattcccaaggaccaggtgttgctccttaaggaactctgtatccctctctcctctccagaaccccattcctcccactggctgagcttttcctttcctttccgggtcacccatagaccctctccgtctgtaccagtgcgtctgtgttgtgagcgtgacgaagcctttcctgtgaagagctttcatgaactcattctcatactccttccccatttccacccatggtgtgactgttttgctattcaagactatctgtaaaaatgtacaaataaaagtgaaaactgaaaataaaggggagggagattgagattaaacaaatgcaatgatgtagcccttagttttctgaggacttctgtggacggccctaaaatcctgagttagggtgggatatgaagggagggataccattgacacaggaggtttttttctggttgtttctctcacagtcatcagtgtctgcttagaactctctgttctaaaggtttttccctgtaaagtagaatgcacttcccccaaaataaaagtaaatcagcaatgtttgaagggtcatggcaagggtcatgacaaagacctgactctggggtggcatgagtggccctgtcaccggctcactcagggccttgggggagtctcattacctcaccttgtctccacgtcttctcagccaaatggggatcaggggcttccagggctctgggggtgcgcagtccccttgtgtattttgctgctatttctagagagactttgagcccttgctagtgcgtgcttactgcatggaggtaaattaggagatgttttctctctgctactcctggcctctgctttcgcccctcagaaagtgaccttgagctagcagccagtttgcactcagagtccagagccttctatctaccgtttcattctcagattccttttcccacccactttgacgatctcattttactatcagtctctactgactgagctttgctgcactgggctggggtaggagaaagagcatccaaggagatgatgtgtgaattgctttgtaatttatgactcaccatataaatgtggcttgcagtgtcagaagcagggagtctggccaagggttgctaccaaataagactgaagatggtggaggcagtggtggcgtggaggcagtaggcagaagatgtgggttgggagcagaggtaagatgaacggagctttgggaaggacagatggcagaagcaccagaaaatcctcagcaaggcagcagagaaggatcctcaaagcagtaaccctgaagtaataggaagtaggaaagaggagcagggattaggtaaatctgcagcataaacagctgtctccctgcaggactgagaagaccagctgccccagagaggggaggcacgtcgagcttggccagtgacccaacccatgattagaggcaccttcaatcccaactttcctctcctctgctgggtcacagtgatggaaccagcttcaggaaggtagtatagaccagcgtcatccaatggaaccatgatccaagccacatatgcaatttaaaatattctagtagccacattttttaaagtccaaagaaacagctaaaatcagtgaaattaatttttagactacattttaacctaacatgtcaaaaatagtatcacttcagcatggaatcaatataaaaattactgggatattttacattcttttttccaaatgaagtcttcaaaatccaatgtgattttcctcttagaaaacatctcagtctggcccagccctatttccagtgttcaatagccacacctgactactggttgctgtataggacagcacggacttaggttcttcattaggagactgatggggggggtccttcctggtgggtcactcactgccatagctcttgtcatagctgatgaaggcaggagtgagtcttattatgttggcctagagtagaaagcacagagctatgtcgaggctgctgtctcagcctctggaagttctgcttcacctgcttagtaagaggagatgaccactcctgtggactgcatgtcccatctgcccccagagggtgtcggcgctgccccagtcatgtcccttatgacctgtccaagtcctagaggccaaagcaggtcatattcttcagctgcaggaatgtcagctactgcctcccaccccttaacctgatccccttatcatatagtggggaaggggcaggcaggccttctctctgtcaagaacaaagatctctacaacatttcgtcacctgggccagtcacctgctaatatcatctcaccaatatttggagctgttttctgaatcccttaattttcttaaatatttatcttaaagtcaaatgctataaaggagataccctgggaagggcagtggccacaggcagactgggtctcctaggaggtggtggtgttggtgacaagttctacttggactgggactcaacccaccattgcctacctctcttccctgcctggagaccttccttaggattgaagaaacctcttttgtttgtgaaaaagataggtatcgagatcttaatggagagaacagaataaaatgcaaggagccaacccctgggtattctcaaagcatttcaacggtcagtataacaaggtttgattgatttaaaatataacattctgagccctgtgttactgagcaaaaatgagctgatttggtgagtatgttttatatatggtcattagacagggaccataactgacaaaactctcaaacgcctggagtgtttatggcccaccagattattgctcagtcaatataaatttatttacctttattttaatttgcatagtgctttctgattggtcagacaaggagtggtgtgtactgcaggattctaacaatgcctctgcccttggaggcagcaattcctgtggttattggtgctaaaataagataaaatattatgttaatttgttctgatatgatgtgaataaatgtgttgtttaatcttaacaagaatgctacatcttatcagatctattgtactgtctgttccttctcataattaattaattacaggaaaggcgattcaaaccagatcttgaaactattgtgatgttctgagaggtaaatttaacagggaagtgggaggggggatgaaaagggaaattgccaggttcctgtgactttgaaaggactgaggaagcagagagcatttggggacttcactgaaactgactgcatcttgcaattttctttttcgaattggcagaaatattgtatttccattgattgaagaaaaacaagtgtctggtaattaattaaatgacttgttcatggaaaaaataaataatctgtcagttgtggaatgtaaactgattaaacaattaaataaagaagattatgttgtgtgttttaaa

SEQ ID NO: 21755 - DNA, 588 bp, Homo sapiens
  misc_feature 1..588: note = ENST00000415614
  source 1..588: mol_type = unassigned DNA; mol_type = unassigned DNA
ctctcgcccgggccggccatggcgctcaacaatttccttttcgctcagtgcgcctgctacttcttggccttcctgttcagcttcgtggtggtggtcccgctgtccgagaacggccacgacttccgcggccgctgcctgctcttcaccgagggcatgtggctgagcgccaacctcacggtgcaggagcgcgagcgcttcacggtgcaggagtggggcccgccggccgcctgccgcttcagcctgctcgccagcctcctgtctctgctgctggccgccgcgcacgcctggcgcacgctcttcttcctctgcaagggacacgagggctccttcttctccgccttcctgaacctcctggtcagcgccttcgtggtcttcctggtcttcattgccagcaccatcgtgagcgtgggcttcaccatgtggtgcgacaccatcaccgagaagggcaccgtaccccacagctgtgaagagctccaggacatcgacttggagctgggcgtggacaactccgccttctacgatcagtttgcaattgcccagggttccctgattgactcacatggcgtggagactcctcccgggcagtcc

SEQ ID NO: 21756 - DNA, 815 bp, Homo sapiens
  misc_feature 1..815: note = ENST00000556320
  source 1..815: mol_type = unassigned DNA; mol_type = unassigned DNA
gcctgatccacgagaaggagctgctgctggcccggccgtccccacgcacctccttccaagaggagaagagcgctgtcatttaggcacagtgcaggcagggggagctggccccgacctccctgctgcgctcgggggcacgggcctgcctggggaagcagctggggggctctgcctgggccctggccacatgcagccctgcgtgtgtcccctcgacgccacgtgtagtgagccctgacccactggacatggggactctttccagtccggagagctccttgtctgtgtccccagcagaaggtggggtggctcctgcctcaccctctgcccagccctgatccaggccacagccatctagggccctgaaggaggggcaggaggcaggggtggcttctggaacctgaggcttggccccggttgggtctgttcttgggggctgcactgctggatcccaggagcaggtgtggaacagccccatggccagggtgatggaaatcctcggctgcatgcagacatagacccaccctggactgggctgtctccggagcccagacacatcgccctgggaaggggcagctgggcctgcagtgtgctgggcaggggctggcggccctggtcgtgggctctccagggtccctcaggggattgggcctctccccaggcaggaaggtgggaagtgcaggcatgacccggggttcctgaggctggtccaccaagttgcttctgagacgccttcgcttctgtcctggctggctgttaatgatatccctgttctaattccactctggctaaactgaaagtaaagatccttaagctta

SEQ ID NO: 21757 - DNA, 1430 bp, Homo sapiens
  misc_feature 1..1430: note = ENST00000556573
  source 1..1430: mol_type = unassigned DNA; mol_type = unassigned DNA
aattcccgcatctcccgcaggccgcccttctctggcccctggaccccgggctcctggcccgcgcgcaccaggagctgtccgcggtgctgaccgcaggcgcttcccgcgctcggccgatgcgcacgcgtcccgggaggggcgcgcgggacctgccggcgccgccactgcgcagcctcccgcggcctccccgcccggcgcagcctcccgcggccttcccgccgccgctctcgcccgggccggccatggcgctcaacaatttccttttcgctcagtgcgcctgctacttcttggccttcctgttcagcttcgtggtggtggtcccgctgtccgagaacggccacgacttccgcggccgctgcctgctcttcaccgagggcatgtggctgagcgccaacctcacggtgcaggagcgcgagcgcttcacggtgcaggagtggggcccgccggccgcctgccgcttcagcctgctcgccagcctcctgtctctgctgctggccgccgcgcacgcctggcgcacgctcttcttcctctgcaagggacacgagggctccttcttctccgccttcctgaacctcctggtcagcgccttcgtggtcttcctggtcttcattgccagcaccatcgtgagcgtgggcttcaccatgtggtgcgacaccatcaccgagaagggcaccgtaccccacagctgtgaagagctccaggacatcgacttggagctgggcgtggacaactccgccttctacgatcagtttgcaattgcccagtttggcctctgggcctcatggctggcctggctggccatcaccacgctggccttcctgaaggtctaccacaactaccgtcaggaggacctgctggacagcctgatccacgagaaggagctgctgctggcccggccgtccccacgcacctccttccaagaggagaagagcgctgtcatttaggcacagtgcaggcagggggagctggccccgacctccctgctgcgctcgggggcacgggcctgcctggggaagcagctggggggctctgcctgggccctggccacatgcagccctgcgtgtgtcccctcgacgccacgtgtagtgaggtgagcgccccagtgcccacctgtgagcctggcagtggactgggtgggtgccggctccctgatgaggatggtgcagagagactatgggtgtggggcgggggcggggggcacctccaggcctcgcacagggccccttggctgtcccagtaggacctgactggccagcctatgtggagggcgtccagcttgtctcccccaaccctggccggatgctgtctccatgccagctggcccaggggtggccagatgtcacttagccctgaacgaattctgcatgaattctgccatccaggcagaggctgcgtgtggggaggagctcacggcaccttccagcctctgg

SEQ ID NO: 21758 - DNA, 2513 bp, Homo sapiens
  misc_feature 1..2513: note = ENST00000341595
  source 1..2513: mol_type = unassigned DNA; mol_type = unassigned DNA
aataaaacaaaaatattttttaatgcttgcaacaaaaatgctgatggaattttaaaccaggaggagcaatgttaaggcttcctcactctgggaattggactaaaggtgacttagtcttaaaggcaactagaaaaggcattaattctattaattaatgcctcagcgatttccatctcagcaaagatgtcttaatgaggcgctcgggacacccattatttatcttacaaatgcagctccagggtcctgcccatgtcaggcagtgtaacacacgtccccgcggagggctggcgctgcagaagctcccggtccaccccctcctgcccacacctggcctcaccctccccatctcttcgaggatgacctctgtcccagtcccttggaccccgactcctccacgatctggcccctcccctcatacattgcatttcgggacccccgcaaaggaatcacttcagcctggactgcaaaccgcactcctacacctcactatgagcaccttgggggtgtcctccaacaccccccgccccgccctctctctcctggtctcctttcgttcgagctgatgaggaactgacgacccagagtcggcctgtgtgaggcccgtacaggtggctcccgaagtctttagcggcacagggtcggtccctccaggccgacctggtaaaattcccgcatctcccgcaggccgcccttctctggcccctggaccccgggctcctggcccgcgcgcaccaggagctgtccgcggtgctgaccgcaggcgcttcccgcgctcggccgatgcgcacgcgtcccgggaggggcgcgcgggacctgccggcgccgccactgcgcagcctcccgcggcctccccgcccggcgcagcctcccgcggccttcccgccgccgctctcgcccgggccggccatggcgctcaacaatttccttttcgctcagtgcgcctgctacttcttggccttcctgttcagcttcgtggtggtggtcccgctgtccgagaacggccacgacttccgcggccgctgcctgctcttcaccgagggcatgtggctgagcgccaacctcacggtgcaggagcgcgagcgcttcacggtgcaggagtggggcccgccggccgcctgccgcttcagcctgctcgccagcctcctgtctctgctgctggccgccgcgcacgcctggcgcacgctcttcttcctctgcaagggacacgagggctccttcttctccgccttcctgaacctcctggtcagcgccttcgtggtcttcctggtcttcattgccagcaccatcgtgagcgtgggcttcaccatgtggtgcgacaccatcaccgagaagggcaccgtaccccacagctgtgaagagctccaggacatcgacttggagctgggcgtggacaactccgccttctacgatcagtttgcaattgcccaggtagggggctctgggcaagaagggaggcttgcaatgctgggagggggccatttactgctggacatttgctgagctctcccccatccagaggaggaggcaggctcctgtgtggataaggtagttagcaatgggaccaggcagtgggagcagtcgggaaggcttcctgcaggaggtgggggagagctgggcttttgtaggtgggtttggggaggagatggccacagtgagttagaatcaggaagtggcaaggccctggggtctggggtgggaagtgtgggggtgtggggggaggtggtgccagaaacgaaaccaggcatcagatcctgggggtccagtgtagggacaagggctttggactttggtgctggcgctgggtgggcctgttcagatcagagctggaggcttagaggagtcccctagccagggggaagctgatacagagtccaaggaaggaggcaggggatcccacttgtgaattcagatttgccaccctgcccttgtataagctgcgtcccccgccccctaggagacttggtggagggcgatggtggcccccactctgagggacgctatttgctgaaatgcaggcatgtggggacacatcagtggcccgtgagggccggagggggaaccctggaattgggtttgccccttgaaatctgcagatgtgccccagacggagatgaggcagatgaggggtgccgggtgggggtggctgagaccagacacctggctcctgccagcactgatcagggcccgctggcttcaggtccaattccggaccccaggctggcctctgaaggctcttgctggccgtggctggcctgaggacgcttctcctggccaggagccctccaagggtgctggacatgggtgggcctgaatgctctttgccgagatgaactggacctgtcaaagacaccttcatgcaaatttagtgagtggaagaggcctcaggcctaatttgtgccagttggattaaggtgtgagtgcagtctgatggcaaatacgctcaaatgagaatcagcttaatgtagctcaggcctggttctgattaaattgtttctccttcaactgtttggaaa

SEQ ID NO: 21759 - DNA, 636 bp, Homo sapiens
  misc_feature 1..636: note = ENST00000615704
  source 1..636: mol_type = unassigned DNA; mol_type = unassigned DNA
atggcgctcaacaatttccttttcgctcagtgcgcctgctacttcttggccttcctgttcagcttcgtggtggtggtcccgctgtccgagaacggccacgacttccgcggccgctgcctgctcttcaccgagggcatgtggctgagcgccaacctcacggtgcaggagcgcgagcgcttcacggtgcaggagtggggcccgccggccgcctgccgcttcagcctgctcgccagcctcctgtctctgctgctggccgccgcgcacgcctggcgcacgctcttcttcctctgcaagggacacgagggctccttcttctccgccttcctgaacctcctggtcagcgccttcgtggtcttcctggtcttcattgccagcaccatcgtgagcgtgggcttcaccatgtggtgcgacaccatcaccgagaagggcaccgtaccccacagctgtgaagagctccaggacatcgacttggagctgggcgtggacaactccgccttctacgatcagtttgcaattgcccaggtccaattccggaccccaggctggcctctgaaggctcttgctggccgtggctggcctgaggacgcttctcctggccaggagccctccaagggtgctggacatgggtgggcctga

SEQ ID NO: 21760 - DNA, 1645 bp, Homo sapiens
  misc_feature 1..1645: note = ENST00000616017
  source 1..1645: mol_type = unassigned DNA; mol_type = unassigned DNA
gtgagggtgtgactgagtgcatgagagtgtgactgcctgtgagtgaatgtgtgactgcatgtgcgagtgactgcctgggaggatgtgattgtgcatgagtgtgcatgtgggtgtgactgcatgtgagggtgtgactgttgtgcgtgtgaaggcttgattgtgagtgtgcctgggaggatgtgagtgtgagggtgtgactccctgtgacatgagtgtgcatgcatgtgagtgtgaggaagagtgtgtaggtgtgagtgtctaggcaggtgtgtctgcagtgtgtgcagcatgtgcgtaagtgcatgtgaatgtgcgtgtgttgcatgtgagcatgtgcacgcctgtgcgtgtgagcattgtgtgcgtgatgggagccgtgggtgctgtgtggacagcccctctgcccctcccatgggctcccacgcccagcatccacctgagagaggagggagctgccttcccattctgcagagtctgtgtgctgaggccccgcagaagcaagtggaggagctgggatgtgaacctgggaccccggcgtagggggctgcttggctgtggaccctgcccctcaggaaagcccagggtccacctccagaggactcgttctggggcgggggcggaggcggggggcctccccacccggggctcgatgaggggctgtccgtttcttggctcgagtgctgccaagtgctccctgctgctgcgcccaccttcccggggagaggcgagcccctggctccctgagttcatgacccaccctgtccaccatcagcagctggcttgtgtctctgggtggctgggcaccagcctcctggaggccacgtgcctgggtccacatggagggtcctggtgggggcatcatcctgggtcccgggagtgaggctggcaggtgcccatcgggggtgtcaagtccagggggatcgaggctctggaagctcaagggggctctggccttggggaccagctgagtttccagctggcagccaggtcctcgagggaaggggtttggacagaatccgaggccccctaagctgatggggtcccctgtctccccttccagccctgacccactggacatggggactctttccagtccggagagctccttgtctgtgtccccagcagaaggtggggtggctcctgcctcaccctctgcccagccctgatccaggccacagccatctagggccctgaaggaggggcaggaggcaggggtggcttctggaacctgaggcttggccccggttgggtctgttcttgggggctgcactgctggatcccaggagcaggtgtggaacagccccatggccagggtgatggaaatcctcggctgcatgcagacatagacccaccctggactgggctgtctccggagcccagacacatcgccctgggaaggggcagctgggcctgcagtgtgctgggcaggggctggcggccctggtcgtgggctctccagggtccctcaggggattgggcctctccccaggcaggaaggtgggaagtgcaggcatgacccggggttcctgaggctggtccaccaagttgcttctgagacgccttcgcttctgtcctggctggctgttaatgatatccctgttctaattccactctggctaaactgaaagtaaagatccttaagctt

SEQ ID NO: 21761 - DNA, 586 bp, Homo sapiens
  misc_feature 1..586: note = ENST00000615269
  source 1..586: mol_type = unassigned DNA; mol_type = unassigned DNA
ctctcgcccgggccggccatggcgctcaacaatttccttttcgctcagtgcgcctgctacttcttggccttcctgttcagcttcgtggtggtggtcccgctgtccgagaacggccacgacttccgcggccgctgcctgctcttcaccgagggcatgtggctgagcgccaacctcacggtgcaggagcgcgagcgcttcacggtgcaggagtggggcccgccggccgcctgccgcttcagcctgctcgccagcctcctgtctctgctgctggccgccgcgcacgcctggcgcacgctcttcttcctctgcaagggacacgagggctccttcttctccgccttcctgaacctcctggtcagcgccttcgtggtcttcctggtcttcattgccagcaccatcgtgagcgtgggcttcaccatgtggtgcgacaccatcaccgagaagggcaccgtaccccacagctgtgaagagctccaggacatcgacttggagctgggcgtggacaactccgccttctacgatcagtttgcaattgcccagggttccctgattgactcacatggcgtggagactcctcccgggcagt

SEQ ID NO: 21762 - DNA, 815 bp, Homo sapiens; identical to SEQ ID NO: 21756
  misc_feature 1..815: note = ENST00000625459
  source 1..815: mol_type = unassigned DNA; mol_type = unassigned DNA

SEQ ID NO: 21763 - DNA, 1430 bp, Homo sapiens; identical to SEQ ID NO: 21757
  misc_feature 1..1430: note = ENST00000630378
  source 1..1430: mol_type = unassigned DNA; mol_type = unassigned DNA

SEQ ID NO: 21764 - DNA, 2513 bp, Homo sapiens; identical to SEQ ID NO: 21758
  misc_feature 1..2513: note = ENST00000625335
  source 1..2513: mol_type = unassigned DNA; mol_type = unassigned DNA

SEQ ID NO: 21765 - DNA, 636 bp, Homo sapiens; identical to SEQ ID NO: 21759
  misc_feature 1..636: note = ENST00000621393
  source 1..636: mol_type = unassigned DNA; mol_type = unassigned DNA

SEQ ID NO: 21766 - DNA, 1645 bp, Homo sapiens; identical to SEQ ID NO: 21760
  misc_feature 1..1645: note = ENST00000620158
  source 1..1645: mol_type = unassigned DNA; mol_type = unassigned DNA

SEQ ID NO: 21767 - DNA, 4178 bp, Homo sapiens
  misc_feature 1..4178: note = ENST00000296582
  source 1..4178: mol_type = unassigned DNA; mol_type = unassigned DNA
gagctgaaagtcttggtttggccttgggttccgctgtaggggaggtcccgtgcgaaagaatgaggagatcctggggccttacctactagcggaatcgactgaagagacgcctgccagtgcgggaggtaggaagctcgatccccaaagaaaagagcgagtgggcaggcagctgcgagacagaaccggagtgtgcagggtccctagaggccggttcctggtctgtgctgctctcctggaagccatggtacaggcagagctcagggcgatccccaggtgagggcagcggctctgcctgggattccaccgcagtacaaccgggtagatgcggggtggagaagaaaggatgttgcctgcactgctcgccaatagcaccctgagaggctacatttgcagaagcagcagcagcagaagacacagcgccggtccaggaggcggctcgagctgttcgtaaagtcgcccgacagctttttctccgtagtatgcgagttgacaaaacagccagagaacagggctccccattacaatcttttcgagatcttttcccttgctaaccggatctgatttgtgcgaaaacatgccttgcacttgtacctggaggaactggagacagtggattcgacctttagtagcggtcatctacctggtgtcaatagtggttgcggttcccctatgcgtgtgggaattacagaaactggaggttggaatacacaccaaggcttggtttattgctggaatctttttgctgttgactattcctatatcactgtgggtgatattgcaacacttagtgcattatacacaacctgaactacaaaaaccaataataaggattctttggatggtacctatttacagtttagatagttggatagctttgaaatatcccggaattgcaatatatgtggatacctgcagagaatgctatgaagcttatgtaatttacaactttatgggattccttaccaattatctaactaaccggtatccaaatctggtattaatccttgaagccaaagatcaacagaaacatttccctcctttatgttgctgtccaccatgggctatgggagaagtattgctgtttaggtgcaaactaggtgtattacagtacacagttgtcagacctttcaccaccatcgttgctttaatctgtgagctgcttggtatatatgacgaagggaactttagcttttcaaatgcttggacttatttggttataataaacaacatgtcacagttgtttgccatgtattgtctcctgctcttttataaagtactaaaagaagaactgagcccaatccaacctgttggcaaatttctttgtgtaaagctggtggtttttgtttctttttggcaagcagtagttattgctttgttggtaaaagttggcgttatttctgaaaagcatacgtgggaatggcaaactgtagaagctgtggccaccggactccaggattttattatctgtattgagatgttcctcgctgccattgctcatcattacacattctcatataaaccatatgtccaagaagcagaagagggctcatgctttgattcctttcttgccatgtgggatgtctcagatattagagatgatatttctgaacaagtaaggcatgttggacggacagtcaggggacatcccaggaaaaaattgtttcccgaggatcaagatcaaaatgaacatacaagtttattatcatcatcatcacaagatgcaatttccattgcttcttctatgccaccttcacccatgggtcactaccaagggtttggacacactgtgactccccagactacacctaccacagctaagatatctgatgaaatccttagtgatactataggagagaaaaaagaaccttcagataaatccgtggattcctgaacagtatggaaaagcaaactgtgcaactactacattatatcattacctggtatcccatggattttgtgcttgggacagaccataaatgatggaaaatgtcaacacaaaaatagctgaaagccaggtacaactactgcatttatatatgtaagttttgtatatcaaaaataattggtctaaatttcctagacttagacttgatttcttaacattagggtatcgcatactcaaatggtagacaatgaccccaactaaatcttcctgatgttacactgctttatcaagaggatggacttttttttttttgagacagacagagtcttgctctgtcacccaggctggagtgcagtggcgcaatctcgggtcactgcaagctctgcctcccaagttcatgccattctcctgcctcagcctcccaagtagctgggactacaggcacctgccaccatgcccagctaattttttttttttcagtagagacagggtctcaccatgttagccaggatggtcttgatctgacctcgtgatccgccgacctcggcctcccaaagtgctggaattacaggcgtgagccactgcgcctggccaagaatggacattttttaaaaaaacatcagtacttcctaccactgctgcatgagtataatgctccggaattatcagaaagcataatgcagaaatacgaattagtggaacttaatcatgtgccatataagcttacctaacaaacagttatatccctattcctcaactgaatgtctttcaataaataagaatttatcatttattttctgcaacttttttatgtctcattctttaaacattaaaaacccttaatattttaacaaaaatttcttgattagaggcacagtgaaaaagaagtcaaaaaaaaaagttctacttttcatcagtgctattaaaggtggcagcaaatgtaaatcttggctgaatggtcttaattactcattaaaccacagtcagaaagacatataggtgctatttgggaaaactttttattacctaggatggggtttctctaattgctaatcacaaccccactgggtcatgtttgacattttataatgaaaataaaacagaaagtgccatagtatgttacagaaagcaaagatgagtattgtttctcaaagcctttgctttatgtatttatacacatactcattcatatctatctatatatatagagagagatagtggttcacagtaatcatacaaagtctttattccatccactattataaacatttctattaaaactaaaactgggctctatgtaaaaaccccaaagatacacacacaaaaaaaatctgtttgttagaactcaagtgaattcagtaaagttgcagaatacaaaatcaacatacaaaaagcattagcatttttatacataaataatgaaaataatgacctaactgaaaaattaagatgccatttatgatagcataaaaaaaatacttacttaggaataaatttaacaccaaggcagtaaaagatctgtatgtacactgaaaactatgaaacactgatgaaagaaagacacaaataaatggaaaggtatcccgtgctcatggatcagaataatactgttaaaatggtcacactacccaaagcaattcagaatcaatgcaatcctatcaaaattccaatggcattatttacacaaacagaaaaaaatcctaaaattcatatgtaacgataaaagaccctgaataggcaaaagaatactgaggaaaaaatgttggagacatcacatttcctaattataaattatactacaaaactatagtaatcaagacagtatggtactggtataaaaacacatacacaggccagtgggacagaagaaagagtccagatataaatccaaacatacacagtcaactaatttttgacaaagacaccaagaagacacatcggggaaagaacagtcttcattaagtgttcttaatgaagatgctgggaaaactgcacttccacatgcaaaacaatgaaatcagacccttatcttagacctacacaacaatcaattcaaaatggataaaagacctaaatgtaagaccagaaactatagaagagaacataggagaaaagttcctggacactgacccttggcaatgattttttggatatcacaccaaaagctcagtcaacaaaaacaaaaacaaatgtgactacatcaaaccaaaaagcttctgacagtaaaagaaacagtcaacaaaatgaaacagtagcctacagattgagtaaaaaatatttgtaaggcatatat

SEQ ID NO: 21768 - DNA, 1528 bp, Homo sapiens
  misc_feature 1..1528: note = ENST00000508208
  source 1..1528: mol_type = unassigned DNA; mol_type = unassigned DNA
ctgaaagtcttggtttggccttgggttccgctgtaggggaggtcccgtgcgaaagaatgaggagatcctggggccttacctactagcggaatcgactgaagagacgcctgccagtgcgggaggtaggaagctcgatccccaaagaaaagagcgagtgggcaggcagctgcgagacagaaccggagtgtgcagggtccctagaggccggttcctggtctgtgctgctctcctggaagccatggtacaggcagagctcagggcgatccccaggtgagggcagcggctctgcctgggattccaccgcagtacaaccgggtagatgcggggtggagaagaaaggatgttgcctgcactgctcgccaatagcaccctgagaggctacatttgcagaagcagcagcagcagaagacacagcgccggtccaggaggcggctcgagctgttcgtaaagtcgcccgacagctttttctccgtagtatgcgagttgacaaaacagccagagaacagggctccccattacaatcttttcgagatcttttcccttgctaaccggatctgatttgtgcgaaaacatgccttgcacttgtacctggaggaactggagacagtggattcgacctttagtagcggtcatctacctggtgtcaatagtggttgcggttcccctatgcgtgtgggaattacagaaactggaggttggaatacacaccaaggcttggtttattgctggaatctttttgctgttgactattcctatatcactgtgggtgatattgcaacacttagtgcattatacacaacctgaactacaaaaaccaataataaggattctttggatggtacctatttacagtttagatagttggatagctttgaaatatcccggaattgcaatatatgtggatacctgcagagaatgctatgaagcttatgtaatttacaactttatgggattccttaccaattatctaactaaccggtatccaaatctggtattaatccttgaagccaaagatcaacagaaacatttccctcctttatgttgctgtccaccatgggctatgggagaagtattgctgtttaggtgcaaactaggtgtattacagtacacagttgtcagacctttcaccaccatcgttgctttaatctgtgagctgcttggtatatatgacgaagggaactttagcttttcaaatgcttggacttatttggttataataaacaacatgtcacagttgtttgccatgtattgtctcctgctcttttataaagtactaaaagaagaactgagcccaatccaacctgttggcaaatttctttgtgtaaagctggtggtttttgtttctttttggccttaaccccgaaactgactatactggagaaggaaaggccgtgtaaagacacaacaagaaagcagaatctgcaatccaggaagagaatcctcacaagaaaccaaacttgccaacaccttgatcatggtcttccagcctccagaactgtgagaaaataaatgcctattgttaaagcta

SEQ ID NO: 21769 - DNA, 774 bp, Homo sapiens
  misc_feature 1..774: note = ENST00000505999
  source 1..774: mol_type = unassigned DNA; mol_type = unassigned DNA
cttggtatatatgacgaagggaactttagcttttcaaatgcttggacttatttggttataataaacaacatgtcacagttgtttgccatgtattgtctcctgctcttttataaagtactaaaagaagaactgagcccaatccaacctgttggcaaatttctttgtgtaaagctggtggtttttgtttctttttgcatacgtgggaatggcaaactgtagaagctgtggccaccggactccaggattttattatctgtattgagatgttcctcgctgccattgctcatcattacacattctcatataaaccatatgtccaagaagcagaagagggctcatgctttgattcctttcttgccatgtgggatgtctcagatattagagatgatatttctgaacaagtaaggcatgttggacggacagtcaggggacatcccaggaaaaaattgtttcccgaggatcaagatcaaaatgaacatacaagtttattatcatcatcatcacaagatgcaatttccattgcttcttctatgccaccttcacccatgggtcactaccaagggtttggacacactgtgactccccagactacacctaccacagctaagatatctgatgaaatccttagtgatactataggagagaaaaaagaaccttcagataaatccgtggattcctgaacagtatggaaaagcaaactgtgcaactactacattatatcattacctggtatcccatggattttgtgcttgggacagaccataaatgatggaa

SEQ ID NO: 21770 - DNA, 638 bp, Homo sapiens
  misc_feature 1..638: note = ENST00000506826
  source 1..638: mol_type = unassigned DNA; mol_type = unassigned DNA
tgttcctaatttttttaccattataagaaacactgaagtgaatattcttatgtatacaactatgaaagcatgtccatgtcattatttgctgtttaaattttacctggggccattatctctagatttgcttgaaatgctcagcttgactccctatcttgagacaaaactactagaaaaatgaatttgtaaagcaaattaatatatttaacatagagtttcttcagcaatatgctgtaaaggcagggtggtggtggtacacaggttgcactggatttttttttaatggcacatttttaaaactactgctcattttatgcttgatatagatttggcgtttaccttttcctaacatataggcaagcagtagttattgctttgttggtaaaagttggcgttatttctgaaaagcatacgtgggaatggcaaactgtagaagctgtggccaccggactccaggattttattatctgtattgagatgttcctcgctgccattgctcatcattacacattctcatataaaccatatgtccaagaagcagaagagggctcatgctttgattcctttcttgccatgtgggatgtctcagatattagagatgatatttctgaacaagtaaggcatgttggacggacagt

SEQ ID NO: 21771 - DNA, 2393 bp, Homo sapiens
  misc_feature 1..2393: note = ENST00000344458
  source 1..2393: mol_type = unassigned DNA; mol_type = unassigned DNA
ctccccgcagagcagagccagcggcccgagccgaatccccggagccgcgcctcgattcccctccagcagctgctctgggctgcgcagggttcttgcgctcggcactggagcctcagccgcggccgcagctgtccgacgtgtcactgcaagggccccgcccccggggtggggtctcgggctctcgctaccggagagggaggagaagggggaggttaaaggggaaggacccccggaagtgccccctcctcagtgcgggagagggagacgccgggggcggagtcccctgcctcccgcggcgtggttggtgcgtcccatgtgacgtcagaagcagcccgcccctgcctggatggcccagcccgagttcccggacgccgcgggactggagtgccagccggtgttggacgtggagcggcgccgccaccgcgccgacaccattctctccggcccagcagcccccttcctcgcacgacggactttccctggaccccagtcagttggagcctctggcgccccgcaaccccggcccctcgggcctctgcacagcctctttcactcagaagctcaggtcgcctccagcccagcactatgccggggactgtggcaacactgcggttccagctgctgccccctgagccagatgatgccttctggggtgcaccttgtgaacagcccctggagcgcaggtaccaggcactgccggccctcgtctgcatcatgtgctgtttgtttggagtcgtctactgcttcttcggttaccgctgcttcaaggcagtgctctttctcactgggttgctgtttggctcggtggtcatcttcctcctctgctaccgagagcgggtgctagagacacagctgagtgctggggcgagcgcgggcatcgctctgggcatcgggctgctctgcgggctggtggccatgctagtgcgcagcgtgggcctcttcctggtggggctgctgctcggcctgctgctcgcagctgctgccctgctgggctccgcaccctactaccagccaggctccgtgtggggtccactggggctgttgctggggggcggcctgctctgtgccctgctcactctgcgctggccccgcccactcaccaccctggccaccgccgtgactggtgctgcgctgatcgccactgccgctgactacttcgccgagctgctactgctggggcgctacgtggtggagcgactccgggctgctcctgtgcccccactctgctggcgaagctgggccctgctggcactctggcccctgctcagcctgatgggcgttctggtgcagtggagggtgacagctgagggggactcccacacggaagtggtcatcagccggcagcgccgacgcgtgcaactgatgcggattcggcagcaggaagatcgcaaggagaaaaggcggaaaaagagacctcctcgggctcccctcagaggtccccgggctcctcccaggcctgggccaccagaccctgcttatcggcgcaggccagtgcccatcaaacgcttcaatggagacgtcctctccccgagctatatccagagcttccgagaccggcagaccgggagctccctgagctccttcatggcctcacccacagatgcggactatgagtatgggtcccggggacctctgacagcctgctcaggccccccagtgcgggtatagccatatctgtctgtctagactctgcagtcaccagctctgccagctcgaggaggcctgctaggctgccactcagcctcctggctttggctgtccctctccccagcctggagagggctggcctggtcactagaagggaggattgtctcaggcgagtcttggcctgagaggaaagccccctcccaagctcccaagaggctcctgaggaactcggggtgtgaaccccattggggtgtgctcagggttgtgagtgtgttgcccgtgtgtctgtgtgtatgtgtgtgggggtgggcaggcttggaggggacgctgggacccttgccttagatttctgactggtagggtttctccaggctcagccccacctcttcactccctgccaaggtcccatgggccacctcctgcatgtctccgcggaggggctaccttccttcccatcgccctgcctcgcagccagactcatctaagggttcttgtccttgtctatggggcaaactgtagcatccctcaccctggtcccctggcctctgtaaagccaccagcctgagggcagtggcaggagatgggggtgggggggtgctgctctgggctgggttgggaagggagttggggaggggtttaaatgcacggtgcatgtctggtgtctgtcatgccaacctagacacctcatgcttctgtctcccccaccccactctgttttacatcttttataaatgtgccaaactgtg

SEQ ID NO: 21772 - DNA, 1057 bp, Homo sapiens
  misc_feature 1..1057: note = ENST00000421791
  source 1..1057: mol_type = unassigned DNA; mol_type = unassigned DNA
tggatggtgcgccctgagtgacgtcaggagcagaggccggagctgtccatcagcaccaaaggccgcgggcgggctcagggcatggggccgcggttctggggcggcccgagccccggctcctgcgccttccccttcctcaggcccagcccgagttcccggacgccgcgggactggagtgccagccggtgttggacgtggagcggcgccgccaccgcgccgacaccattctctccggcccagcagcccccttcctcgcacgacggactttccctggaccccagtcagttggagcctctggcgccccgcaaccccggcccctcgggcctctgcacagcctctttcactcagaagctcaggtcgcctccagcccagcactatgccggggactgtggcaacactgcggttccagctgctgccccctgagccagatgatgccttctggggtgcaccttgtgaacagcccctggagcgcaggtaccaggcactgccggccctcgtctgcatcatgtgctgtttgtttggagtcgtctactgcttcttcggttaccgctgcttcaaggcagtgctctttctcactgggttgctgtttggctcggtggtcatcttcctcctctgctaccgagagcgggtgctagagacacagctgagtgctggggcgagcgcgggcatcgctctgggcatcgggctgctctgcgggctggtggccatgctagtgcgcagcgtgggcctcttcctggtggggctgctgctcggcctgctgctcgcagctgctgccctgctgggctccgcaccctactaccagccaggctccgtgtggggtccactggggctgttgctggggggcggcctgctctgtgccctgctcactctgcgctggccccgcccactcaccaccctggccaccgccgtgactggtgctgcgctgatcgccactgccgctgactacttcgccgagctgctactgctggggcgctacgtggtggagcgactccgggctgctcctgtgcccccactctgctggcgaagctgggccctgctggcactctggcccctgctc

SEQ ID NO: 21773 - DNA, 2218 bp, Homo sapiens
  misc_feature 1..2218: note = ENST00000373883
  source 1..2218: mol_type = unassigned DNA; mol_type = unassigned DNA
gtgacgtcaggagcagaggccggagctgtccatcagcaccaaaggccgcgggcgggctcagggcatggggccgcggttctggggcggcccgagccccggctcctgcgccttccccttcctcaggcccagcccgagttcccggacgccgcgggactggagtgccagccggtgttggacgtggagcggcgccgccaccgcgccgacaccattctctccggcccagcagcccccttcctcgcacgacggactttccctggaccccagtcagttggagcctctggcgccccgcaaccccggcccctcgggcctctgcacagcctctttcactcagaagctcaggtcgcctccagcccaggttaacttgggagggtgactcccttctattcccagcactatgccggggactgtggcaacactgcggttccagctgctgccccctgagccagatgatgccttctggggtgcaccttgtgaacagcccctggagcgcaggtaccaggcactgccggccctcgtctgcatcatgtgctgtttgtttggagtcgtctactgcttcttcggttaccgctgcttcaaggcagtgctctttctcactgggttgctgtttggctcggtggtcatcttcctcctctgctaccgagagcgggtgctagagacacagctgagtgctggggcgagcgcgggcatcgctctgggcatcgggctgctctgcgggctggtggccatgctagtgcgcagcgtgggcctcttcctggtggggctgctgctcggcctgctgctcgcagctgctgccctgctgggctccgcaccctactaccagccaggctccgtgtggggtccactggggctgttgctggggggcggcctgctctgtgccctgctcactctgcgctggccccgcccactcaccaccctggccaccgccgtgactggtgctgcgctgatcgccactgccgctgactacttcgccgagctgctactgctggggcgctacgtggtggagcgactccgggctgctcctgtgcccccactctgctggcgaagctgggccctgctggcactctggcccctgctcagcctgatgggcgttctggtgcagtggagggtgacagctgagggggactcccacacggaagtggtcatcagccggcagcgccgacgcgtgcaactgatgcggattcggcagcaggaagatcgcaaggagaaaaggcggaaaaagagacctcctcgggctcccctcagaggtccccgggctcctcccaggcctgggccaccagaccctgcttatcggcgcaggccagtgcccatcaaacgcttcaatggagacgtcctctccccgagctatatccagagcttccgagaccggcagaccgggagctccctgagctccttcatggcctcacccacagatgcggactatgagtatgggtcccggggacctctgacagcctgctcaggccccccagtgcgggtatagccatatctgtctgtctagactctgcagtcaccagctctgccagctcgaggaggcctgctaggctgccactcagcctcctggctttggctgtccctctccccagcctggagagggctggcctggtcactagaagggaggattgtctcaggcgagtcttggcctgagaggaaagccccctcccaagctcccaagaggctcctgaggaactcggggtgtgaaccccattggggtgtgctcagggttgtgagtgtgttgcccgtgtgtctgtgtgtatgtgtgtgggggtgggcaggcttggaggggacgctgggacccttgccttagatttctgactggtagggtttctccaggctcagccccacctcttcactccctgccaaggtcccatgggccacctcctgcatgtctccgcggaggggctaccttccttcccatcgccctgcctcgcagccagactcatctaagggttcttgtccttgtctatggggcaaactgtagcatccctcaccctggtcccctggcctctgtaaagccaccagcctgagggcagtggcaggagatgggggtgggggggtgctgctctgggctgggttgggaagggagttggggaggggtttaaatgcacggtgcatgtctggtgtctgtcatgccaacctagacacctcatgcttctgtctcccccaccccactctgttttacatcttttataaatgtgccaaactgtgtggcctctgccaggaa

SEQ ID NO: 21774 - DNA, 505 bp, Homo sapiens
  misc_feature 1..505: note = ENST00000451952
  source 1..505: mol_type = unassigned DNA; mol_type = unassigned DNA
gtccatcagcaccaaaggccgcgggcgggctcagggcatggggccgcggttctggggcggcccgagccccggctcctgcgccttccccttcctcaggcccagcccgagttcccggacgccgcgggactggagtgccagccggtgttggacgtggagcggcgccgccaccgcgccgacaccattctctccggcccagcagcccccttcctcgcacgacggactttccctggaccccagtcagttggagcctctggcgccccgcaaccccggcccctcgggcctctgcacagcctctttcactcagaagctcaggtcgcctccagcccagctgctgccccctgagccagatgatgccttctggggtgcaccttgtgaacagcccctggagcgcaggtaccaggcactgccggccctcgtctgcatcatgtgctgtttgtttggagtcgtctactgcttcttcggttaccgctgcttcaaggcagtgctctttctcactgggttgctg

SEQ ID NO: 21775 - DNA, 6523 bp, Homo sapiens
  misc_feature 1..6523: note = ENST00000377044
  source 1..6523: mol_type = unassigned DNA; mol_type = unassigned DNA
cggcccagccgagccgggctgcttgtctggccggcggaggctgagcgcgaccctagcaagccgcggcgcccgccgaccagggacaagagcgactcctgggaccccactctgccccgcgccgccgcctcctcccctgttgtcgcggggacgctcaggcccgcgccgcccgggccacgattctcctcctctttctcccggaggggaaggaacggagaaagccgagcggcggctccgggagagagcgagccgaggcccctgcccccgaggctcggggcaggaggaggaggaggaggaggaggcggaggcggagggaagtgcgcgtcactctcgggaggagagtatttcacctccaggcagaggctgcggctgccagttgagtacgagcggcagctgcgggcgccggcaatcgagtggcttcctggccatggagaggagatctggacccgaggacgccagggactcctctccgtctccctggaccgctgtgtaggcacctgagttaacggacgctaagcggggtaggggaagtaacagtgtatcatgtatgccactgattccaggggacactcccctgctttcctccaacctcagaatggaaatagtcgtcacccatctggctatgttccagggaaggttgtcccattgcgtccccctcctcctccaaagagtcaagcttcagccaaatttacctccatcagacgagaagaccgggcaaccttcgcattctcacctgaagaacagcaagcccagagagaaagtcaaaagcaaaagagacacaaaaatactttcatttgttttgctattactagtttctcattttttattgcacttgcaatcattttaggaatatcctcaaaatatgctccagatgaaaattgcccagatcaaaatcctcgtctcaggaattgggatccaggacaagattctgcaaagcaagttgttatcaaggagggagatatgctccgtctgacctcagacgccaccgtgcattctatagtcattcaggatggaggactgcttgtatttggggacaataaagatggatccagaaatattactttgaggactcattacatcctgatccaggatggtggggcgcttcatattggagcagaaaaatgccgctataaatccaaagcgacaattaccttgtatggcaagtcagatgaaggtgaaagtatgccaacatttggcaaaaagtttattggtgtggaagctggcgggacactggagttacatggggcacggaaggcatcgtggacgttgttggcaaggaccctgaattcctcaggcttgccctttgggtcctatacctttgaaaaggacttttcccggggcctcaatgtgagggtcattgaccaagacacggccaaaattttggaaagtgagagatttgatacccatgaataccgcaatgagagcaggcggcttcaggagtttctgagattccaggatccaggtcggattgttgccatagctgtcggggattcagccgctaaaagtctcttacaaggaaccatccagatgatccaggaacggttgggaagtgaactgatccaaggactgggctacaggcaagcttgggctttagttggtgtcattgatggtggaagcacttcttgcaatgaatccgtgagaaactatgaaaatcatagcagtggcgggaaggctcttgcccaaagagaattttatactgtggatggccagaagttctctgtgacagcttatagtgaatggattgaaggcgtttctctttcaggattccgggtagaggttgtagatggagtgaagctaaatttgctagatgatgttagtagttggaaacctggagaccagattgtggtcgcaagcacagactattccatgtaccaagcagaggagttcactcttcttccctgttctgaatgcagccattttcaggtcaaagtcaaagaaacccctcagttcctgcacatgggtgagatcatagacggtgtagacatgagagctgaggttggaattcttacccggaatattgtgatccaaggagaagtggaggactcatgctacgcagaaaatcagtgccaattttttgattatgatacctttgggggacacattatgataatgaaaaattttacttcagtccatctttcttatgtggaattgaaacacatgggtcagcagcagatggggcgataccctgttcattttcacctgtgtggtgacgtggattataaaggaggatacagacatgcaacatttgtggacggcctgtctattcatcacagcttctcaaggtgcatcactgtgcatgggacaaatggcttgctaataaaagacaccattgggtttgacacactaggtcattgtttctttttggaagatggtattgaacagaggaatactttgttccacaatctgggactcctcaccaagccgggtactctcctgcccaccgataggaacaactccatgtgtaccaccatgcgagataaagtgtttggaaattacattcctgtgcctgctactgactgtatggctgtttcaactttctggattgctcatcccaacaataatctgattaataatgcagctgcaggctcacaggatgctggaatatggtatttattccacaaggaaccaactggggaatccagtggattgcagctcttggcaaaaccagaactcactccattgggtatattttataacaacagggtccattcaaattttaaggctggcttatttattgacaaaggtgtcaaaacaaccaactctagtgctgctgacccaagggaatacctctgtttggacaatagtgcaagatttcgacctcatcaggatgcaaaccccgaaaaaccacgtgttgctgctctaattgacaggctcattgcttttaaaaataatgataatggagcttgggtcagaggaggagatattatcgttcaaaattcagcatttgcagataatggaataggactgacctttgccagtgatggaagcttcccaagtgatgaaggttccagccaagaggtatctgaatctctctttgttggggagagcaggaattacggctttcagggtggtcagaacaagtatgtaggcactggaggaatagaccagaagcctcgaacattacccaggaacaggacgttcccaattagaggctttcagatttatgatgggcccattcatctcacaaggagcactttcaaaaaatatgtgccaactccagataggtacagcagtgcaattggcttcctcatgaagaattcctggcagataacccccaggaataatatctccctcgtgaagtttggtccacatgtctctctgaatgtcttttttggaaagcctggtccctggtttgaagattgtgagatggatggtgataagaactccatattccatgacattgatggctctgtgacaggatacaaggatgcttatgtgggaagaatggacaactacctgatccgccatccaagctgtgtaaatgtgtctaagtggaatgcagtgatctgcagtgggacctatgcacaggtctatgtacagacatggagcactcagaatctttctatgaccattacacgagatgagtatccgtccaaccctatggtgctccgaggtattaatcagaaggctgcctttccacagtaccagcctgtcgtcatgctggagaagggttataccatccactggaatgggccggcaccacggactacatttctatacctcgtcaacttcaacaagaatgactggattcgagttggcctttgctatccatcaaacacaagttttcaagttacctttggctatttgcagcggcagaatggctcattatccaaaatcgaagaatatgagcctgtgcattcactggaagaactgcaaagaaagcaatccgagaggaaattctattttgactccagcacggggttactgtttttgtatctcaaagccaaaagccacaggcatggccacagttactgttcatctcagggatgtgaaagagtcaagatccaagcagccacagactcaaaggacatcagtaactgcatggccaaagcatacccacagtactacagaaagccgtcagtggtcaagcggatgccggccatgctcactggactctgtcaaggctgtggcactcggcaggtggtgtttactagtgatcctcataaaagttacctccctgtgcaattccagtcacctgataaagcagaaacccagcgtggagacccgtctgttatttctgtcaatggcactgactttaccttccgaagtgcaggcgtcctcctccttgttgtggatccgtgcagcgttccattccgcttgacggaaaaaacggtttttcctcttgctgatgtcagtcgcattgaagagtatttaaaaacaggcatccctccaaggtccattgttctgttgagcacaagaggagaaataaagcagttaaacatttcacacttactagtacctctgggattagccaaaccagctcatctttatgacaaagggagtaccatatttttgggattcagtggaaactttaaaccatcatggactaagctatttaccagtcctgctggacagggccttggggtgcttgaacaattcatacctttgcagctggacgaatatggttgtcccagagccaccactgtccgcagaagagacctggaactgctaaagcaagcttcaaaagcacattagagactaactgtaacttaagtgctgggggaaaaaaaatgtgaactaacttatttaatttatggcattttaaaatgacactgttaacccaacggaaccattttccagtttgatacagaatggggagaaaagaaagcgtttgaaattattgcttggataccagcttcatgcaccttctagttgtacaaaatgttaaagacgttgtttgtatttgtaaggctggtgtattcagagagcagatctcttattcctcactttccacccccgtattttgtaatgaccatgagcaatgtttttactttttgtataatggggtggggtggagtgggggcttctgagagtcagcctgaggtctttagaggaccagctattgtagcaccttggatacttgaagtttaatgctcagttgggtcgggtggcagttgacttggtggctggcatgttcagcagtgcctggggccctgtttctgggcagcctttgaggattttctatgatattgaatgacagttttaagtggcaactcaggcccagctcatgcccttttttgcctggacatgtgctatttttattcacttatatatcaattacttgtaagggttaaactttcaaacaggaagtatattgggacaaaagggctcttggggattagatatccctttaatctgtgaccattgggcaaaaaattttcctgcagcaaaagtctgaggctgttgggaccatttttgcagctttaatccttagcctcttttgactgtatatttgtgtttaaaatgcagagctcaactgaatatttccttttttgttttgttttgttttgttttaagaagtaggttgttttcctgaaccgtaaacttgtatcattttaacttgcacaaaggaagtctgttcttggtattgctcttgcacttgggttttttgttattgttttgtgtggattttttaaagcttttctgttcaccctcctgccaggaaaatcccagaaagcttaatgataccccaaaatgattacacccagggaggaaaaaaaggagcgctttctagggtcagaatcgtggagagaatactcagaaatgaacctctttaaagccttgcaggaatgagtcactcttacttaatgaaatgttaaagccaattaaaaagcatgctgtgatgcccagcttccctttccacagggtgcatgcgtctcctgctggtgaatcacatgcggcaagaggcaactggctccacagcctgggatgctgccgtaccaagaggaaagaagcagcaaaatgcctttacgttgttctaaacccccgacgcataaagtgtagaggagggatggccaagggtgggtggtagaaagtgtgttcaggctgacactggcaatgagtacagataatttcactttcctcttctaggggcaaaggctgatggcctctacctttgtatccaggagaaactgcagagcagccctgtgactttacaaaatatgctacctcaaagtgctaccgataaacctttctaattgtaagtgcccttactaagggcacatgtcttaatcaaagttagttttttgttttctggtttgttttttttttttgtatattgatgaatgagatcttacctattaaatatattattggattatggttcctgaaggtcattagagtgtgtgtgtgtgtgtgtgtgtgtgtgtgtgttttatgacttaaatatctttacgtgtgttttttagagcttggttctttaaagatttggagaagatatgtaaattaccaaggcacttggtttttctgttttatatactaataatcagggcctaagttaaataaaaatatgtgtgcatgtatttta

SEQ ID NO: 21776 - DNA, 2637 bp, Homo sapiens
  misc_feature 1..2637: note = ENST00000377057
  source 1..2637: mol_type = unassigned DNA; mol_type = unassigned DNA
aagtctaactacatggattggtttctgttttgtgcaggttactgtttttgtatctcaaagccaaaagccacaggcatggccacagttactgttcatctcagggatgtgaaagagtcaagatccaagcagccacagactcaaaggacatcagtaactgcatggccaaagcatacccacagtactacagaaagccgtcagtggtcaagcggatgccggccatgctcactggactctgtcaaggctgtggcactcggcaggtggtgtttactagtgatcctcataaaagttacctccctgtgcaattccagtcacctgataaagcagaaacccagcgtggagacccgtctgttatttctgtcaatggcactgactttaccttccgaagtgcaggcgtcctcctccttgttgtggatccgtgcagcgttccattccgcttgacggaaaaaacggtttttcctcttgctgatgtcagtcgcattgaagagtatttaaaaacaggcatccctccaaggtccattgttctgttgagcacaagaggagaaataaagcagttaaacatttcacacttactagtacctctgggattagccaaaccagctcatctttatgacaaagggagtaccatatttttgggattcagtggaaactttaaaccatcatggactaagctatttaccagtcctgctggacagggccttggggtgcttgaacaattcatacctttgcagctggacgaatatggttgtcccagagccaccactgtccgcagaagagacctggaactgctaaagcaagcttcaaaagcacattagagactaactgtaacttaagtgctgggggaaaaaaaatgtgaactaacttatttaatttatggcattttaaaatgacactgttaacccaacggaaccattttccagtttgatacagaatggggagaaaagaaagcgtttgaaattattgcttggataccagcttcatgcaccttctagttgtacaaaatgttaaagacgttgtttgtatttgtaaggctggtgtattcagagagcagatctcttattcctcactttccacccccgtattttgtaatgaccatgagcaatgtttttactttttgtataatggggtggggtggagtgggggcttctgagagtcagcctgaggtctttagaggaccagctattgtagcaccttggatacttgaagtttaatgctcagttgggtcgggtggcagttgacttggtggctggcatgttcagcagtgcctggggccctgtttctgggcagcctttgaggattttctatgatattgaatgacagttttaagtggcaactcaggcccagctcatgcccttttttgcctggacatgtgctatttttattcacttatatatcaattacttgtaagggttaaactttcaaacaggaagtatattgggacaaaagggctcttggggattagatatccctttaatctgtgaccattgggcaaaaaattttcctgcagcaaaagtctgaggctgttgggaccatttttgcagctttaatccttagcctcttttgactgtatatttgtgtttaaaatgcagagctcaactgaatatttccttttttgttttgttttgttttgttttaagaagtaggttgttttcctgaaccgtaaacttgtatcattttaacttgcacaaaggaagtctgttcttggtattgctcttgcacttgggttttttgttattgttttgtgtggattttttaaagcttttctgttcaccctcctgccaggaaaatcccagaaagcttaatgataccccaaaatgattacacccagggaggaaaaaaaggagcgctttctagggtcagaatcgtggagagaatactcagaaatgaacctctttaaagccttgcaggaatgagtcactcttacttaatgaaatgttaaagccaattaaaaagcatgctgtgatgcccagcttccctttccacagggtgcatgcgtctcctgctggtgaatcacatgcggcaagaggcaactggctccacagcctgggatgctgccgtaccaagaggaaagaagcagcaaaatgcctttacgttgttctaaacccccgacgcataaagtgtagaggagggatggccaagggtgggtggtagaaagtgtgttcaggctgacactggcaatgagtacagataatttcactttcctcttctaggggcaaaggctgatggcctctacctttgtatccaggagaaactgcagagcagccctgtgactttacaaaatatgctacctcaaagtgctaccgataaacctttctaattgtaagtgcccttactaagggcacatgtcttaatcaaagttagttttttgttttctggtttgttttttttttttgtatattgatgaatgagatcttacctattaaatatattattggattatggttcctgaaggtcattagagtgtgtgtgtgtgtgtgtgtgtgtgtgtgtgttttatgacttaaatatctttacgtgtgttttttagagcttggttctttaaagatttggagaagatatgtaaattaccaaggcacttggtttttctgttttatatactaataatcagggcctaagttaaataaaaatatgtgtgcatgt

SEQ ID NO: 21777 - DNA, 3509 bp, Homo sapiens
  misc_feature 1..3509: note = ENST00000538669
  source 1..3509: mol_type = unassigned DNA; mol_type = unassigned DNA
gatatgcaacagaagttgaataaaaggagagactctgtttctgaatggaaaattaataaatgttaatttcatggaccagtttcatggaagataatttttccatggactggaggtggagggggatggtttcaggatgattcaagtgcattacatttacttagttaaaatataaatttgacacatttccattagtgtcccaaaaggtacttttctactgtacttgacagttgatactgtagttcatctggaagaataaatgagaaagtagtaaaatataaacaaattacagtaatacaagggcttgtttttatcaaatattaaaatggaccgtgaagccataggccagcatagttttggcagagaagagcaagatcagagaagaacggagaatccacagataggtccaagtatgtatgttggcttactatgtgacaaaaatggtaattcaaaccatggaaaacacatttagtcgtttatttatttttagaattgtgtttatccatttatttaataaatagataatagaacttaaataaatagagtatttgaaacaaaacaaaaccattctcccatgttacagtagacttactccctgatagacaatggagaaggaagggtgaggggtggatgacaggaaattactgaataggcacagtgtacattatttgggtgatggataccctaagtgccctgacttcaccactatgcaatcctatgtatgtaatgaaattgcacttgtgcctcacaaatttatacaaattataaacaacaacaacaacaatagactattccctaaaagagctgtgccccagaccatccactaggtcagcagtccccagcctttttgacatcagggactggtttcatggaagataatttttccatggactggaggtgaagggggatggtttcaggatgattgaagcacattacatttactgtgcactttttttctattattattacattgcaatatataatgaaataattacacagctcaccataatgtaaagtcagtgggagccctgagcttgttttcctgcaactagatggtcccatctgggggtgatgatcaacagatcattgggcattagattctcaggagcacacaacctagatccctcacatgtgcagttcccaatagggttctgctcctatgagagttgaatgccacagctgacctgacaggaggcggagctcaggctgtaatgcaagtgttgtggggtggctgtaaatacagatgaagcttcgctcgcctgctcacctcctgctgtgcaacttggttcctaatctactggtacccatccatggcccaggggttgggaagccctgcactaggtgaacgtacgtaaatgatttggtttatgtatgcgttaccccttgtaagagcaacgtgtgaagcccatggtggtggggtggaagagtgggaattggatggaaaatcatctagacttttttctttttggagttctgcttttatctaatatttctattcagcagtcagttcagaaagatactcagtagaaagatactcatgctgaaggattgaaattggctctgactttctaaatttcacatacaggtccattgttctgttgagcacaagaggagaaataaagcagttaaacatttcacacttactagtacctctgggattagccaaaccagctcatctttatgacaaagggagtaccatatttttgggattcagtggaaactttaaaccatcatggactaagctatttaccagtcctgctggacagggccttggggtgcttgaacaattcatacctttgcagctggacgaatatggttgtcccagagccaccactgtccgcagaagagacctggaactgctaaagcaagcttcaaaagcacattagagactaactgtaacttaagtgctgggggaaaaaaaatgtgaactaacttatttaatttatggcattttaaaatgacactgttaacccaacggaaccattttccagtttgatacagaatggggagaaaagaaagcgtttgaaattattgcttggataccagcttcatgcaccttctagttgtacaaaatgttaaagacgttgtttgtatttgtaaggctggtgtattcagagagcagatctcttattcctcactttccacccccgtattttgtaatgaccatgagcaatgtttttactttttgtataatggggtggggtggagtgggggcttctgagagtcagcctgaggtctttagaggaccagctattgtagcaccttggatacttgaagtttaatgctcagttgggtcgggtggcagttgacttggtggctggcatgttcagcagtgcctggggccctgtttctgggcagcctttgaggattttctatgatattgaatgacagttttaagtggcaactcaggcccagctcatgcccttttttgcctggacatgtgctatttttattcacttatatatcaattacttgtaagggttaaactttcaaacaggaagtatattgggacaaaagggctcttggggattagatatccctttaatctgtgaccattgggcaaaaaattttcctgcagcaaaagtctgaggctgttgggaccatttttgcagctttaatccttagcctcttttgactgtatatttgtgtttaaaatgcagagctcaactgaatatttccttttttgttttgttttgttttgttttaagaagtaggttgttttcctgaaccgtaaacttgtatcattttaacttgcacaaaggaagtctgttcttggtattgctcttgcacttgggttttttgttattgttttgtgtggattttttaaagcttttctgttcaccctcctgccaggaaaatcccagaaagcttaatgataccccaaaatgattacacccagggaggaaaaaaaggagcgctttctagggtcagaatcgtggagagaatactcagaaatgaacctctttaaagccttgcaggaatgagtcactcttacttaatgaaatgttaaagccaattaaaaagcatgctgtgatgcccagcttccctttccacagggtgcatgcgtctcctgctggtgaatcacatgcggcaagaggcaactggctccacagcctgggatgctgccgtaccaagaggaaagaagcagcaaaatgcctttacgttgttctaaacccccgacgcataaagtgtagaggagggatggccaagggtgggtggtagaaagtgtgttcaggctgacactggcaatgagtacagataatttcactttcctcttctaggggcaaaggctgatggcctctacctttgtatccaggagaaactgcagagcagccctgtgactttacaaaatatgctacctcaaagtgctaccgataaacctttctaattgtaagtgcccttactaagggcacatgtcttaatcaaagttagttttttgttttctggtttgttttttttttttgtatattgatgaatgagatcttacctattaaatatattattggattatg

SEQ ID NO: 21778 - DNA, 5217 bp, Homo sapiens
  misc_feature 1..5217: note = ENST00000377066
  source 1..5217: mol_type = unassigned DNA; mol_type = unassigned DNA
gttaacggacgctaagcggggtaggggaagtaacagtgtatcatgtatgccactgattccaggggacactcccctgctttcctccaacctcagaatggaaatagtcgtcacccatctggctatgttccagggaaggttgtcccattgcgtccccctcctcctccaaagagtcaagcttcagccaaatttacctccatcagacgagaagaccgggcaaccttcgcattctcacctgaagaacagcaagcccagagagaaagtcaaaagcaaaagagacacaaaaatactttcatttgttttgctattactagtttctcattttttattgcacttgcaatcattttaggaatatcctcaaaatatgctccagatgaaaattgcccagatcaaaatcctcgtctcaggaattgggatccaggacaagattctgcaaagcaagttgttatcaaggagggagatatgctccgtctgacctcagacgccaccgtgcattctatagtcattcaggatggaggactgcttgtatttggggacaataaagatggatccagaaatattactttgaggactcattacatcctgatccaggatggtggggcgcttcatattggagcagaaaaatgccgctataaatccaaagcgacaattaccttgtatggcaagtcagatgaaggtgaaagtatgccaacatttggcaaaaagtttattggtgtggaagctggcgggacactggagttacatggggcacggaaggcatcgtggacgttgttggcaaggaccctgaattcctcaggcttgccctttgggtcctatacctttgaaaaggacttttcccggggcctcaatgtgagggtcattgaccaagacacggccaaaattttggaaagtgagagatttgatacccatgaataccgcaatgagagcaggcggcttcaggagtttctgagattccaggatccaggtcggattgttgccatagctgtcggggattcagccgctaaaagtctcttacaaggaaccatccagatgatccaggaacggttgggaagtgaactgatccaaggactgggctacaggcaagcttgggctttagttggtgtcattgatggtggaagcacttcttgcaatgaatccgtgagaaactatgaaaatcatagcagtggcgggaaggctcttgcccaaagagaattttatactgtggatggccagaagttctctgtgacagcttatagtgaatggattgaagaaacccctcagttcctgcacatgggtgagatcatagacggtgtagacatgagagctgaggttggaattcttacccggaatattgtgatccaaggagaagtggaggactcatgctacgcagaaaatcagtgccaattttttgattatgatacctttgggggacacattatgataatgaaaaattttacttcagtccatctttcttatgtggaattgaaacacatgggtcagcagcagatggggcgataccctgttcattttcacctgtgtggtgacgtggattataaaggaggatacagacatgcaacatttgtggacggcctgtctattcatcacagcttctcaaggtgcatcactgtgcatgggacaaatggcttgctaataaaagacaccattgggtttgacacactaggtcattgtttctttttggaagatggtattgaacagaggaatactttgttccacaatctgggactcctcaccaagccgggtactctcctgcccaccgataggaacaactccatgtgtaccaccatgcgagataaagtgtttggaaattacattcctgtgcctgctactgactgtatggctgtttcaactttctggattgctcatcccaacaataatctgattaataatgcagctgcaggctcacaggatgctggaatatggtatttattccacaaggaaccaactggggaatccagtggattgcagctcttggcaaaaccagaactcactccattgggtatattttataacaacagggtccattcaaattttaaggctggcttatttattgacaaaggtgtcaaaacaaccaactctagtgctgctgacccaagggaatacctctgtttggacaatagtgcaagatttcgacctcatcaggatgcaaaccccgaaaaaccacgtgttgctgctctaattgacaggctcattgcttttaaaaataatgataatggagcttgggtcagaggaggagatattatcgttcaaaattcagcatttgcagataatggaataggactgacctttgccagtgatggaagcttcccaagtgatgaaggttccagccaagaggtatctgaatctctctttgttggggagagcaggaattacggctttcagggtggtcagaacaagtatgtaggcactggaggaatagaccagaagcctcgaacattacccaggaacaggacgttcccaattagaggctttcagatttatgatgggcccattcatctcacaaggagcactttcaaaaaatatgtgccaactccagataggtacagcagtgcaattggcttcctcatgaagaattcctggcagataacccccaggaataatatctccctcgtgaagtttggtccacatgtctctctgaatgtcttttttggaaagcctggtccctggtttgaagattgtgagatggatggtgataagaactccatattccatgacattgatggctctgtgacaggatacaaggatgcttatgtgggaagaatggacaactacctgatccgccatccaagctgtgtaaatgtgtctaagtggaatgcagtgatctgcagtgggacctatgcacaggtctatgtacagacatggagcactcagaatctttctatgaccattacacgagatgagtatccgtccaaccctatggtgctccgaggtattaatcagaaggctgcctttccacagtaccagcctgtcgtcatgctggagaagggttataccatccactggaatgggccggcaccacggactacatttctatacctcgtcaacttcaacaagaatgactggattcgagttggcctttgctatccatcaaacacaagttttcaagttacctttggctatttgcagcggcagaatggctcattatccaaaatcgaagaatatgagcctgtgcattcactggaagaactgcaaagaaagcaatccgagaggaaattctattttgactccagcacggggttactgtttttgtatctcaaagccaaaagccacaggcatggccacagttactgttcatctcagggatgtgaaagagtcaagatccaagcagccacagactcaaaggacatcagtaactgcatggccaaagcatacccacagtactacagaaagccgtcagtggtcaagcggatgccggccatgctcactggactctgtcaaggctgtggcactcggcaggtggtgtttactagtgatcctcataaaagttacctccctgtgcaattccagtcacctgataaagcagaaacccagcgtggagacccgtctgttatttctgtcaatggcactgactttaccttccgaagtgcaggcgtcctcctccttgttgtggatccgtgcagcgttccattccgcttgacggaaaaaacggtttttcctcttgctgatgtcagtcgcattgaagagtatttaaaaacaggcatccctccaaggtccattgttctgttgagcacaagaggagaaataaagcagttaaacatttcacacttactagtacctctgggattagccaaaccagctcatctttatgacaaagggagtaccatatttttgggattcagtggaaactttaaaccatcatggactaagctatttaccagtcctgctggacagggccttggggtgcttgaacaattcatacctttgcagctggacgaatatggttgtcccagagccaccactgtccgcagaagagacctggaactgctaaagcaagcttcaaaagcacattagagactaactgtaacttaagtgctgggggaaaaaaaatgtgaactaacttatttaatttatggcattttaaaatgacactgttaacccaacggaaccattttccagtttgatacagaatggggagaaaagaaagcgtttgaaattattgcttggataccagcttcatgcaccttctagttgtacaaaatgttaaagacgttgtttgtatttgtaaggctggtgtattcagagagcagatctcttattcctcactttccacccccgtattttgtaatgaccatgagcaatgtttttactttttgtataatggggtggggtggagtgggggcttctgagagtcagcctgaggtctttagaggaccagctattgtagcaccttggatacttgaagtttaatgctcagttgggtcgggtggcagttgacttggtggctggcatgttcagcagtgcctggggccctgtttctgggcagcctttgaggattttctatgatattgaatgacagttttaagtggcaactcaggcccagctcatgcccttttttgcctggacatgtgctatttttattcacttatatatcaattacttgtaagggttaaactttcaaacaggaagtatattgggacaaaagggctcttggggattagatatccctttaatctgtgaccattgggcaaaaaattttcctgcagcaaaagtctgaggctgttgggaccatttttgcagctttaatccttagcctcttttgactgtatatttgtgtttaaaatgcagagctcaactgaatatttccttttttgttttgttttgttttgttttaagaagtaggttgttttcctgaaccgtaaacttgtatcattttaacttgcacaaaggaagtctgttcttggtattgctcttgcacttgggttttttgttattgttttgtgtggattttttaaagcttttctgttcaccctcctgccaggaaaatcccagaaagcttaatgataccccaaaatgattacacccagggaggaaaaaaaggagcgctttctagggtcagaatcgtggagagaatactcagaaatgaacctctttaaagccttgcaggaatgagtcactcttacttaatgaaatgttaaagccaattaaaaagcatgctgtgatgcccagcttccctttccacagggtgcatgcgtctcctgctggtgaatcacatgcggcaagagg

SEQ ID NO: 21779 - DNA, 5372 bp, Homo sapiens
  misc_feature 1..5372: note = ENST00000542935
  source 1..5372: mol_type = unassigned DNA; mol_type = unassigned DNA
gttaacggacgctaagcggggtaggggaagtaacagtgtatcatgtatgccactgattccaggggacactcccctgctttcctccaacctcagaatggaaatagtcgtcacccatctggctatgttccagggaaggttgtcccattgcgtccccctcctcctccaaagagtcaagcttcagccaaatttacctccatcagacgagaagaccgggcaaccttcgcattctcacctgaagaacagcaagcccagagagaaagtcaaaagcaaaagagacacaaaaatactttcatttgttttgctattactagtttctcattttttattgcacttgcaatcattttaggaatatcctcaaaatatgctccagatgaaaattgcccagatcaaaatcctcgtctcaggaattgggatccaggacaagattctgcaaagcaagttgttatcaaggagggagatatgctccgtctgacctcagacgccaccgtgcattctatagtcattcaggatggaggactgcttgtatttggggacaataaagatggatccagaaatattactttgaggactcattacatcctgatccaggatggtggggcgcttcatattggagcagaaaaatgccgctataaatccaaagcgacaattaccttgtatggcaagtcagatgaaggtgaaagtatgccaacatttggcaaaaagtttattggtgtggaagctggcgggacactggagttacatggggcacggaaggcatcgtggacgttgttggcaaggaccctgaattcctcaggcttgccctttgggtcctatacctttgaaaaggacttttcccggggcctcaatgtgagggtcattgaccaagacacggccaaaattttggaaagtgagagatttgatacccatgaataccgcaatgagagcaggcggcttcaggagtttctgagattccaggatccaggtcggattgttgccatagctgtcggggattcagccgctaaaagtctcttacaaggaaccatccagatgatccaggaacggttgggaagtgaactgatccaaggactgggctacaggcaagcttgggctttagttggtgtcattgatggtggaagcacttcttgcaatgaatccgtgagaaactatgaaaatcatagcagtggcgggaaggctcttgcccaaagagaattttatactgtggatggccagaagttctctgtgacagcttatagtgaatggattgaaggcgtttctctttcaggattccgggtagaggttgtagatggagtgaagctaaatttgctagatgatgttagtagttggaaacctggagaccagattgtggtcgcaagcacagactattccatgtaccaagcagaggagttcactcttcttccctgttctgaatgcagccattttcaggtcaaagtcaaagaaacccctcagttcctgcacatgggtgagatcatagacggtgtagacatgagagctgaggttggaattcttacccggaatattgtgatccaaggagaagtggaggactcatgctacgcagaaaatcagtgccaattttttgattatgatacctttgggggacacattatgataatgaaaaattttacttcagtccatctttcttatgtggaattgaaacacatgggtcagcagcagatggggcgataccctgttcattttcacctgtgtggtgacgtggattataaaggaggatacagacatgcaacatttgtggacggcctgtctattcatcacagcttctcaagataaaagacaccattgggtttgacacactaggtcattgtttctttttggaagatggtattgaacagaggaatactttgttccacaatctgggactcctcaccaagccgggtactctcctgcccaccgataggaacaactccatgtgtaccaccatgcgagataaagtgtttggaaattacattcctgtgcctgctactgactgtatggctgtttcaactttctggattgctcatcccaacaataatctgattaataatgcagctgcaggctcacaggatgctggaatatggtatttattccacaaggaaccaactggggaatccagtggattgcagctcttggcaaaaccagaactcactccattgggtatattttataacaacagggtccattcaaattttaaggctggcttatttattgacaaaggtgtcaaaacaaccaactctagtgctgctgacccaagggaatacctctgtttggacaatagtgcaagatttcgacctcatcaggatgcaaaccccgaaaaaccacgtgttgctgctctaattgacaggctcattgcttttaaaaataatgataatggagcttgggtcagaggaggagatattatcgttcaaaattcagcatttgcagataatggaataggactgacctttgccagtgatggaagcttcccaagtgatgaaggttccagccaagaggtatctgaatctctctttgttggggagagcaggaattacggctttcagggtggtcagaacaagtatgtaggcactggaggaatagaccagaagcctcgaacattacccaggaacaggacgttcccaattagaggctttcagatttatgatgggcccattcatctcacaaggagcactttcaaaaaatatgtgccaactccagataggtacagcagtgcaattggcttcctcatgaagaattcctggcagataacccccaggaataatatctccctcgtgaagtttggtccacatgtctctctgaatgtcttttttggaaagcctggtccctggtttgaagattgtgagatggatggtgataagaactccatattccatgacattgatggctctgtgacaggatacaaggatgcttatgtgggaagaatggacaactacctgatccgccatccaagctgtgtaaatgtgtctaagtggaatgcagtgatctgcagtgggacctatgcacaggtctatgtacagacatggagcactcagaatctttctatgaccattacacgagatgagtatccgtccaaccctatggtgctccgaggtattaatcagaaggctgcctttccacagtaccagcctgtcgtcatgctggagaagggttataccatccactggaatgggccggcaccacggactacatttctatacctcgtcaacttcaacaagaatgactggattcgagttggcctttgctatccatcaaacacaagttttcaagttacctttggctatttgcagcggcagaatggctcattatccaaaatcgaagaatatgagcctgtgcattcactggaagaactgcaaagaaagcaatccgagaggaaattctattttgactccagcacggggttactgtttttgtatctcaaagccaaaagccacaggcatggccacagttactgttcatctcagggatgtgaaagagtcaagatccaagcagccacagactcaaaggacatcagtaactgcatggccaaagcatacccacagtactacagaaagccgtcagtggtcaagcggatgccggccatgctcactggactctgtcaaggctgtggcactcggcaggtggtgtttactagtgatcctcataaaagttacctccctgtgcaattccagtcacctgataaagcagaaacccagcgtggagacccgtctgttatttctgtcaatggcactgactttaccttccgaagtgcaggcgtcctcctccttgttgtggatccgtgcagcgttccattccgcttgacggaaaaaacggtttttcctcttgctgatgtcagtcgcattgaagagtatttaaaaacaggcatccctccaaggtccattgttctgttgagcacaagaggagaaataaagcagttaaacatttcacacttactagtacctctgggattagccaaaccagctcatctttatgacaaagggagtaccatatttttgggattcagtggaaactttaaaccatcatggactaagctatttaccagtcctgctggacagggccttggggtgcttgaacaattcatacctttgcagctggacgaatatggttgtcccagagccaccactgtccgcagaagagacctggaactgctaaagcaagcttcaaaagcacattagagactaactgtaacttaagtgctgggggaaaaaaaatgtgaactaacttatttaatttatggcattttaaaatgacactgttaacccaacggaaccattttccagtttgatacagaatggggagaaaagaaagcgtttgaaattattgcttggataccagcttcatgcaccttctagttgtacaaaatgttaaagacgttgtttgtatttgtaaggctggtgtattcagagagcagatctcttattcctcactttccacccccgtattttgtaatgaccatgagcaatgtttttactttttgtataatggggtggggtggagtgggggcttctgagagtcagcctgaggtctttagaggaccagctattgtagcaccttggatacttgaagtttaatgctcagttgggtcgggtggcagttgacttggtggctggcatgttcagcagtgcctggggccctgtttctgggcagcctttgaggattttctatgatattgaatgacagttttaagtggcaactcaggcccagctcatgcccttttttgcctggacatgtgctatttttattcacttatatatcaattacttgtaagggttaaactttcaaacaggaagtatattgggacaaaagggctcttggggattagatatccctttaatctgtgaccattgggcaaaaaattttcctgcagcaaaagtctgaggctgttgggaccatttttgcagctttaatccttagcctcttttgactgtatatttgtgtttaaaatgcagagctcaactgaatatttccttttttgttttgttttgttttgttttaagaagtaggttgttttcctgaaccgtaaacttgtatcattttaacttgcacaaaggaagtctgttcttggtattgctcttgcacttgggttttttgttattgttttgtgtggattttttaaagcttttctgttcaccctcctgccaggaaaatcccagaaagcttaatgataccccaaaatgattacacccagggaggaaaaaaaggagcgctttctagggtcagaatcgtggagagaatactcagaaatgaacctctttaaagccttgcaggaatgagtcactcttacttaatgaaatgttaaagccaattaaaaagcatgctgtgatgcccagcttccctttccacagggtgcatgcgtctcctgctggtgaatcacatgcggcaagagg

SEQ ID NO: 21780 - DNA, 1437 bp, Homo sapiens
  misc_feature 1..1437: note = ENST00000396272
  source 1..1437: mol_type = unassigned DNA; mol_type = unassigned DNA
cacttagtctggcacagatcacagaatctcccttttcaaagttgagacacttgactttgtgctgaaaatgtctttttagctgtttaaattttcattctcttccctttacttcttgattattttttcaaggtctatgtacagacatggagcactcagaatctttctatgaccattacacgagatgagtatccgtccaaccctatggtgctccgaggtattaatcagaaggctgcctttccacagtaccagcctgtcgtcatgctggagaagggttataccatccactggaatgggccggcaccacggactacatttctatacctcgtcaacttcaacaagaatgactggattcgagttggcctttgctatccatcaaacacaagttttcaagttacctttggctatttgcagcggcagaatggctcattatccaaaatcgaagaatatgagcctgtgcattcactggaagaactgcaaagaaagcaatccgagaggaaattctattttgactccagcacggggttactgtttttgtatctcaaagccaaaagccacaggcatggccacagttactgttcatctcagggatgtgaaagagtcaagatccaagcagccacagactcaaaggacatcagtaactgcatggccaaagcatacccacagtactacagaaagccgtcagtggtcaagcggatgccggccatgctcactggactctgtcaaggctgtggcactcggcaggtggtgtttactagtgatcctcataaaagttacctccctgtgcaattccagtcacctgataaagcagaaacccagcgtggagacccgtctgttatttctgtcaatggcactgactttaccttccgaagtgcaggcgtcctcctccttgttgtggatccgtgcagcgttccattccgcttgacggaaaaaacggtttttcctcttgctgatgtcagtcgcattgaagagtatttaaaaacaggcatccctccaaggtccattgttctgttgagcacaagaggagaaataaagcagttaaacatttcacacttactagtacctctgggattagccaaaccagctcatctttatgacaaagggagtaccatatttttgggattcagtggaaactttaaaccatcatggactaagctatttaccagtcctgctggacagggccttggggtgcttgaacaattcatacctttgcagctggacgaatatggttgtcccagagccaccactgtccgcagaagagacctggaactgctaaagcaagcttcaaaagcacattagagactaactgtaacttaagtgctgggggaaaaaaaatgtgaactaacttatttaatttatggcattttaaaatgacactgttaacccaacggaaccattttccagtttgatacagaatggggagaaaagaaagcgtttgaa

SEQ ID NO: 21781 - DNA, 779 bp, Homo sapiens
  misc_feature 1..779: note = ENST00000474495
  source 1..779: mol_type = unassigned DNA; mol_type = unassigned DNA
ttttttcaaggtctatgtacagacatggagcactcagaatctttctatgaccattacacgagatgagtatccgtccaaccctatggtgctccgaggtattaatcagaaggctgcctttccacagtaccagcctgtcgtcatgctggagaagggttataccatccactggaatgggccggcaccacggactacatttctatacctcgtcaacttcaacaagaatgactggattcgagttggcctttgctatccatcaaacacaagttttcaagttacctttggctatttgcagcggcagaatggctcattatccaaaatcgaagaatatgagcctgtgcattcactggaagaactgcaaagaaagcaatccgagaggaaattctattttgactccagcacggggttactgtttttgtatctcaaagccaaaagccacaggcatggccacagttactgttcatctcagggatgtgaaagagtcaagatccaagcagccacagactcaaaggacatcagtaactgcatggccaaagcatacccacagtactacagaaagccgtcagtggtcaagcggatgccggccatgctcactggactctgtcaaggctgtggcactcggcaggtaaacaaggatgaaaagtggtctgtggccaaggagaaaaagtcagagggtttctttgcaataggagcacttttctttgaaacatctatattgcccatttatggacattgcatggcatctcctgaattttggcccatgctaaaatgtgaagcgcgta

SEQ ID NO: 21782 - DNA, 722 bp, Homo sapiens
  misc_feature 1..722: note = ENST00000377055
  source 1..722: mol_type = unassigned DNA; mol_type = unassigned DNA
ctgatccgccatccaagctgtgtaaatgtgtctaagtggaatgcagtgatctgcagtgggacctatgcacaggtctatgtacagacatggagcactcagaatctttctatgaccattacacgagatgagtatccgtccaaccctatggtgctccgaggtattaatcagaaggctgcctttccacagtaccagcctgtcgtcatgctggagaagggttataccatccactggaatgggccggcaccacggactacatttctatacctcgtcaacttcaacaagaatgactggattcgagttggcctttgctatccatcaaacacaagttttcaagttacctttggctatttgcagcggcagaatggctcattatccaaaatcgaagaatatgagcctgtgcattcactggaagaactgcaaagaaagcaatccgagaggaaattctattttgactccagcacgggagacggtgtatccctatgttgcccaggctggagtgcagttcacaggcatagttgtggtacactacagccttgatctcctgggctcaagtgatcctcccacctcagcctcacaagtagctgctgccaccacacccagcattgattttcaatttttgtttagacttaaacaactacctggactttcattctgtagatgatagaacttccagattcccacttgattttccacaagaataaaaagaatatccacatttggaa

SEQ ID NO: 21783 - DNA, 675 bp, Homo sapiens
  misc_feature 1..675: note = ENST00000377043
  source 1..675: mol_type = unassigned DNA; mol_type = unassigned DNA
ggcttcctcatgaagaattcctggcagataacccccaggaataatatctccctcgtgaagtttggtccacatgtctctctgaatgtcttttttggaaagcctggtccctggtttgaagattgtgagatggatggtgataagaactccatattccatgacattgatggctctgtgacaggatacaaggatgcttatgtgggaagaatggacaactacctgatccgccatccaagctgtgtaaatgtgtctaagtggaatgcagtgatctgcagtgggacctatgcacaggtctatgtacagacatggagcactcagaatctttctatgaccattacacgagatgagtatccgtccaaccctatggtgctccgaggtattaatcagaaggctgcctttccacagtaccagcctgtcgtcatgctggagaagggttataccatccactggaatgggccggcaccacggactacatttctatacctcgtcaacttcaacaagtatgtttctgttactgttatttcaaatagttgagcaagtagtaatttagtggagaaaaagaataacttatgtctcctttgcagcaagcaaagaaagccaattttacatactttgcttctcttgtggggaggctgtatattttgtgttgatggaattaaagagattatacaaattgaa

SEQ ID NO: 21784 - DNA, 581 bp, Homo sapiens
  misc_feature 1..581: note = ENST00000537329
  source 1..581: mol_type = unassigned DNA; mol_type = unassigned DNA
ctgtttgtctttcccactacagcatatgtttcattcaatcaggtatcttgttttggctcctactgtatcctagaattttgcttagttcataccggatatttagctgtcttcataaaacaagtaagtgaagtgctgctaaggggacagcccatatgcattaaacaaaatcttgtatttccacaggacgttcccaattagaggctttcagatttatgatgggcccattcatctcacaaggagcactttcaaaaaatatgtgccaactccagataggtacagcagtgcaattggcttcctcatgaagaattcctggcagataacccccaggaataatatctccctcgtgaagtttggtccacatgtctctctgaatgtcttttttggaaagcctggtccctggtttgaagattgtgagatggatggtgataagaactccatattccatgacattgatggctctgtgacaggatacaaggatgcttatgtgggaagaatggacaactacctgatccgccatccaagctgtgtaaatgtgtctaagtggaatgcagtgatctgcagtgggacctatgcacaggtct

SEQ ID NO: 21785 - DNA, 381 bp, Homo sapiens
  misc_feature 1..381: note = ENST00000546219
  source 1..381: mol_type = unassigned DNA; mol_type = unassigned DNA
tagaacaatattttttgctacttccctattctgaaaagtatgagtttgattttagtaccttgacttacagataatgaaaaattttacttcagtccatctttcttatgtggaattgaaacacatgggtcagcagcagatggggcgataccctgttcattttcacctgtgtggtgacgtggattataaaggaggatacagacatgcaacatttgtggacggcctgtctattcatcacagcttctcaaggtgcatcactgtgcatgggacaaatggcttgctaataaaagacaccattgggtttgacacactaggtcattgtttctttttggaagatggtattgaacagaggaatactttgttccacaatctgggactcctcac

SEQ ID NO: 21786 - DNA, 542 bp, Homo sapiens
  misc_feature 1..542: note = ENST00000543165
  source 1..542: mol_type = unassigned DNA; mol_type = unassigned DNA
agttgagtacgagcggcagctgcgggcgccggcaatcgagtggcttcctggccatggagaggagatctggacccgaggacgccagggactcctctccgtctccctggaccgctgtgtaggcacctgagttaacggacgctaagcggggtaggggaagtaacagtgtatcatgtatgccactgattccaggggacactcccctgctttcctccaacctcagaatggaaatagtcgtcacccatctggctatgttccagggaaggttgtcccattgcgtccccctcctcctccaaagagtcaagcttcagccaaatttacctccatcagacgagaagaccgggcaaccttcgcattctcacctgaagaacagcaagcccagagagaaagtcaaaagcaaaagagacacaaaaatactttcatttgttttgctattactagtttctcattttttattgcacttgcaatcattttaggaatatcctcaaaatatgctccagatggtaagtgtgtgtatatgcacatagaacatattctagaagaca

SEQ ID NO: 21787 - DNA, 533 bp, Homo sapiens
  misc_feature 1..533: note = ENST00000545719
  source 1..533: mol_type = unassigned DNA; mol_type = unassigned DNA
accacttcacttgtgtgtgaacataagaagtatgactctgaaatgaatgcttcatgacagcaaggatcatgtctttctttcttgttcaacaccctatgtccagtgccttgaacagttcctgacccatgattttctgaaaactttactcctttgctgcacttcaagtctgcaaaattgacaaatgaaagtgtcggggcagttggggagaaagaggccttcagatatactctataaatcatcaaaatatgatgtgctatatattctcggcataaactggaaatgaaaaaaacttgctacaaataggagtgactcctttgggcttaaattggattggcagcaacacagattctgctgtggattgaagtcattttctacctcggcactactcagtccatggggaatggtgaagttatgattttgcagcaagattctgggagcaggccagcatctacatctgttctaaacttaacagtgtatcatgtatgccactgattccaggggacactcccctgctttcctccaacctcagaatg

SEQ ID NO: 21788 - DNA, 3512 bp, Homo sapiens
  misc_feature 1..3512: note = ENST00000296978
  source 1..3512: mol_type = unassigned DNA; mol_type = unassigned DNA
ccaaagatgggttttgtctgcgggtgatttgggctctcgaagtgcaactttgtggccgggacgcggatcggccggcctgggctcctgcagagcagatcctgtctgcgtcctccaggaggagtgggtggcaggactggggtttcccacaggttttggggcggcggcgagattggcacggtccggggtcgcaggcgcgcagccacgcccctggaagtccgccccggcccccgcccccaacccgcctcttcggggctttatggcgtgaggtttggggctgggatccatctggagccgagcagaaaacttttcccctcccgttcccggtcccttttgtctttcttggacgcggtggcggcgccgcctgagcggcgactccctctcccctgcccggcttgctgcgcccggtgccctccgagggcaggcgcgcctggactctgcgcccggatggcggcggccctctgtgagcaccggcagcggcgcatcccctgccccgaggcctccggtgcccccccggcgcgggcataggggcgcccccaccctccgtccgcttgcaccccttgccacccgccccctcgcctgactcatccgcccgcggtggccgcccgagccctgggatggggagggagaccgcggctgcccgcggcggccgagattcccgctgacgcccccgaccctgccgccttcttcgtccgcctccagaggcgcccgacgtcccgacagctcctggagtgagaccaggactgagaacagggagaggcgacccgacccccagggcccggtgctcaggacagcacacagagccgctgaaaacgactgaagagagcaagggatttcctgggacatctggctctggagagtaaaaggccaagctatgatagcaactggtggagtgataactggcctggccgccttgaaaaggcaagactctgccagatcacagcagcatgtcaacctcagcccgtctcctgctacccaagagaagaagcccatcaggcgccggccccgggcagatgttgtggttgttcgtggcaaaatccggctttattccccatctggtttttttcttattttaggagtgctcatctccattataggaattgctatggccgttcttggatattggccccaaaaagaacattttattgatgctgaaacaacactgtcaacaaatgaaactcaggtcattcggaatgaaggcggtgtggtggttcgcttctttgagcagcatttgcattctgataagatgaaaatgcttggcccattcaccatggggattggcattttcattttcatttgtgctaatgccattcttcatgaaaaccgtgacaaagagaccaaaatcatacacatgagggatatctattccacagtcattgacattcacacgctaagaatcaaggagcaaaggcaaatgaacggcatgtacactggtttgatgggagaaacagaagtaaaacagaatgggagctcctgtgcctcgagattggcagcaaatacgatcgcctctttctcgggttttcggagcagttttcgaatggacagctccgtggaggaggatgaacttatgttaaatgaaggtaagagttctgggcatcttatgccccctttgctctctgacagctctgtgtctgtctttggcctctatccacctccttccaagacaactgatgataagaccagcggctctaagaaatgtgaaaccaagtcaattgtgtcatcgtccatcagtgcttttacattgcctgtgatcaaacttaataactgtgttattgatgagcccagtatagataacatcactgaagatgctgacaacctcaaaagtaggtcaaggaatttgtcaatggattcccttgtggttcctttgcccaacaccagtgaatccttccagcccgtcagcacagtgctaccaaggaataattccattggggagtcgttgtcgagtcagtacaagtcatctatggctctcggacctggggctggacagctcttgtctcctggggctgccagaagacagtttgggtccaatacatccttgcatttgctctcgtcacactcaaagtccttggacttagaccggggtccctccactctaactgttcaggcagaacaacggaaacatccaagttggcctaggttggatcggaacaacagcaagggatatatgaaactagagaacaaagaagacccgatggataggttgcttgtgccccaagttgccatcaaaaaggactttaccaataaggagaagcttcttatgatttcaagatctcacaataatttgagttttgaacatgatgagtttttgagtaacaacctaaagaggggaacttctgaaacaaggttttaatgttaaaagaatatatcattttacaagggtatatattttaaaacgattttcactggtgtttccttcttaaagtattggctgtaagcctttttaatcaaatggtttgtagtgtattagaattggctgcttagttctgtaatgaagatggttgtatgtttgggttacttgtgactgcagtactctatgttaccacacatgattttatttttctcttcctttgaaagcatgatctcttttattaatatgaatgcaaaatgcttgcatccaaattaaagcttattttctttacttttaagttctttgattgccctattcataaaatgaaatgtccagtatggaaaacatagggtaccaaagtgtggaccaggagtacaaattcagtcccaatactcaatacgtattatagatgactatgagtgcaaaccttaggatgtgattttctgaataattgttctttgtaggatttggttacattatttaaaatgaaaaagatctagttttagtgtgagctcagtaatgttaattggttaagttcattgtgaatcttgagttttagataagtagttatttttttcaatatcacttctgtttttagtgatattatatcaagaaacaacgtattcaagagccatggctgacagtgccagatatacttagggataaacatcaaaatgcaattatagttgctataacgttagatactcggaatcaaaatttatttgcaagctgacttgataaactaaatgaaccaataaaatttgtagaaatgctatcctgaaataattatatacatgaagacaatgttgactaatgaattaagatacattatatactagttaatgctaactagtctcagtacctgtttttagccatctgttactgtccaatagcacctcattcccacattctattttcccccggtattctttagatcctagtatttggaaaacaatcggctaaccttgacatttctttttaccttcatatgccactatctcggtagttcaaaaaaatttagttcttgataaattgccttgaagtttaccttgtgctggagagccttatgataactccaaagactttcttacggtataatacatgttgtttaggattgtgtttcttagtcactgaagataataaatattaaaatggatgttttcatcag

SEQ ID NO: 21789 - DNA, 5017 bp, Homo sapiens
  misc_feature 1..5017: note = ENST00000392429
  source 1..5017: mol_type = unassigned DNA; mol_type = unassigned DNA
gcaagcatttaggaatagcatttgccaactcccaagacttggctgtccctctcgctctggccttacttacctaactgacctcctgtagtactgagttgtgtgctggccaagttcctattcctggactgctttctttcccttgaccttccttgaaatactgctaacctgacttttgactgtgatctatgtgctatctcctgtgtgaagcctaatgaaaggtccttctctaatggaaactttcattctaggagttacctcattctgttttatgtggatctgttagctccttcattaggtttcaagctgtttgaaacagtgattgaatttgctcacctttgctttcctctcagggtctacattgggaccctgagtgataatagagccttctgtagtattgaattgctttaaacagaattaaaggacattggcaccaaatgtgattttgccaatccttgggagtcttggtgcctctgtctgggcttgaccagggtagaatggctgaagaaaatgtgattcctccacccattaaattctttatttctcaactactctggaagtttttgcctctttttgtttctatccattttcatacttttaagatacccttttttactttaagataccttttttcttcctaacgtttctttacatgctcacatgcaagcccagtcatccatctctctttttcacctttctgtcctcatatatttttcttaaaatatcttttctcatctaatctcctttcctctatcaatcagcctcctaagcgaaaatggtagtgctaatgttttaaaaagtgggggaggactagaaatctgtatggaatgtaattcacttttattgcttttaaattaaatgaaacgtttttgcccttgtttccattctactcagaaggatttcagactaaatccttaagcctgccatatggaaataactgggctagagggctgctatctaatctaagcatttaattcaaacatttgaaatggtttttgcttcaagaaaacataggttgacactaagctttattttagcaaaggtttgggaaaggttctaatctgcagtatgtacactttgataaatttcatagactagagcaacagattacaatttagtttgttcttccaacataaaactattttaatcctagttataatttcactgaaggctggatttactcactggcttgttaaaactgtagataacaaccacaagcctgttatttaaacacaattcagaaatcataaatagaaattcaaaaggagagctcaatgctgcaagatgagatttgatgccctgaagaaactctctctgaaatttgccaaagaccttgtggaacttaaaatatcttcttgtttcctaccagctagatatggcagcttgagaactatttattatgaatcaagatagatattttaccaactcagaaaatgttgctttttgtttggatattaatcttgtttgttcatatttttaactaggaaagttagtacagtaatatggtggtcatccaacagaccacaagaagagaatttgtccctcattcagcattttagcaaatatttcttgaacactagccatgtgcaaggtattacagtgagtgtttctgctaataaaaatatgaattaaatttgatgtttgatcataagtagaagaactgtgatactataatattgtaagtgccatagaaaacttgctattataaaatgctgtaaggagttaatgcttgcatagggtgcagtgggtcagctagagaaggctttataaagaaagtggaatatgagctttgatgcctagccagatgtgggtatgtgaagaacagggcagggcagtggggagtgggtggattctggacagctgaaacattgttaacaaaatctcagaaatggtacaaaatggaatatgaatgagaaatacagaacatttgttaggttttatttttatgcaaattaaagagaagagttagagacaaagttaaagtcaatgggtctagaatttcagctaaaactttggtaggtagtggagaatattttatcattattctgctctttaaacaacttcagagatgattgattaatcttgattgtaaaggaagagaaattctttggaagaccagttagggggttatcatatggtctagtaaaagttaataagatctgcacaaggctgggaagagtaggattagaacagaggggtggaattaaaggacatcgtatattggaaatttctaggatttagaacctgattggaagaggaagaagaaagggaggagttaaaaataactgtaaagagccaaatctgagaactgaccctgctaaaaaagtcagacaagtcaagtggtgcagctggtgtgtgctagaagagtaaaaggccaagctatgatagcaactggtggagtgataactggcctggccgccttgaaaaggcaagactctgccagatcacagcagcatgtcaacctcagcccgtctcctgctacccaagagaagaagcccatcaggcgccggccccgggcagatgttgtggttgttcgtggcaaaatccggctttattccccatctggtttttttcttattttaggagtgctcatctccattataggaattgctatggccgttcttggatattggccccaaaaagaacattttattgatgctgaaacaacactgtcaacaaatgaaactcaggtcattcggaatgaaggcggtgtggtggttcgcttctttgagcagcatttgcattctgataagatgaaaatgcttggcccattcaccatggggattggcattttcattttcatttgtgctaatgccattcttcatgaaaaccgtgacaaagagaccaaaatcatacacatgagggatatctattccacagtcattgacattcacacgctaagaatcaaggagcaaaggcaaatgaacggcatgtacactggtttgatgggagaaacagaagtaaaacagaatgggagctcctgtgcctcgagattggcagcaaatacgatcgcctctttctcgggttttcggagcagttttcgaatggacagctccgtggaggaggatgaacttatgttaaatgaaggtaagagttctgggcatcttatgccccctttgctctctgacagctctgtgtctgtctttggcctctatccacctccttccaagacaactgatgataagaccagcggctctaagaaatgtgaaaccaagtcaattgtgtcatcgtccatcagtgcttttacattgcctgtgatcaaacttaataactgtgttattgatgagcccagtatagataacatcactgaagatgctgacaacctcaaaagtaggtcaaggaatttgtcaatggattcccttgtggttcctttgcccaacaccagtgaatccttccagcccgtcagcacagtgctaccaaggaataattccattggggagtcgttgtcgagtcagtacaagtcatctatggctctcggacctggggctggacagctcttgtctcctggggctgccagaagacagtttgggtccaatacatccttgcatttgctctcgtcacactcaaagtccttggacttagaccggggtccctccactctaactgttcaggcagaacaacggaaacatccaagttggcctaggttggatcggaacaacagcaagggatatatgaaactagagaacaaagaagacccgatggataggttgcttgtgccccaagttgccatcaaaaaggactttaccaataaggagaagcttcttatgatttcaagatctcacaataatttgagttttgaacatgatgagtttttgagtaacaacctaaagaggggaacttctgaaacaaggttttaatgttaaaagaatatatcattttacaagggtatatattttaaaacgattttcactggtgtttccttcttaaagtattggctgtaagcctttttaatcaaatggtttgtagtgtattagaattggctgcttagttctgtaatgaagatggttgtatgtttgggttacttgtgactgcagtactctatgttaccacacatgattttatttttctcttcctttgaaagcatgatctcttttattaatatgaatgcaaaatgcttgcatccaaattaaagcttattttctttacttttaagttctttgattgccctattcataaaatgaaatgtccagtatggaaaacatagggtaccaaagtgtggaccaggagtacaaattcagtcccaatactcaatacgtattatagatgactatgagtgcaaaccttaggatgtgattttctgaataattgttctttgtaggatttggttacattatttaaaatgaaaaagatctagttttagtgtgagctcagtaatgttaattggttaagttcattgtgaatcttgagttttagataagtagttatttttttcaatatcacttctgtttttagtgatattatatcaagaaacaacgtattcaagagccatggctgacagtgccagatatacttagggataaacatcaaaatgcaattatagttgctataacgttagatactcggaatcaaaatttatttgcaagctgacttgataaactaaatgaaccaataaaatttgtagaaatgctatcctgaaataattatatacatgaagacaatgttgactaatgaattaagatacattatatactagttaatgctaactagtctcagtacctgtttttagccatctgttactgtccaatagcacctcattcccacattctattttcccccggtattctttagatcctagtatttggaaaacaatcggctaaccttgacatttctttttaccttcatatgccactatctcggtagttcaaaaaaatttagttcttgataaattgccttgaagtttaccttgtgctggagagccttatgataactccaaagactttcttacggtataatacatgttgtttaggattgtgtttcttagtcactgaagataataaatattaaaatggatgttttcatc

SEQ ID NO: 21790 - DNA, 2899 bp, Homo sapiens
  misc_feature 1..2899: note = ENST00000617887
  source 1..2899: mol_type = unassigned DNA; mol_type = unassigned DNA
cttgcaccccttgccacccgccccctcgcctgactcatccgcccgcggtggccgcccgagccctgggatggggagggagaccgcggctgcccgcggcggccgagattcccgctgacgcccccgaccctgccgccttcttcgtccgcctccagaggcgcccgacgtcccgacagctcctggagtgagaccaggactgagaacagggagaggcgacccgacccccagggcccggtgctcaggacagagtaaaaggccaagctatgatagcaactggtggagtgataactggcctggccgccttgaaaaggcaagactctgccagatcacagcagcatgtcaacctcagcccgtctcctgctacccaagagaagaagcccatcaggcgccggccccgggcagatgttgtggttgttcgtggcaaaatccggctttattccccatctggtttttttcttattttaggagtgctcatctccattataggaattgctatggccgttcttggatattggccccaaaaagaacattttattgatgctgaaacaacactgtcaacaaatgaaactcaggtcattcggaatgaaggcggtgtggtggttcgcttctttgagcagcatttgcattctgataagatgaaaatgcttggcccattcaccatggggattggcattttcattttcatttgtgctaatgccattcttcatgaaaaccgtgacaaagagaccaaaatcatacacatgagggatatctattccacagtcattgacattcacacgctaagaatcaaggagcaaaggcaaatgaacggcatgtacactggtttgatgggagaaacagaagtaaaacagaatgggagctcctgtgcctcgagattggcagcaaatacgatcgcctctttctcgggttttcggagcagttttcgaatggacagctccgtggaggaggatgaacttatgttaaatgaaggtaagagttctgggcatcttatgccccctttgctctctgacagctctgtgtctgtctttggcctctatccacctccttccaagacaactgatgataagaccagcggctctaagaaatgtgaaaccaagtcaattgtgtcatcgtccatcagtgcttttacattgcctgtgatcaaacttaataactgtgttattgatgagcccagtatagataacatcactgaagatgctgacaacctcaaaagtaggtcaaggaatttgtcaatggattcccttgtggttcctttgcccaacaccagtgaatccttccagcccgtcagcacagtgctaccaaggaataattccattggggagtcgttgtcgagtcagtacaagtcatctatggctctcggacctggggctggacagctcttgtctcctggggctgccagaagacagtttgggtccaatacatccttgcatttgctctcgtcacactcaaagtccttggacttagaccggggtccctccactctaactgttcaggcagaacaacggaaacatccaagttggcctaggttggatcggaacaacagcaagggatatatgaaactagagaacaaagaagacccgatggataggttgcttgtgccccaagttgccatcaaaaaggactttaccaataaggagaagcttcttatgatttcaagatctcacaataatttgagttttgaacatgatgagtttttgagtaacaacctaaagaggggaacttctgaaacaaggttttaatgttaaaagaatatatcattttacaagggtatatattttaaaacgattttcactggtgtttccttcttaaagtattggctgtaagcctttttaatcaaatggtttgtagtgtattagaattggctgcttagttctgtaatgaagatggttgtatgtttgggttacttgtgactgcagtactctatgttaccacacatgattttatttttctcttcctttgaaagcatgatctcttttattaatatgaatgcaaaatgcttgcatccaaattaaagcttattttctttacttttaagttctttgattgccctattcataaaatgaaatgtccagtatggaaaacatagggtaccaaagtgtggaccaggagtacaaattcagtcccaatactcaatacgtattatagatgactatgagtgcaaaccttaggatgtgattttctgaataattgttctttgtaggatttggttacattatttaaaatgaaaaagatctagttttagtgtgagctcagtaatgttaattggttaagttcattgtgaatcttgagttttagataagtagttatttttttcaatatcacttctgtttttagtgatattatatcaagaaacaacgtattcaagagccatggctgacagtgccagatatacttagggataaacatcaaaatgcaattatagttgctataacgttagatactcggaatcaaaatttatttgcaagctgacttgataaactaaatgaaccaataaaatttgtagaaatgctatcctgaaataattatatacatgaagacaatgttgactaatgaattaagatacattatatactagttaatgctaactagtctcagtacctgtttttagccatctgttactgtccaatagcacctcattcccacattctattttcccccggtattctttagatcctagtatttggaaaacaatcggctaaccttgacatttctttttaccttcatatgccactatctcggtagttcaaaaaaatttagttcttgataaattgccttgaagtttaccttgtgctggagagccttatgataactccaaagactttcttacggtataatacatgttgtttaggattgtgtttcttagtcactgaagataataaatattaaaatggatgttttcatc

SEQ ID NO: 21791 - DNA, 2918 bp, Homo sapiens
  misc_feature 1..2918: note = ENST00000545622
  source 1..2918: mol_type = unassigned DNA; mol_type = unassigned DNA
cagctcagtggctctcaaacctcagcaggcatcagaatcacctggaggacttatgaaaccagtttgctgggcccgcttggtccagcgcttctgattcagtagggagaagtggaaccatgaatttgcattcccgacaagctcacaggttataccagtgttgctggcccgaggattgtattttgggcagcattactccatctgaactcttcttgttctcttacctccttacgtcccaagactcgcggatgttagtttattctcagagtaaaaggccaagctatgatagcaactggtggagtgataactggcctggccgccttgaaaaggcaagactctgccagatcacagcagcatgtcaacctcagcccgtctcctgctacccaagagaagaagcccatcaggcgccggccccgggcagatgttgtggttgttcgtggcaaaatccggctttattccccatctggtttttttcttattttaggagtgctcatctccattataggaattgctatggccgttcttggatattggccccaaaaagaacattttattgatgctgaaacaacactgtcaacaaatgaaactcaggtcattcggaatgaaggcggtgtggtggttcgcttctttgagcagcatttgcattctgataagatgaaaatgcttggcccattcaccatggggattggcattttcattttcatttgtgctaatgccattcttcatgaaaaccgtgacaaagagaccaaaatcatacacatgagggatatctattccacagtcattgacattcacacgctaagaatcaaggagcaaaggcaaatgaacggcatgtacactggtttgatgggagaaacagaagtaaaacagaatgggagctcctgtgcctcgagattggcagcaaatacgatcgcctctttctcgggttttcggagcagttttcgaatggacagctccgtggaggaggatgaacttatgttaaatgaaggtaagagttctgggcatcttatgccccctttgctctctgacagctctgtgtctgtctttggcctctatccacctccttccaagacaactgatgataagaccagcggctctaagaaatgtgaaaccaagtcaattgtgtcatcgtccatcagtgcttttacattgcctgtgatcaaacttaataactgtgttattgatgagcccagtatagataacatcactgaagatgctgacaacctcaaaagtaggtcaaggaatttgtcaatggattcccttgtggttcctttgcccaacaccagtgaatccttccagcccgtcagcacagtgctaccaaggaataattccattggggagtcgttgtcgagtcagtacaagtcatctatggctctcggacctggggctggacagctcttgtctcctggggctgccagaagacagtttgggtccaatacatccttgcatttgctctcgtcacactcaaagtccttggacttagaccggggtccctccactctaactgttcaggcagaacaacggaaacatccaagttggcctaggttggatcggaacaacagcaagggatatatgaaactagagaacaaagaagacccgatggataggttgcttgtgccccaagttgccatcaaaaaggactttaccaataaggagaagcttcttatgatttcaagatctcacaataatttgagttttgaacatgatgagtttttgagtaacaacctaaagaggggaacttctgaaacaaggttttaatgttaaaagaatatatcattttacaagggtatatattttaaaacgattttcactggtgtttccttcttaaagtattggctgtaagcctttttaatcaaatggtttgtagtgtattagaattggctgcttagttctgtaatgaagatggttgtatgtttgggttacttgtgactgcagtactctatgttaccacacatgattttatttttctcttcctttgaaagcatgatctcttttattaatatgaatgcaaaatgcttgcatccaaattaaagcttattttctttacttttaagttctttgattgccctattcataaaatgaaatgtccagtatggaaaacatagggtaccaaagtgtggaccaggagtacaaattcagtcccaatactcaatacgtattatagatgactatgagtgcaaaccttaggatgtgattttctgaataattgttctttgtaggatttggttacattatttaaaatgaaaaagatctagttttagtgtgagctcagtaatgttaattggttaagttcattgtgaatcttgagttttagataagtagttatttttttcaatatcacttctgtttttagtgatattatatcaagaaacaacgtattcaagagccatggctgacagtgccagatatacttagggataaacatcaaaatgcaattatagttgctataacgttagatactcggaatcaaaatttatttgcaagctgacttgataaactaaatgaaccaataaaatttgtagaaatgctatcctgaaataattatatacatgaagacaatgttgactaatgaattaagatacattatatactagttaatgctaactagtctcagtacctgtttttagccatctgttactgtccaatagcacctcattcccacattctattttcccccggtattctttagatcctagtatttggaaaacaatcggctaaccttgacatttctttttaccttcatatgccactatctcggtagttcaaaaaaatttagttcttgataaattgccttgaagtttaccttgtgctggagagccttatgataactccaaagactttcttacggtataatacatgttgtttaggattgtgtttcttagtcactgaagataataaatattaaaatggatgttttcatc

SEQ ID NO: 21792 - DNA, 1245 bp, Homo sapiens
  misc_feature 1..1245: note = ENST00000377311
  source 1..1245: mol_type = unassigned DNA; mol_type = unassigned DNA
cagggaagcagaggagcagcagggtcagggtgctgggttcctaaggtgcaaggatgcagaacagaactggcctcattctctgtgctcttgccctcctgatgggtttcctgatggtctgcctgggggccttcttcatttcctggggctccatattcgactgtcaggggagcctgattgcggcctatttgcttctgcctctggggtttgtgatccttctgagtggaattttctggagcaactatcgccaggtgactgaaagcaaaggagtgttgaggcacatgctccgacaacaccttgctcatggggccctgcccgtggccacagtagacaggccagacttttaccctccagcttatgaagagagccttgaggtggaaaagcagagctgtcctgcagagagagaggcctctggcattcctccacctctatatacagagacgggcctggaattccaggatggaaatgactcccacccagaggccccaccatcttatagagagtccatagccggcctggtggtgacagcaatctcagaggacgcccagaggcgaggccaagagtgctgaggcagagaaagctctccagcactcatgatgccaccactgtggggagcagctactgataataaaggcaaacgagggactgtgggaggaaaagccacaccagggaccccacaagagagcttggggaggggatgacagccctgaattccagacataactggccatgccagggcagggcaggccaggggccctggaagggtgtggccaacaccaagcagacatttcagagcattcacactaatcttaaccccggctggccttgggtccccaaaggtgtcactctgagagctctgcttacagagattctttctgctgtcactcaatttccctcccatcacctcaactccagccagggaggaatagatgctggttgtcaggacagccacatgccttcctgttctatatcacctagtaatctcaaagcgaaggtttgttgtttaatttattgattgttcagccttttgttttgttagcttgtttcctagttacctccagctgaccatactaccagagtgaggcagtacttcacatcctgggagatatgccctcggaacccatgaatgttattttgtattattttattttcatgatatgtattttttctatgtaaaaggaaaatgactgtaatatttgccttcaagatggttcaaacacaaaatattaaatgagctgtttcttaaaa

SEQ ID NO: 21793 - DNA, 824 bp, Homo sapiens
  misc_feature 1..824: note = ENST00000472622
  source 1..824: mol_type = unassigned DNA; mol_type = unassigned DNA
cgcgctcgcgctcgacggtgtcctgaagcgcgctcccggggaggtgttgcagccatggctacggcagccggcgcgacctactttcagcgaggcagtctgttctggttcacagtcatcaccctcagctttggctactacacatgggttgtcttctggcctcagagtatcccttatcagaaccttgggcccctgggccccttcactcagtacttggtggaccaccatcacaccctcctgtgcaatgggtattggcttgcctggctgattcatgtgggagagtccttgtatgccatagtattgtgcaagtaagtctttgaagcataaaggcatcacaagtggtcgggctcagctactctggttcctacagactttcttctttgggatagcgtctctcaccatcttgattgcttacaaacggaagcgccaaaaacaaacttgaagttgtctgaaagcttgctctacacttttacattcatcctcacccttttttttgtggggtagaggaggtgcagtaatttactcagtgatctttctactttctagaaactgtccttcaaagctctttaagaccccctcgttagtcagttttttctcttatatgctctggttgagcttgaatagaccagttgttacttaagaaagaaacagagaaagattttagcttttcaatcctatttggcagaggacttcagctaccttcttacagtctttggctgtgttggtaccctcgtgtgctctgagctaagccacatactaaactgactttttggtttgtatacccttgctcccgccttctgatgaaaacaccttaccctcacaaccac

SEQ ID NO: 21794 - DNA, 2042 bp, Homo sapiens
  misc_feature 1..2042: note = ENST00000372281
  source 1..2042: mol_type = unassigned DNA; mol_type = unassigned DNA
gaagcgcgctcccggggaggtgttgcagccatggctacggcagccggcgcgacctactttcagcgaggcagtctgttctggttcacagtcatcaccctcagctttggctactacacatgggttgtcttctggcctcagagtatcccttatcagaaccttgggcccctgggccccttcactcagtacttggtggaccaccatcacaccctcctgtgcaatgggtattggcttgcctggctgattcatgtgggagagtccttgtatgccatagtattgtgcaagcataaaggcatcacaagtggtcgggctcagctactctggttcctacagactttcttctttgggatagcgtctctcaccatcttgattgcttacaaacggaagcgccaaaaacaaacttgaagttgtctgaaagcttgctctacacttttacattcatcctcacccttttttttgtggggtagaggaggtgcagtaatttactcagtgatctttctactttctagaaactgtccttcaaagctctttaagaccccctcgttagtcagttttttctcttatatgctctggttgagcttgaatagaccagttgttacttaagaaagaaacagagaaagattttagcttttcaatcctatttggcagaggacttcagctaccttcttacagtctttggctgtgttggtaccctcgtgtgctctgagctaagccacatactaaactgactttttggtttgtatacccttgctcccgccttctgatgaaaacaccttaccctcacaaccaccatctttcctctcctttccaaagctctttccaccttgctgcactaagataaagtgacacttccactatatgtcaattccacacacatttattaggtacctgtgaggtaggatcctatcctctcaaacttccatttctcatgctacagagaaagataaggaagatgagcaagtgcctggaatggggcaggctgagcagtcacacaggcatagaggcacgctgagaacctggaggggagactgcagagtgccttccctgatgctgcagccggaagtgatccttccctccacctggcccctgggacactgtgctctgcagtgtgcagggcctgatggcactgctagattgctccttcagctcagggccacagcttaaacagctttacctttcccctcagcacctgtcccactatcttgcacacaggtgctctaaccatgtttattgaacaaaggagggaaactgatttcactttcacttgttcattatcattccaatttttatgtgaaaatggcacaacccatttggggtaccctcaccccaaaataaaagcccaagtctacctttgactggtaccaccttttttgtggtttcgttggtgagaaacctttatctttttcatacctttctattctcaatcacttctccaaaagtgtgtctttccagctctgatttattcaaaacacaagcatttctgtttagagattctagcccatgggttatctggctagttattacctctcctgttcacttagttatactttattattgctcacaggctggggaggcagaatgactctgtcaccactaggagccattagggcttcttccctggaggactgcctgcttgctttctggggacactagccctcatttcccttctgtggtacagtggggcaaattatttgtattaagcaaacatttatgggaaacaacccgctcccgaaaacggagcccccaagtaaagcacaaccctgaaagattatgaactatgaattgtctctggtagagataaatttctgcaaacatatctcagtcttccctctgtttctctggtgattaagaagttcctttttggtaaggaaaaggatttttaaccatagagttaggcatcatggaaattcaaaccagatttcttaatacctggtcttcctcaaagagaaataataacagtaatagtggtgctgggaacaatatggcagattattgaatgaaattgattaacttgaataaaatgctgtgaattttctctagctgaa

SEQ ID NO: 21795 - DNA, 860 bp, Homo sapiens
  misc_feature 1..860: note = ENST00000372275
  source 1..860: mol_type = unassigned DNA; mol_type = unassigned DNA
cggggaggtgttgcagccatggctacggcagccggcgcgacctactttcagcgaggcagtctgttctggttcacagtcatcaccctcagctttggctactacacatgggttgtcttctggcctcagagtatcccttatcagaaccttgggcccctgggccccttcactcagtacttggtggaccaccatcacaccctcctgtgcaatgggtattggcttgcctggctgattcatgtgggagagtccttgtatgccatagtattgtgcaaatgagaaaactgattctgagagattctgagtgatttgcccaggtcacagctggcataaaggcatcacaagtggtcgggctcagctactctggttcctacagactttcttctttgggatagcgtctctcaccatcttgattgcttacaaacggaagcgccaaaaacaaacttgaagttgtctgaaagcttgctctacacttttacattcatcctcacccttttttttgtggggtagaggaggtgcagtaatttactcagtgatctttctactttctagaaactgtccttcaaagctctttaagaccccctcgttagtcagttttttctcttatatgctctggttgagcttgaatagaccagttgttacttaagaaagaaacagagaaagattttagcttttcaatcctatttggcagaggacttcagctaccttcttacagtctttggctgtgttggtaccctcgtgtgctctgagctaagccacatactaaactgactttttggtttgtatacccttgctcccgccttctgatgaaaacaccttaccctcacaaccaccatctttcctctcctttccaaagctctttccac

SEQ ID NO: 21796 - DNA, 481 bp, Homo sapiens
  misc_feature 1..481: note = ENST00000372274
  source 1..481: mol_type = unassigned DNA; mol_type = unassigned DNA
ttgcagccatggctacggcagccggcgcgacctactttcagcgaggcagtctgttctggttcacagtcatcaccctcagctttggctactacacatgggttgtcttctggcctcagagtatcccttatcagaaccttgggcccctgggccccttcactcagtacttggtggaccaccatcacaccctcctgtgcaatgggtattggcttgcctggctgattcatgtgggagagtccttgtatgccatagtattgtgcaagcaaaatgagctaagaatacggataaagatgagaaaactgattctgagagattctgagtgatttgcccaggtcacagctggcataaaggcatcacaagtggtcgggctcagctactctggttcctacagactttcttctttgggatagcgtctctcaccatcttgattgcttacaaacggaagcgccaaaaacaaacttgaagttgtctgaaagcttgctct

SEQ ID NO: 21797 - DNA, 2074 bp, Homo sapiens
  misc_feature 1..2074: note = ENST00000372273
  source 1..2074: mol_type = unassigned DNA
ggacggctggggagctcccagccaactctgtgtctgggtttttcaagaggatggtgaagtcggaggccagcaatgcggctaccgcctatttccgtccagcaagacccttgccctctctggtcacagtcctggggctgggctacttcgcgtgggttgtcttctggcctcagagtatcccttatcagaaccttgggcccctgggccccttcactcagtacttggtggaccaccatcacaccctcctgtgcaatgggtattggcttgcctggctgattcatgtgggagagtccttgtatgccatagtattgtgcaagcataaaggcatcacaagtggtcgggctcagctactctggttcctacagactttcttctttgggatagcgtctctcaccatcttgattgcttacaaacggaagcgccaaaaacaaacttgaagttgtctgaaagcttgctctacacttttacattcatcctcacccttttttttgtggggtagaggaggtgcagtaatttactcagtgatctttctactttctagaaactgtccttcaaagctctttaagaccccctcgttagtcagttttttctcttatatgctctggttgagcttgaatagaccagttgttacttaagaaagaaacagagaaagattttagcttttcaatcctatttggcagaggacttcagctaccttcttacagtctttggctgtgttggtaccctcgtgtgctctgagctaagccacatactaaactgactttttggtttgtatacccttgctcccgccttctgatgaaaacaccttaccctcacaaccaccatctttcctctcctttccaaagctctttccaccttgctgcactaagataaagtgacacttccactatatgtcaattccacacacatttattaggtacctgtgaggtaggatcctatcctctcaaacttccatttctcatgctacagagaaagataaggaagatgagcaagtgcctggaatggggcaggctgagcagtcacacaggcatagaggcacgctgagaacctggaggggagactgcagagtgccttccctgatgctgcagccggaagtgatccttccctccacctggcccctgggacactgtgctctgcagtgtgcagggcctgatggcactgctagattgctccttcagctcagggccacagcttaaacagctttacctttcccctcagcacctgtcccactatcttgcacacaggtgctctaaccatgtttattgaacaaaggagggaaactgatttcactttcacttgttcattatcattccaatttttatgtgaaaatggcacaacccatttggggtaccctcaccccaaaataaaagcccaagtctacctttgactggtaccaccttttttgtggtttcgttggtgagaaacctttatctttttcatacctttctattctcaatcacttctccaaaagtgtgtctttccagctctgatttattcaaaacacaagcatttctgtttagagattctagcccatgggttatctggctagttattacctctcctgttcacttagttatactttattattgctcacaggctggggaggcagaatgactctgtcaccactaggagccattagggcttcttccctggaggactgcctgcttgctttctggggacactagccctcatttcccttctgtggtacagtggggcaaattatttgtattaagcaaacatttatgggaaacaacccgctcccgaaaacggagcccccaagtaaagcacaaccctgaaagattatgaactatgaattgtctctggtagagataaatttctgcaaacatatctcagtcttccctctgtttctctggtgattaagaagttcctttttggtaaggaaaaggatttttaaccatagagttaggcatcatggaaattcaaaccagatttcttaatacctggtcttcctcaaagagaaataataacagtaatagtggtgctgggaacaatatggcagattattgaatgaaattgattaacttgaataaaatgctgtgaattttctctagctgaa

SEQ ID NO: 21798 - DNA, 1963 bp, Homo sapiens
  misc_feature 1..1963: note = ENST00000467529
  source 1..1963: mol_type = unassigned DNA
gtgcgcacgcgcatctgacggttgtctcggttactcattgggttgtcttctggcctcagagtatcccttatcagaaccttgggcccctgggccccttcactcagtacttggtggaccaccatcacaccctcctgtgcaatgggtattggcttgcctggctgattcatgtgggagagtccttgtatgccatagtattgtgcaagcataaaggcatcacaagtggtcgggctcagctactctggttcctacagactttcttctttgggatagcgtctctcaccatcttgattgcttacaaacggaagcgccaaaaacaaacttgaagttgtctgaaagcttgctctacacttttacattcatcctcacccttttttttgtggggtagaggaggtgcagtaatttactcagtgatctttctactttctagaaactgtccttcaaagctctttaagaccccctcgttagtcagttttttctcttatatgctctggttgagcttgaatagaccagttgttacttaagaaagaaacagagaaagattttagcttttcaatcctatttggcagaggacttcagctaccttcttacagtctttggctgtgttggtaccctcgtgtgctctgagctaagccacatactaaactgactttttggtttgtatacccttgctcccgccttctgatgaaaacaccttaccctcacaaccaccatctttcctctcctttccaaagctctttccaccttgctgcactaagataaagtgacacttccactatatgtcaattccacacacatttattaggtacctgtgaggtaggatcctatcctctcaaacttccatttctcatgctacagagaaagataaggaagatgagcaagtgcctggaatggggcaggctgagcagtcacacaggcatagaggcacgctgagaacctggaggggagactgcagagtgccttccctgatgctgcagccggaagtgatccttccctccacctggcccctgggacactgtgctctgcagtgtgcagggcctgatggcactgctagattgctccttcagctcagggccacagcttaaacagctttacctttcccctcagcacctgtcccactatcttgcacacaggtgctctaaccatgtttattgaacaaaggagggaaactgatttcactttcacttgttcattatcattccaatttttatgtgaaaatggcacaacccatttggggtaccctcaccccaaaataaaagcccaagtctacctttgactggtaccaccttttttgtggtttcgttggtgagaaacctttatctttttcatacctttctattctcaatcacttctccaaaagtgtgtctttccagctctgatttattcaaaacacaagcatttctgtttagagattctagcccatgggttatctggctagttattacctctcctgttcacttagttatactttattattgctcacaggctggggaggcagaatgactctgtcaccactaggagccattagggcttcttccctggaggactgcctgcttgctttctggggacactagccctcatttcccttctgtggtacagtggggcaaattatttgtattaagcaaacatttatgggaaacaacccgctcccgaaaacggagcccccaagtaaagcacaaccctgaaagattatgaactatgaattgtctctggtagagataaatttctgcaaacatatctcagtcttccctctgtttctctggtgattaagaagttcctttttggtaaggaaaaggatttttaaccatagagttaggcatcatggaaattcaaaccagatttcttaatacctggtcttcctcaaagagaaataataacagtaatagtggtgctgggaacaatatggcagattattgaatgaaattgattaacttgaataaaatgctgtgaattttctctagctgaa

SEQ ID NO: 21799 - DNA, 847 bp, Homo sapiens
  misc_feature 1..847: note = ENST00000463029
  source 1..847: mol_type = unassigned DNA
cgcacgcgcatctgacggttgtctcggttactcatccccagcagcggagtgagaccctgtcaaaaaaaaaagaaagaaagaaaatagaagccaagaatggagacccaaatgactgttcagagtttcttcgtgggttgtcttctggcctcagagtatcccttatcagaaccttgggcccctgggccccttcactcagtacttggtggaccaccatcacaccctcctgtgcaatgggtattggcttgcctggctgattcatgtgggagagtccttgtatgccatagtattgtgcaagcataaaggcatcacaagtggtcgggctcagctactctggttcctacagactttcttctttgggatagcgtctctcaccatcttgattgcttacaaacggaagcgccaaaaacaaacttgaagttgtctgaaagcttgctctacacttttacattcatcctcacccttttttttgtggggtagaggaggtgcagtaatttactcagtgatctttctactttctagaaactgtccttcaaagctctttaagaccccctcgttagtcagttttttctcttatatgctctggttgagcttgaatagaccagttgttacttaagaaagaaacagagaaagattttagcttttcaatcctatttggcagaggacttcagctaccttcttacagtctttggctgtgttggtaccctcgtgtgctctgagctaagccacatactaaactgactttttggtttgtatacccttgctcccgccttctgatgaaaacaccttaccctcacaaccaccatctttcctctcctttccaaagctctttccaccttgctgcactaag

SEQ ID NO: 21800 - DNA, 785 bp, Homo sapiens
  misc_feature 1..785: note = ENST00000476173
  source 1..785: mol_type = unassigned DNA
ctcggttactcattgggttgtcttctggcctcagagtatcccttatcagaaccttgggcccctgggccccttcactcagtacttggtggaccaccatcacaccctcctgtgcaatgggtattggcttgcctggctgattcatgtgggagagtccttgtatgccatagtattgtgcaaatgagaaaactgattctgagagattctgagtgatttgcccaggtcacagctggcataaaggcatcacaagtggtcgggctcagctactctggttcctacagactttcttctttgggatagcgtctctcaccatcttgattgcttacaaacggaagcgccaaaaacaaacttgaagttgtctgaaagcttgctctacacttttacattcatcctcacccttttttttgtggggtagaggaggtgcagtaatttactcagtgatctttctactttctagaaactgtccttcaaagctctttaagaccccctcgttagtcagttttttctcttatatgctctggttgagcttgaatagaccagttgttacttaagaaagaaacagagaaagattttagcttttcaatcctatttggcagaggacttcagctaccttcttacagtctttggctgtgttggtaccctcgtgtgctctgagctaagccacatactaaactgactttttggtttgtatacccttgctcccgccttctgatgaaaacaccttaccctcacaaccaccatctttcctctcctttccaaagctctttccaccttgctgcactaagata

SEQ ID NO: 21801 - DNA, 878 bp, Homo sapiens
  misc_feature 1..878: note = ENST00000483732
  source 1..878: mol_type = unassigned DNA
ctcttaggatagtttctgctttctagtgttcctgtctttgggtcctcacctctgcatggttactaacgggttatccgagcctaagcctctcacgaagcggaaagtcaagttaacagactgccataggcctgccaagtcagaatagggcttccgaagcagaatgtttgagccaataggaattgtttggaaaacggggataaatctaaaggatgggtaggatttaagtggtaagggaggataaagaggctataactgttctgacataggtgtggaagcaagaagaaagctgtacctagaaaaagagcgacgtttgtttggctgagaaataatctgtttaaaggataacgagaaagatgcgtggaaaaccccagcagcggagtgagaccctgtcaaaaaaaaaagaaagaaagaaaatagaagccaagaatggagacccaaatgactgttcagagtttcttcgtgggttgtcttctggcctcagagtatcccttatcagaaccttgggcccctgggccccttcactcagtacttggtggaccaccatcacaccctcctgtgcaatgggtattggcttgcctggctgattcatgtgggagagtccttgtatgccatagtattgtgcaagcataaaggcatcacaagtggtcgggctcagctactctggttcctacagactttcttctttgggatagcgtctctcaccatcttgattgcttacaaacggaagcgccaaaaacaaacttgaagttgtctgaaagcttgctctacacttttacattcatcctcacccttttttttgtggggtagaggaggtgcagtaatttactcagtgatctttctactttctagaaactgtccttcaaagctctttaagaccc

SEQ ID NO: 21802 - DNA, 407 bp, Homo sapiens
  misc_feature 1..407: note = ENST00000463209
  source 1..407: mol_type = unassigned DNA
ggagacccaaatgactgttcagagtttcttcgtgggttgtcttctggcctcagagtatcccttatcagaaccttgggcccctgggccccttcactcagtacttggtggaccaccatcacaccctcctgtgcaatgggtattggcttgcctggctgattcatgtgggagagtccttgtatgccatagtattgtgcaagcaaaatgagctaagaatacggataaaggtatgtgaatgagaacaagttatgatgaccccaggaaaacccttctccgggttacctagccaccaactgtgacccttctgaaggaggaggaaacaagcactgctgttcagtgagcctgctcttccaagatggcaactcatctttatttttctttactaaatatcatacacatttacaggatca

SEQ ID NO: 21803 - DNA, 719 bp, Homo sapiens
  misc_feature 1..719: note = ENST00000450179
  source 1..719: mol_type = unassigned DNA
agagtttcttcggtctgtgtgggttgtcttctggcctcagagtatcccttatcagaaccttgggcccctgggccccttcactcagtacttggtggaccaccatcacaccctcctgtgcaatgggtattggcttgcctggctgattcatgtgggagagtccttgtatgccatagtattgtgcaagcataaaggcatcacaagtggtcgggctcagctactctggttcctacagactttcttctttgggatagcgtctctcaccatcttgattgcttacaaacggaagcgccaaaaacaaacttgaagttgtctgaaagcttgctctacacttttacattcatcctcacccttttttttgtggggtagaggaggtgcagtaatttactcagtgatctttctactttctagaaactgtccttcaaagctctttaagaccccctcgttagtcagttttttctcttatatgctctggttgagcttgaatagaccagttgttacttaagaaagaaacagagaaagattttagcttttcaatcctatttggcagaggacttcagctaccttcttacagtctttggctgtgttggtaccctcgtgtgctctgagctaagccacatactaaactgactttttggtttgtatacccttgctcccgccttctgatgaaaacaccttaccctcacaaccaccatctttcctctcctttccaaagctctttc

SEQ ID NO: 21804 - DNA, 2154 bp, Homo sapiens
  misc_feature 1..2154: note = ENST00000613758
  source 1..2154: mol_type = unassigned DNA
cgcgctcgcgctcgacggtgtcctgaagcgcgctcccggggaggtgttgcagccatggctacggcagccggcgcgacctactttcagcgaggcagtctgttctggttcacagtcatcaccctcagctttggctactacacaccccagcagcggagtgagaccctgtcaaaaaaaaaagaaagaaagaaaatagaagccaagaatggagacccaaatgactgttcagagtttcttcgtgggttgtcttctggcctcagagtatcccttatcagaaccttgggcccctgggccccttcactcagtacttggtggaccaccatcacaccctcctgtgcaatgggtattggcttgcctggctgattcatgtgggagagtccttgtatgccatagtattgtgcaagcataaaggcatcacaagtggtcgggctcagctactctggttcctacagactttcttctttgggatagcgtctctcaccatcttgattgcttacaaacggaagcgccaaaaacaaacttgaagttgtctgaaagcttgctctacacttttacattcatcctcacccttttttttgtggggtagaggaggtgcagtaatttactcagtgatctttctactttctagaaactgtccttcaaagctctttaagaccccctcgttagtcagttttttctcttatatgctctggttgagcttgaatagaccagttgttacttaagaaagaaacagagaaagattttagcttttcaatcctatttggcagaggacttcagctaccttcttacagtctttggctgtgttggtaccctcgtgtgctctgagctaagccacatactaaactgactttttggtttgtatacccttgctcccgccttctgatgaaaacaccttaccctcacaaccaccatctttcctctcctttccaaagctctttccaccttgctgcactaagataaagtgacacttccactatatgtcaattccacacacatttattaggtacctgtgaggtaggatcctatcctctcaaacttccatttctcatgctacagagaaagataaggaagatgagcaagtgcctggaatggggcaggctgagcagtcacacaggcatagaggcacgctgagaacctggaggggagactgcagagtgccttccctgatgctgcagccggaagtgatccttccctccacctggcccctgggacactgtgctctgcagtgtgcagggcctgatggcactgctagattgctccttcagctcagggccacagcttaaacagctttacctttcccctcagcacctgtcccactatcttgcacacaggtgctctaaccatgtttattgaacaaaggagggaaactgatttcactttcacttgttcattatcattccaatttttatgtgaaaatggcacaacccatttggggtaccctcaccccaaaataaaagcccaagtctacctttgactggtaccaccttttttgtggtttcgttggtgagaaacctttatctttttcatacctttctattctcaatcacttctccaaaagtgtgtctttccagctctgatttattcaaaacacaagcatttctgtttagagattctagcccatgggttatctggctagttattacctctcctgttcacttagttatactttattattgctcacaggctggggaggcagaatgactctgtcaccactaggagccattagggcttcttccctggaggactgcctgcttgctttctggggacactagccctcatttcccttctgtggtacagtggggcaaattatttgtattaagcaaacatttatgggaaacaacccgctcccgaaaacggagcccccaagtaaagcacaaccctgaaagattatgaactatgaattgtctctggtagagataaatttctgcaaacatatctcagtcttccctctgtttctctggtgattaagaagttcctttttggtaaggaaaaggatttttaaccatagagttaggcatcatggaaattcaaaccagatttcttaatacctggtcttcctcaaagagaaataataacagtaatagtggtgctgggaacaatatggcagattattgaatgaaattgattaacttgaataaaatgctgtgaattttctct

SEQ ID NO: 21805 - DNA, 366 bp, Homo sapiens
  misc_feature 1..366: note = ENST00000372277
  source 1..366: mol_type = unassigned DNA
cgcgctcgcgctcgacggtgtcctgaagcgcgctcccggggaggtgttgcagccatggctacggcagccggcgcgacctactttcagcgaggcagtctgttctggttcacagtcatcaccctcagctttggctactacacatgggttgtcttctggcctcagagtatcccttatcagaaccttgggcccctgggccccttcactcagtacttggtggaccaccatcacaccctcctgtgcaatgggtattggcttgcctggctgattcatgtgggagagtccttgtatgccatagtattgtgcaagcaaaatgagctaagaatacggataaagatgagaaaactgattctgagagattctgagtga

SEQ ID NO: 21806 - DNA, 3394 bp, Homo sapiens
  misc_feature 1..3394: note = ENST00000309720
  source 1..3394: mol_type = unassigned DNA
agtgtctctcagctctcggaaggaccgagagaggcaaccgcggagtaggatgctctgcggggcgcccagagccgggggcgcttgaagcagcttcggggactggggcaaccgggcagttttcaccatgcatcagtccctgactcagcagcggtccagcgacatgtccctgcccgattccatgggagcattcaatcggaggaaacgaaactccatctatgtcaccgtgactttgcttattgtgtccgtgttaattctcacagtgggccttgctgcaaccaccaggacccagaatgtgactgtaggaggttattaccccggagttattctcggctttggatcgttccttggaatcattggatcaaaccttattgagaacaaaaggcagatgctggtggcttctatcgtgtttatcagctttggtgtgattgcggctttttgttgtgccatagttgacggggtctttgctgccagacacattgatctgaaaccactctacgctaaccggtgccattatgttcccaagacatcacagaaggaagctgaggaggtcataagttcctcaaccaaaaattctccttccacgagggttatgaggaaccttacccaggcagctagagaggttaactgccctcacctcagccgtgaattctgcacacctcgcatccggggcaacacctgcttctgctgtgacctctacaactgtggcaaccgggtggagatcactggtgggtactacgaatacatcgatgtcagcagttgccaagatatcatccacctctaccacctgctctggtctgccaccatcctcaacattgttggcctgttcctgggcatcatcactgccgctgtccttggaggctttaaggacatgaacccaactctcccagcactgaactgttctgttgaaaatacccatccaacagtttcttactatgctcatccccaagtggcatcctacaatacctactaccatagccctcctcacctgccaccatattctgcttatgactttcagcattccggtgtctttccatcctcccctccctctggactttctgatgagccccagtctgcctctccctcacccagctacatgtggtcctcaagtgcaccgccccgttactctccaccctactatccaccttttgaaaagccaccaccttacagtccctaaagaggaatgcctgctggctattgagattattgtggcttttgtatttctgcttcagtggaagtgtgtagggtacaaaatttaaagtgtgactcttatgcataaagttttacaatggcctgccaggctagggaaagatagggacgaagcttattcattattagtgcagagcaggggtggtcaggctgaacgcagcacagaagggcagctcacattctctaagcaagactggggagccagcccagcaagaagcttgtttggacttgcattaccctatgctccacctctgtattcagcagaagtgtggttgccatctttttcactttatgtaaaggagtgttgccctcgggcccttggcagattgccaccccagcacctaggttgaagcacctggtttataggccctatctttccctacccctaaagtcagtccctaaggacaatttcccagctgatggggctacacagtagttccaatacagagagttctggctaagattttgtttgcttgtgtctggatgttgaaaaagactgcccgtatctcttactccttccttctctgtgagtattgtaaaaatggctgttgtgatcactcagctcagcttttgttattggtacctcctaaagggaaaagtgcaatattcttgcatcttcagtagtggggaacaggatgtattgttccggaaacactgaaatacacagcaacatgtgagatgttttaagtagatcacttaggagacagtggttctactacatgttgcattattacaaaatacatttgctacaggagatataaatcttatggttgtaattcagagtttaaaaatgttataaattaggttcttgggtcgtgatatgaattgttactaatctttgtgactatttaatcttcaaatattgtgcttaaccccagcaatccgcacgtatcctgcaccccaccccaaaagagtcatctgtattttaatgccactggtcttatcggtccttttgtctgttgagaccagtcatgacagcattcaagattatgaaagtgttacaatgccgcttcaagtctgcaaaacctcaaacgtagccaacttgacaaatatttaagtgttacggcagatttaaaatccatctggcacaccgtggtaggtatttgtacagttcttttaattacacatagctttaaaccatcaacctgatgagtttaaagcttttgcacccatgccttcacttcagaatgaacaccttcattgtgatcttatgttaacctgagaattgatttaaaggaagattgataatcctatactttataacgtaaaaatacaggggctacaggagggtacctaattagacagttctccaaacacagaacacacactggaaaattttccggccaattttgctacctcccaacttgatggattagaggtagcgcaaatgctggtgctcccatctaccttgtagacacttagccatcaagaatcaaggcacaagaagtgcactctctcattaacagtaaatgtttgcaagatattcagtttaactttcagcatcatgaatgttcttatccagattttgaatccgaaaaactataatccttttatgttatacaaaattactatgattttttacagttctgagcatattaaaattctactggatttcaaaaagagactaatacccaactgactaactaaacaaatatcaacttgtaatactcaatgaatttttttgccatttacatttgaccgttggctttagtgaatgtccatatttaattttttaaggcaccattacacagtttatcctacatttatcacatttcttaaagtgttaagattctatggctcatttctatgtatttttcttactttacaaaataacctgaaacagtatagattttgtaacacttaatttgagcagcttttttattacattgaattatacaaagtgcatgttaccttagaaaaattaatatttgctgctttactcttttgcaaaacatttgctgtaatgaatggatttgtatttccaatatgtatcttgactgcattttgtaatatttactgctttattcctaattctgctttaaagtactgaactgggcatgaaacattaaaatattaatccagaaactgtataaactggatgttgcttaaaatctgtatcactgccatgttgaaaactcagactgcttttgtgatgtttcaaatgaataaaactatcctcccctcgtta

SEQ ID NO: 21807 - DNA, 3425 bp, Homo sapiens
  misc_feature 1..3425: note = ENST00000371369
  source 1..3425: mol_type = unassigned DNA
aatgctgctgcctcccagagcagagggaggcagaagaggagggagggagaagagtggaagggagggggaggcggcacttgggctgcagctcgcaaccagaggcagtgtctctcagctctcggaaggaccgagagaggcaaccgcggagtaggatgctctgcggggcgcccagagccgggggcgcttgaagcagcttcggggactggggcaaccgggcagttttcaccatgcatcagtccctgactcagcagcggtccagcgacatgtccctgcccgattccatgggagcattcaatcggaggaaacgaaactccatctatgtcaccgtgactttgcttattgtgtccgtgttaattctcacagtgggccttgctgcaaccaccaggacccagaatgtgactgtaggaggttattaccccggagttattctcggctttggatcgttccttggaatcattggatcaaaccttattgagaacaaaaggcagatgctggtggcttctatcgtgtttatcagctttggtgtgattgcggctttttgttgtgccatagttgacggggtctttgctgccagacacattgatctgaaaccactctacgctaaccggtgccattatgttcccaagacatcacagaaggaagctgaggaggttaactgccctcacctcagccgtgaattctgcacacctcgcatccggggcaacacctgcttctgctgtgacctctacaactgtggcaaccgggtggagatcactggtgggtactacgaatacatcgatgtcagcagttgccaagatatcatccacctctaccacctgctctggtctgccaccatcctcaacattgttggcctgttcctgggcatcatcactgccgctgtccttggaggctttaaggacatgaacccaactctcccagcactgaactgttctgttgaaaatacccatccaacagtttcttactatgctcatccccaagtggcatcctacaatacctactaccatagccctcctcacctgccaccatattctgcttatgactttcagcattccggtgtctttccatcctcccctccctctggactttctgatgagccccagtctgcctctccctcacccagctacatgtggtcctcaagtgcaccgccccgttactctccaccctactatccaccttttgaaaagccaccaccttacagtccctaaagaggaatgcctgctggctattgagattattgtggcttttgtatttctgcttcagtggaagtgtgtagggtacaaaatttaaagtgtgactcttatgcataaagttttacaatggcctgccaggctagggaaagatagggacgaagcttattcattattagtgcagagcaggggtggtcaggctgaacgcagcacagaagggcagctcacattctctaagcaagactggggagccagcccagcaagaagcttgtttggacttgcattaccctatgctccacctctgtattcagcagaagtgtggttgccatctttttcactttatgtaaaggagtgttgccctcgggcccttggcagattgccaccccagcacctaggttgaagcacctggtttataggccctatctttccctacccctaaagtcagtccctaaggacaatttcccagctgatggggctacacagtagttccaatacagagagttctggctaagattttgtttgcttgtgtctggatgttgaaaaagactgcccgtatctcttactccttccttctctgtgagtattgtaaaaatggctgttgtgatcactcagctcagcttttgttattggtacctcctaaagggaaaagtgcaatattcttgcatcttcagtagtggggaacaggatgtattgttccggaaacactgaaatacacagcaacatgtgagatgttttaagtagatcacttaggagacagtggttctactacatgttgcattattacaaaatacatttgctacaggagatataaatcttatggttgtaattcagagtttaaaaatgttataaattaggttcttgggtcgtgatatgaattgttactaatctttgtgactatttaatcttcaaatattgtgcttaaccccagcaatccgcacgtatcctgcaccccaccccaaaagagtcatctgtattttaatgccactggtcttatcggtccttttgtctgttgagaccagtcatgacagcattcaagattatgaaagtgttacaatgccgcttcaagtctgcaaaacctcaaacgtagccaacttgacaaatatttaagtgttacggcagatttaaaatccatctggcacaccgtggtaggtatttgtacagttcttttaattacacatagctttaaaccatcaacctgatgagtttaaagcttttgcacccatgccttcacttcagaatgaacaccttcattgtgatcttatgttaacctgagaattgatttaaaggaagattgataatcctatactttataacgtaaaaatacaggggctacaggagggtacctaattagacagttctccaaacacagaacacacactggaaaattttccggccaattttgctacctcccaacttgatggattagaggtagcgcaaatgctggtgctcccatctaccttgtagacacttagccatcaagaatcaaggcacaagaagtgcactctctcattaacagtaaatgtttgcaagatattcagtttaactttcagcatcatgaatgttcttatccagattttgaatccgaaaaactataatccttttatgttatacaaaattactatgattttttacagttctgagcatattaaaattctactggatttcaaaaagagactaatacccaactgactaactaaacaaatatcaacttgtaatactcaatgaatttttttgccatttacatttgaccgttggctttagtgaatgtccatatttaattttttaaggcaccattacacagtttatcctacatttatcacatttcttaaagtgttaagattctatggctcatttctatgtatttttcttactttacaaaataacctgaaacagtatagattttgtaacacttaatttgagcagcttttttattacattgaattatacaaagtgcatgttaccttagaaaaattaatatttgctgctttactcttttgcaaaacatttgctgtaatgaatggatttgtatttccaatatgtatcttgactgcattttgtaatatttactgctttattcctaattctgctttaaagtactgaactgggcatgaaacattaaaatattaatccagaaactgtataaactggatgttgcttaaaatctgtatcactgccatgttgaaaactcagactgcttttgtgatgtttcaaatgaataaaactatcctcccctcgtta

SEQ ID NO: 21808 - DNA, 2879 bp, Homo sapiens
  misc_feature 1..2879: note = ENST00000371352
  source 1..2879: mol_type = unassigned DNA
catttgctatgaatattctctataacaaagcaagacaaatttagcagcacttcattgcatctggatgggggagagagctggacaatttcttgctaacaagagatggttaactgccctcacctcagccgtgaattctgcacacctcgcatccggggcaacacctgcttctgctgtgacctctacaactgtggcaaccgggtggagatcactggtgggtactacgaatacatcgatgtcagcagttgccaagatatcatccacctctaccacctgctctggtctgccaccatcctcaacattgttggcctgttcctgggcatcatcactgccgctgtccttggaggctttaaggacatgaacccaactctcccagcactgaactgttctgttgaaaatacccatccaacagtttcttactatgctcatccccaagtggcatcctacaatacctactaccatagccctcctcacctgccaccatattctgcttatgactttcagcattccggtgtctttccatcctcccctccctctggactttctgatgagccccagtctgcctctccctcacccagctacatgtggtcctcaagtgcaccgccccgttactctccaccctactatccaccttttgaaaagccaccaccttacagtccctaaagaggaatgcctgctggctattgagattattgtggcttttgtatttctgcttcagtggaagtgtgtagggtacaaaatttaaagtgtgactcttatgcataaagttttacaatggcctgccaggctagggaaagatagggacgaagcttattcattattagtgcagagcaggggtggtcaggctgaacgcagcacagaagggcagctcacattctctaagcaagactggggagccagcccagcaagaagcttgtttggacttgcattaccctatgctccacctctgtattcagcagaagtgtggttgccatctttttcactttatgtaaaggagtgttgccctcgggcccttggcagattgccaccccagcacctaggttgaagcacctggtttataggccctatctttccctacccctaaagtcagtccctaaggacaatttcccagctgatggggctacacagtagttccaatacagagagttctggctaagattttgtttgcttgtgtctggatgttgaaaaagactgcccgtatctcttactccttccttctctgtgagtattgtaaaaatggctgttgtgatcactcagctcagcttttgttattggtacctcctaaagggaaaagtgcaatattcttgcatcttcagtagtggggaacaggatgtattgttccggaaacactgaaatacacagcaacatgtgagatgttttaagtagatcacttaggagacagtggttctactacatgttgcattattacaaaatacatttgctacaggagatataaatcttatggttgtaattcagagtttaaaaatgttataaattaggttcttgggtcgtgatatgaattgttactaatctttgtgactatttaatcttcaaatattgtgcttaaccccagcaatccgcacgtatcctgcaccccaccccaaaagagtcatctgtattttaatgccactggtcttatcggtccttttgtctgttgagaccagtcatgacagcattcaagattatgaaagtgttacaatgccgcttcaagtctgcaaaacctcaaacgtagccaacttgacaaatatttaagtgttacggcagatttaaaatccatctggcacaccgtggtaggtatttgtacagttcttttaattacacatagctttaaaccatcaacctgatgagtttaaagcttttgcacccatgccttcacttcagaatgaacaccttcattgtgatcttatgttaacctgagaattgatttaaaggaagattgataatcctatactttataacgtaaaaatacaggggctacaggagggtacctaattagacagttctccaaacacagaacacacactggaaaattttccggccaattttgctacctcccaacttgatggattagaggtagcgcaaatgctggtgctcccatctaccttgtagacacttagccatcaagaatcaaggcacaagaagtgcactctctcattaacagtaaatgtttgcaagatattcagtttaactttcagcatcatgaatgttcttatccagattttgaatccgaaaaactataatccttttatgttatacaaaattactatgattttttacagttctgagcatattaaaattctactggatttcaaaaagagactaatacccaactgactaactaaacaaatatcaacttgtaatactcaatgaatttttttgccatttacatttgaccgttggctttagtgaatgtccatatttaattttttaaggcaccattacacagtttatcctacatttatcacatttcttaaagtgttaagattctatggctcatttctatgtatttttcttactttacaaaataacctgaaacagtatagattttgtaacacttaatttgagcagcttttttattacattgaattatacaaagtgcatgttaccttagaaaaattaatatttgctgctttactcttttgcaaaacatttgctgtaatgaatggatttgtatttccaatatgtatcttgactgcattttgtaatatttactgctttattcctaattctgctttaaagtactgaactgggcatgaaacattaaaatattaatccagaaactgtataaactggatgttgcttaaaatctgtatcactgccatgttgaaaactcagactgcttttgtgatgtttcaaatgaataaaactatcctcccctcgtt

SEQ ID NO: 21809 - DNA, 695 bp, Homo sapiens
  misc_feature 1..695: note = ENST00000519908
  source 1..695: mol_type = unassigned DNA
acgcggctgcacggaccgccaatgctgctgcctcccagagcagagggaggcagaagaggagggagggagaagagtggaagggagggggaggcggcacttgggctgcagctcgcaaccagaggcagtgtctctcagctctcggaaggaccgagagaggcaaccgcggagtaggatgctctgcggggcgcccagagccgggggcgcttgaagcagcttcggggactggggcaaccgggcagttttcaccatgcatcagtccctgactcagcagcggtccagcgacatgtccctgcccgattccatgggagcattcaatcggaggaaacgaaactccatctatgtcaccgtgactttgcttattgtgtccgtgttaattctcacagtgggccttgctgcaaccaccaggacccagaatgtgactgtaggaggttattaccccggagttattctcggctttggatcgttccttggaatcattggatcaaaccttattgagaacaaaaggcagatgctggtggcttctatcgtgtttatcagctttggtgtgattgcggctttttgttgtgccatagttgacggggtctttgctgccagacacattgatctgaaaccactctacgctaaccggtgccattatgttcccaagacatcacagaaggaagctgaggagaacccaactctcccagcactgaact

SEQ ID NO: 21810 - DNA, 387 bp, Homo sapiens
  misc_feature 1..387: note = ENST00000480821
  source 1..387: mol_type = unassigned DNA
aggcaaccgcggagtaggatgctctgcggggcgcccagagccgggggcgcttgaagcagcttcggggactggggcaaccgggcagttttcaccatgcatcagtccctgactcagcagcggtccagcgacatgtccctgcccgattccatggttcctgccatcagtctgctcaggtcttctccgatgaatttgcgggaacatctcgagtggagggggcagggagaagatcgaaccccctatataatctccctactgcccgcagaagactcagtgtcaacaaaactcgttcaccggaggggccccagaaagtgttatctcctggatggtggaaagatccgtatcctcaatggttttgcatattcagtataagaatttgctttttcattt

SEQ ID NO: 21811 - DNA, 3172 bp, Homo sapiens
  misc_feature 1..3172: note = ENST00000440464
  source 1..3172: mol_type = unassigned DNA
aatgctgctgcctcccagagcagagggaggcagaagaggagggagggagaagagtggaagggagggggaggcggcacttgggctgcagctcgcaaccagaggcagtgtctctcagctctcggaaggaccgagagaggcaaccgcggagtaggatgctctgcggggcgcccagagccgggggcgcttgaagcagcttcggggactggggcaaccgggcagttttcaccatgcatcagtccctgactcagcagcggtccagcgacatgtccctgcccgattccatgggagcattcaatcggaggaaacgaaactccatctatgtcaccgtgactttgcttattgtgtccgtgttaattctcacagtgggccttgctgcaaccaccaggacccagaatgtgactgtaggaggttattaccccggagttattctcggctttggatcgttccttggaatcattggatcaaaccttattgagaacaaaaggcagatgctggtggcttctatcgtgtttatcagctttggtgtgattgcggctttttgttgtgccatagttgacggggtctttgctgccagacacattgatctgaaaccactctacgctaaccggtgccattatgttcccaagacatcacagaaggaagctgaggagaacccaactctcccagcactgaactgttctgttgaaaatacccatccaacagtttcttactatgctcatccccaagtggcatcctacaatacctactaccatagccctcctcacctgccaccatattctgcttatgactttcagcattccggtgtctttccatcctcccctccctctggactttctgatgagccccagtctgcctctccctcacccagctacatgtggtcctcaagtgcaccgccccgttactctccaccctactatccaccttttgaaaagccaccaccttacagtccctaaagaggaatgcctgctggctattgagattattgtggcttttgtatttctgcttcagtggaagtgtgtagggtacaaaatttaaagtgtgactcttatgcataaagttttacaatggcctgccaggctagggaaagatagggacgaagcttattcattattagtgcagagcaggggtggtcaggctgaacgcagcacagaagggcagctcacattctctaagcaagactggggagccagcccagcaagaagcttgtttggacttgcattaccctatgctccacctctgtattcagcagaagtgtggttgccatctttttcactttatgtaaaggagtgttgccctcgggcccttggcagattgccaccccagcacctaggttgaagcacctggtttataggccctatctttccctacccctaaagtcagtccctaaggacaatttcccagctgatggggctacacagtagttccaatacagagagttctggctaagattttgtttgcttgtgtctggatgttgaaaaagactgcccgtatctcttactccttccttctctgtgagtattgtaaaaatggctgttgtgatcactcagctcagcttttgttattggtacctcctaaagggaaaagtgcaatattcttgcatcttcagtagtggggaacaggatgtattgttccggaaacactgaaatacacagcaacatgtgagatgttttaagtagatcacttaggagacagtggttctactacatgttgcattattacaaaatacatttgctacaggagatataaatcttatggttgtaattcagagtttaaaaatgttataaattaggttcttgggtcgtgatatgaattgttactaatctttgtgactatttaatcttcaaatattgtgcttaaccccagcaatccgcacgtatcctgcaccccaccccaaaagagtcatctgtattttaatgccactggtcttatcggtccttttgtctgttgagaccagtcatgacagcattcaagattatgaaagtgttacaatgccgcttcaagtctgcaaaacctcaaacgtagccaacttgacaaatatttaagtgttacggcagatttaaaatccatctggcacaccgtggtaggtatttgtacagttcttttaattacacatagctttaaaccatcaacctgatgagtttaaagcttttgcacccatgccttcacttcagaatgaacaccttcattgtgatcttatgttaacctgagaattgatttaaaggaagattgataatcctatactttataacgtaaaaatacaggggctacaggagggtacctaattagacagttctccaaacacagaacacacactggaaaattttccggccaattttgctacctcccaacttgatggattagaggtagcgcaaatgctggtgctcccatctaccttgtagacacttagccatcaagaatcaaggcacaagaagtgcactctctcattaacagtaaatgtttgcaagatattcagtttaactttcagcatcatgaatgttcttatccagattttgaatccgaaaaactataatccttttatgttatacaaaattactatgattttttacagttctgagcatattaaaattctactggatttcaaaaagagactaatacccaactgactaactaaacaaatatcaacttgtaatactcaatgaatttttttgccatttacatttgaccgttggctttagtgaatgtccatatttaattttttaaggcaccattacacagtttatcctacatttatcacatttcttaaagtgttaagattctatggctcatttctatgtatttttcttactttacaaaataacctgaaacagtatagattttgtaacacttaatttgagcagcttttttattacattgaattatacaaagtgcatgttaccttagaaaaattaatatttgctgctttactcttttgcaaaacatttgctgtaatgaatggatttgtatttccaatatgtatcttgactgcattttgtaatatttactgctttattcctaattctgctttaaagtactgaactgggcatgaaacattaaaatattaatccagaaactgtataaactggatgttgcttaaaatctgtatcactgccatgttgaaaactcagactgcttttgtgatgtttcaaatgaataaaactatcctcccctcgtt

SEQ ID NO: 21812 - DNA, 76 bp, Homo sapiens
  misc_feature 1..76: note = ENST00000631591
  source 1..76: mol_type = unassigned DNA
ggccccgggagagccgggtggggcctcgggatgcagccgccggtgcccgggcccctgggcctgctggaccccgcag

SEQ ID NO: 21813 - DNA, 73 bp, Homo sapiens
  misc_feature 1..73: note = ENST00000633279
  source 1..73: mol_type = unassigned DNA
cccgggagagccgggtggggcctcgggatgcagccgccggtgcccgggcccctgggcctgctggaccccgcag

SEQ ID NO: 21814 - DNA, 694 bp, Homo sapiens
  misc_feature 1..694: note = ENST00000488362
  source 1..694: mol_type = unassigned DNA
ggccccgggagagccgggtggggcctcgggatgcagccgccggtgcccgggcccctgggcctgctggaccccgcagaagggctttcgaggaggaagaagacgtcgctctggtttgtggggtctctgctgctggtgtccgtcctcatagtcaccgtcgggctggctgccaccaccaggacggagaatgtgaccgttgggggctactacccagggatcattctcggctttggatctttcttaggaattattggcatcaacttggtggagaatagaaggcaaatgctggtggcagcgatcgtgtttatcagttttggcgtggtggccgccttctgctgcgccatcgtggacggcgtatttgcagcacagcacattgaaccgaggcccctcaccacgggaagatgccagttttactccagtggggtggggtacttgtacgatgtctaccagacagaggtgagcaggagcactgagattcatgtgggttttgctcagctaaccccgccgaccccacgcggttttccctgcacataggcgtggtctgaatattttgattctaatagttcctgggggtcacccctgcagctggtgaaccgttgatgccccctgtgtttgggaccttgacatttcgatgtgctgtatttcactctggagtcagagttctggacttgcttcattaaatcacaacagtctcaga

SEQ ID NO: 21815 - DNA, 6100 bp, Homo sapiens
  misc_feature 1..6100: note = ENST00000375353
  source 1..6100: mol_type = unassigned DNA
cccgggagagccgggtggggcctcgggatgcagccgccggtgcccgggcccctgggcctgctggaccccgcagaagggctttcgaggaggaagaagacgtcgctctggtttgtggggtctctgctgctggtgtccgtcctcatagtcaccgtcgggctggctgccaccaccaggacggagaatgtgaccgttgggggctactacccagggatcattctcggctttggatctttcttaggaattattggcatcaacttggtggagaatagaaggcaaatgctggtggcagcgatcgtgtttatcagttttggcgtggtggccgccttctgctgcgccatcgtggacggcgtatttgcagcacagcacattgaaccgaggcccctcaccacgggaagatgccagttttactccagtggggtggggtacttgtacgatgtctaccagacagaggtcacctgtcactccctggacggcaagtgccagctgaaggtgagaagcaacacctgttactgctgtgacctctatgcctgcgggagcgcagagccctcgcccgcctactatgagttcatcggcgtcagcggctgccaggacgtgctgcacctgtaccgcctgctctgggcctctgcagttctgaacgtcctgggcctgttcctgggcatcatcaccgccgccgtcctgggggccttcaaggacatggtgcctctgtcccagctggcctatggcccagccgtcccaccacagaccctctacaaccccgcccagcagatcctggcctacgcaggcttccgcctgacgcccgagcccgtcccgacctgctcgtcctaccctctgccccttcagccctgcagccgcttcccagttgcgccctcctctgccctggcttcgtctgaggacctgcagcccccttctccaagcagctctggctctgggcttcccggccaggctccaccgtgctacgcacccacctactttcccccgggggagaagccacccccctacgcaccctgatagaggcgtggagtaaaagataacttgtttgtttttttttttaaaaaaaaggcagcctctagaaatcccgcttctgtggccaacctcctagagaacccgggagaatgttccagaagtctgtcccctcctttcctccctgggcacactggtgagggaggctggaaccaggcagggagtggggccctccagacccaggctggtgacaccttggcttgggctctgctcacatcaaatggcgctgaaagttcccacccggcctcctcctctgagagcaattgttctggtgttttcacatcccttaattaattagctattattatgattttgcaaagacagtgcagccccggcctccctgcctgtgtgttcttgtttgtggacatgtgttgtgcgttacacgttcgtgtgtgcatctgtgtcctggagaagcgcagggcagaagccacccgcccctcgtgctgtgctcctgacgtatgccaggaagggaaggacgcttcggctccaacgcccagcgctgtgtctaaccgcctgtgagttgttagaatccaggggcccggttgtctttcccagccccggatgcaaatctgcctgggccactggcacgagggtcttcccctgagctgtctcccagctacggcgcctgggcttccgctgtccttccgcggcttctccctcaccgcaccttgtctcaggacccctggccgctgggatggtgggggacggtgtttcggggtcctttggctcagggtctggggccgcagcactccctgtggaaaccagcttagctccccgcgggcccagcatgcacctgccgggcacacctggggagacgggtgagcacgcctgggaagcagcaggtcccgggtgggtcacaggccccgggtgggtcacaggacaggtctcaggtgggtcacaggtcctgagtgggtcacaggtcccgggtgggtcacaggcatcccgggtgggtcacaggtcccgagtgggtcacaggccccgggtgagtcacaggccccgggtgagtcacgggtcccgggtgggtcacgggtcccgggtgggtcacgggccccgggtgggtcacgggtcccgggtgggtcacgggtcccgagtgggtcacgggtcccgggtgggtcacaggcgccccagtgacaggagttcaggatgcgccaccccaaagtagccgaagtctcttgaaaagtgttggatgtggggagaggctttctctgaactcctgaagtcagatcctcagggaaccagggactcccagggcgggagggcgggcgagaggtgatcccattgctccccagacgtgccacaagacaccaagtcgccgtctctgctctgtgggccgctcacggttccccagtcactccctctcccctcggaagctggcgcctccaggcctcaccgctctcagggcctcacgtccctccctgcaaagccccccgtgcctacgataaacaagtaccgctcttctcccgtgtgggtctgaggtctccagcttacttcacggaacagtgcccacctgggaggtggagcggggactttctcccctgcccagtcctggatctgggagaaaaaagataaggtggaggggagccacactcgtgcagacacagcctcctgccccctctgctgcccgggagcctccctctgtccgatggagggtctcacacagcctctgccccctccgctgcccgggagcctccctctgcccgacggagggtctcatcctgtgtccagcgctcctgggcagaaggcccacagcgcacatccacacatgaacggtggctggctgggcccaggggccctaacgggcctctgaaaggcctgcagccagctctggtctgtgaacccgccactgcttgtcatttttatcttataaaatccagcctcacaagcttgctgtccaggagaatgtggtcttggcctctcagggctgactggccttgaaccagtccgggaggtcgggcacgagccggaggtgcggcgtcctgtctggaaatcaccgcccagttcctccagggctgtgggtgcctggctccgagtaagaagctgaacaagcagcagagaccaagaggtttctggagcgccgggagatgcactcacgagcgcctgtgggggaagaaaagtgtgccacggatttcccgagtccccagggctctcactttacctcagggaaggctctatgggcgccgatggtgccgtggtcttgtgtgggcggttcctgggcaccctggagctcgggctgtgcccccgaagctgcctggtgcaggcaccagcacctcttggtgtcctaggggtgcgaacagcagagaagctgaactgcaggtctgggcagggagtctatgccccctggagctctggccagcaaagtcacaggaataaccctccttcccctcatgtcagccctcggtcgcagggtgcggtgtgggggcatcagagtgcttccccgaggctgcactcaccagcttcccccaaacacaacatcgatctttcccgacttttaatcttgtctagagtcaaaagctgttcaaaaatattcaactccaaggtcaacagttttgttcttgccacaaaaatgtccttatcctttatcccagccacaaagaatgtgaacaatttgactcaaggttcgtggtggctggagggtcccccaggtcccagggcagctcccacctggcgcagggctccggccaatgcctggcctgcagtgtgggcggcggctgctctcgaggtgcacctgtctcatgtggacggatcctgtctggggccaccaagctctgccagcctgagtcacggtctgatgaaccccctctctgggctccgctggggccttctgatcccagcctcctctgcagggatgggctcccaatcccgccctcacttggttcccatgcacagccgaggtcagtgagaccctggaggccgcgggagatggggtggaggggatggtggggcagggggtgctggggggtttgggggtgctgtggccccggggcagggggtgctggggggtttggggtgctgtggccccacctgcactccctgcctcactgggacagcacaggagacaggcttctcctgcagctcagaggtgggggcctagtgtagctgcaggttgtgactgaggagggcagggtcagagcattgccctgggcaggggtccgttgagactggccccaccttattagcttgggaccttgggttacagggagtctcctcctgcctcagtttctacatttcacacagcagcactgctcacaagagctcccaagcagaggcaactactgagtgggggagggacacagtccgtccacatggggccaacggccacaaagagaggaagggacatgggtgacggtccgtccacgtggggtcaccggccacggagagaggaagggacatgggtgacggtccgtccacgtggggtcaccggccacggagagaggaagggacatgggtgacggtccgtccacatggggtcaccggccacggagagaggaagggacatgggtgatatggttttgctgtgtccccacccaaatctcaacttgaattgtatttcccagaattcctgcgcgttgtgggagggacccagcgggaggtaattgaatcatggtggctggtctttcccgtgctattctcgtgatagtgagtaagtctcacgagatctgactggttgatcaggatttccgcttttgcttcttcctcattttctcttgctcctgccgtgtaagaagtgccttttgcctcccaccgtgattctgaggcctccccaaccatgtgcaattgtaagtcccgttaaacctctttttttcccagtctcgggtatgtccttattagcagtgtgaaaacagaatactacagtggtccatccacacgcgggtctcacccagccacagagagggagaggacgtggcccatccacacgcgggtcacccggccacggagaggaaggaagctctaacgggtgctgaggctgtaacacacagtgctcagggaaggacaccagacatgaagactgtgttctgtttatatgcagtgtccagagaaggcgtgtccacagacagaagccgactgggaaaggaggtgcagtcactgctcagggacacgggttcttttcggggaggcaagcgtgttcgcagcgtgttctgtatggggagagatgcagtcactgctcagggacacgggttcttttcggggaggcaagcgtgtttgcagcgtgttctggatggggagaggtgcagttactggtcagggacacgagttcttttcggggaggcaagcgtgtttgcagcgtgttctggatggggagaggtgcagtcactggtcagggatacgagttcttttcggggaggcaagtgtgttctaagcgtgttctggatggggagaggtgcagtcactggtcagggacacgagttcttgtgggaagaggagtgtccgggagccagatggcagtgatgggtggacggccccgtggatggactgaccaccgacccatgctctgcactcatgaggcgtggctattgctgtgtgaatcacatctccatggaaacgggagtgggagaaacgggccccaaggatgttgtgaagatggccttatggggctgcactggtgacttggacagtgctggccaccggccctgctcagtgaacaagagccatggtcatcaccctcgccacacagagcagctcctcctgcagacttggggaccccgtggccaccagaccccgcggtgggagcagagatgcctccgaaactctggagacccacagaggcagaagaggattccacgaggccggggcccgtcagcagatcctcagacggcgacacgcgccacttccttttctgtttcctagaccttttaactgatggaattcagtaagcagaaaacgtgcttgaaacaagggcaccatggagcggaccctccccctctcccctcgtggagtccttgaccctggggcaggtgacccttcttgctttgcaggcaggggctgtggctggagcttctcctacaaatgggctgtgctgggattagcccggctgtacatttgctttatgcttccgttggcatttaaaaatctgatgttcata

SEQ ID NO: 21816 - DNA, 380 bp, Homo sapiens
  misc_feature 1..380: note = ENST00000483678
  source 1..380: mol_type = unassigned DNA
gctgctggtgtccgtcctcatagtcaccgtcgggctggctgccaccaccaggacggagaatgtgaccgttgggggctactacccagggatcattctcggctttggatctttcttaggaattattggcatcaacttggtggagaatagaaggcaaatgactaagaggagaggtaaagacataaaaccaggagggagcccccggttcacatggcagcaatgcagagtgaaatccagacactgcctgtccatgatgttcgtggctgtatgcgcggcaacagcgatcaggttcagctggaagtctgttttgttgatgcactgttttggggactataactttaaaaacaaaaactggctaattttgtcagttcacggtggcagcc

SEQ ID NO: 21817 - DNA, 487 bp, Homo sapiens
  misc_feature 1..487: note = ENST00000375348
  source 1..487: mol_type = unassigned DNA
ccaccccttccaacagacactcactgggaagtgcgaccggcccggcgcacctgcgtgggagcaagagccgtcttaggcctcggcacggtcgttggcaggtccatgttggctgctctgagccagattttcgagaagacaggacaggtgatgttgcagagatgcctgcccaacgccagcagacgcacctgctgctcagtggttgaggttcttgagctcggctttggatctttcttaggaattattggcatcaacttggtggagaatagaaggcaaatgctggtggcagcgatcgtgtttatcagttttggcgtggtggccgccttctgctgcgccatcgtggacggcgtatttgcagcacagcacattgaaccgaggcccctcaccacgggaagatgccagttttactccagtggggtggggtacttgtacgatgtctaccagacagaggtgagtgagatgcggggagtaatgacccgcgggcggccgc

SEQ ID NO: 21818 - DNA, 389 bp, Homo sapiens
  misc_feature 1..389: note = ENST00000498692
  source 1..389: mol_type = unassigned DNA
ctctgtgacggcgctctctgtgtgtctcgcacctgccctgtgtggattcctggctttaactaaacgcagcctctcatcctcagcacgcgtgtcagaggaggaggagctggaggccctctcagtggccagcacctgccagcttgtctgggactctccagcagctgccgggaggcatcgtgtgtgtgtcacctgtcactccctggacggcaagtgccagctgaagcgcagagccctcgcccgcctactatgagttcatcggcgtcagcggctgccaggacgtgctgcacctgtaccgcctgctctgggcctctgcagttctgaacgtcctgggcctgttcctgggcatcatcaccgccgccgtcctgggggccttcaaggacatggtgcct

SEQ ID NO: 21819 - DNA, 645 bp, Homo sapiens
  misc_feature 1..645: note = ENST00000467169
  source 1..645: mol_type = unassigned DNA
gcagccggattgtagacaggacacagaaacgcttgtctggtgcaggcgccatgctcgccacacaggcccggggtgtccagggttttccggaaggggctcgtgtgttcattaaagcccgtgataaaatgctggagtgcaggatcaggaacaggtgatacctccagggccagcccgcaatgcagagccacaccggctccaggaagtcttcctcgaacccaaagctcagggctgcagagcaaggagaggacttgctaaccttcacacccaccaagcaggccctcttgtgcctctgtcccagctggcctatggcccagccgtcccaccacagaccctctacaaccccgcccagcagatcctggcctacgcaggcttccgcctgacgcccgagcccgtcccgacctgctcgtcctaccctctgccccttcagccctgcagccgcttcccagttgcgccctcctctgccctggcttcgtctgaggacctgcagcccccttctccaagcagctctggctctgggcttcccggccaggctccaccgtgctacgcacccacctactttcccccgggggagaagccacccccctacgcaccctgatagaggcgtggagtaaaagataacttgtttgtttttttttttaaaaaaaa

SEQ ID NO: 21820 - DNA, 2520 bp, Homo sapiens
  misc_feature 1..2520: note = ENST00000388942
  source 1..2520: mol_type = unassigned DNA
cgcgggctcggccaagccgccggcgcgaggcctcgcgcgcgcccccgagcgcggtgggcggaggggcggagggagcggcggggccgcgagggggcgggggggcggagaggggagccccgggagcgcgagccgcggccggcgccgctgcagagccgagcgaatcccgagcccgggcagcagggcactatatttgtatgtgtcttgtagaacccacgcttggaaatgctgacagcaggcttcaggacagctgagccccactaaacaccaagaaaacccatggctgtggctccatctttcaacatgaccaatccacagcctgccatagaaggaggaatttctgaagttgagatcatctcccaacaagtagacgaagaaaccaagagcattgctcctgtgcagctggtgaactttgcctatcgggacttgcccctggctgctgtcgatctctccacggcgggctcgcagctcctgtcaaatctggacgaagattaccaaagagaagggtctaactggctgaagccgtgctgtgggaagagagcagccgtgtggcaggtatttttgctcagtgcaagtctcaacagtttcctggtagcctgtgtaatattggtggtgattctcctgactctggaacttctaatagatataaagcttctccagttttccagcgcattccagtttgctggcgtgattcactggatcagcctggtcattctgtccgtgttcttctcagagactgttctacggattgtggtgcttgggatctgggattacatcgaaaacaaaatagaggtgtttgacggggctgtgatcatcctatctttggctccgatggtggcatccactgtggccaatggacccaggagcccctgggacgccatcagcctcatcatcatgctccggatctggagggtgaagagggtcattgatgcctacgtcctgccagtgaagctggagatggagatggttatccagcagtacgagaaggccaaggtcatccaagacgagcagctggagaggctgacgcagatctgtcaggagcaagggtttgagatccggcagctgcgcgcgcacctggcgcagcaggacctggacctggctgccgagcgcgaagcggcgctccaggccccgcacgtgctcagccagccgcgcagccgcttcaaagtgttggaggccggcacgtgggacgaggagacggcggccgagagcgtcgtggaggagctgcagccctcgcaagaagccacgatgaaggacgacatgaacagctacatcagtcagtattacaatgggcccagcagtgacagcggtgtcccagagccagctgtgtgtatggtcaccacggccgcaatagacattcaccagcccaacatctcctcggacctcttctctctggacatgcccctcaaactcggcggtaatggcaccagcgccacctcggagagtgcctcccgcagctcagtcacccgggcccagagtgacagcagccagacgctgggctcctccatggactgcagcactgcccgcgaggagccgtcctctgagcccggcccttctcccccgccgctgccatcccagcagcaggtggaggaggccacagtccaggacctgctgtcctccctgtcggaggacccctgcccttcccagaaggccttggacccagcccccctcgcccggcccagcccagcgggctcggcccaaaccagccccgagctggaacacagggtaagtctgttcaaccagaagaaccaggagggcttcactgtctttcagatcaggcctgtcatccacttccagcccactgtgcccatgctggaggacaagttcagatctttggaatccaaagagcaaaagctgcacagggtccctgaggcctagagcctgccatgggctgggtgagatgaggggagacagccatctcaaagctctcctgggaccctggaggctgccaagggccacacgcggggcccaggagcccacctggcctccctcagggtgctgcctgcctccagggaggcgacgccaggccaggaggccacaagcttcagacctcaaagcccagagctggcgcctcttctcgccctgctcaggggagggtggtgctcgtggctgggttttctttttaaccatttttacaaaaaccagcctgtggcccagcttcagcagggtagagtgtgggggggccagctcagcctcttgcgttgccttcgttcctgacgcccaccctggactctagggaacagcactgtgagcaggggctgtccagccccacccctaagccgtctttcccaggaatcctgggtggagtccaacacaatcacacggagaccaccatctgagcctatgtcatttgtcctcattctcattccagcatgagcgtttctgagtctcttcaagacgaatctagttttcaccttcacaggatataaagggatcaacctagaggtgggtgggagggtcctagagggcaggggaacaaccattttccaaccttggctttaataataaaaaccagctgcactgaga

SEQ ID NO: 21821 - DNA, 2292 bp, Homo sapiens
  misc_feature 1..2292: note = ENST00000484722
  source 1..2292: mol_type = unassigned DNA
agcgcgagccgcggccggcgccgctgcagagccgagcgaatcccgagcccgggcagcagggcactatatttgtatgtgtcttgtagaacccacgcttggaaatgctgacagcaggcttcaggacagctgagccccactaaacaccaagaaaacccatggctgtggctccatctttcaacatgaccaatccacagcctgccatagaaggaggaatttctgaagttgagatcatctcccaacaagtagacgaagaaaccaagagcattgctcctgtgcagctggtgaactttgcctatcgggacttgcccctggctgctgtcgatctctccacggcgggctcgcagctcctgtcaaatctggacgaagattaccaaagagaagggtctaactggctgaagccgtgctgtgggaagagagcagccgtgtggcagtttccagcgcattccagtttgctggcgtgattcactggatcagcctggtcattctgtccgtgttcttctcagagactgttctacggattgtggtgcttgggatctgggattacatcgaaaacaaaatagaggtgtttgacggggctgtgatcatcctatctttggctccgatggtggcatccactgtggccaatggacccaggagcccctgggacgccatcagcctcatcatcatgctccggatctggagggtgaagagggtcattgatgcctacgtcctgccagtgaagctggagatggagatggttatccagcagtacgagaaggccaaggtcatccaagacgagcagctggagaggctgacgcagatctgtcaggagcaagggtttgagatccggcagctgcgcgcgcacctggcgcagcaggacctggacctggctgccgagcgcgaagcggcgctccaggccccgcacgtgctcagccagccgcgcagccgcttcaaagtgttggaggccggcacgtgggacgaggagacggcggccgagagcgtcgtggaggagctgcagccctcgcaagaagccacgatgaaggacgacatgaacagctacatcagtcagtattacaatgggcccagcagtgacagcggtgtcccagagccagctgtgtgtatggtcaccacggccgcaatagacattcaccagcccaacatctcctcggacctcttctctctggacatgcccctcaaactcggcggtaatggcaccagcgccacctcggagagtgcctcccgcagctcagtcacccgggcccagagtgacagcagccagacgctgggctcctccatggactgcagcactgcccgcgaggagccgtcctctgagcccggcccttctcccccgccgctgccatcccagcagcaggtggaggaggccacagtccaggacctgctgtcctccctgtcggaggacccctgcccttcccagaaggccttggacccagcccccctcgcccggcccagcccagcgggctcggcccaaaccagccccgagctggaacacagggtaagtctgttcaaccagaagaaccaggagggcttcactgtctttcagatcaggcctgtcatccacttccagcccactgtgcccatgctggaggacaagttcagatctttggaatccaaagagcaaaagctgcacagggtccctgaggcctagagcctgccatgggctgggtgagatgaggggagacagccatctcaaagctctcctgggaccctggaggctgccaagggccacacgcggggcccaggagcccacctggcctccctcagggtgctgcctgcctccagggaggcgacgccaggccaggaggccacaagcttcagacctcaaagcccagagctggcgcctcttctcgccctgctcaggggagggtggtgctcgtggctgggttttctttttaaccatttttacaaaaaccagcctgtggcccagcttcagcagggtagagtgtgggggggccagctcagcctcttgcgttgccttcgttcctgacgcccaccctggactctagggaacagcactgtgagcaggggctgtccagccccacccctaagccgtctttcccaggaatcctgggtggagtccaacacaatcacacggagaccaccatctgagcctatgtcatttgtcctcattctcattccagcatgagcgtttctgagtctcttcaagacgaatctagttttcaccttcacaggatataaagggatcaacctagaggtgggtgggagggtcctagagggcaggggaacaaccattttccaaccttggctttaataataaaaaccagctgcactgag

SEQ ID NO: 21822 - DNA, 1932 bp, Homo sapiens
  misc_feature 1..1932: note = ENST00000559079
  source 1..1932: mol_type = unassigned DNA
agagccgagcgaatcccgagcccgggcagcagaggccacatgagctgtggaaagcacattacctgggaccgggtcacctgagaagatctttgtatcagatgttcctgggatcaaaggcacagtggaatgagccccaagttggaaccagaaagacctcagcaggtagcagacctgaagtgcaagtgaaagaagccaatcttagaaggctgcatactgtatgattccacctatttgaccttctgaaaaaggcaaagctacagagacagaaaaaaaggcacaaagatgaccttgcacatctgctgcagatggcacctccacccagctgtccccagcacagcattgacttgtcgagagctgtcctttgagtctgatggattattgagactttttgaatgcaggaagcacactcatggggccatccaagggccttgcattatttttctgcctttgaaaagccactgaactaaatttggcagataaaaatatgcctgagagatttctttcttaatttgctgattatgagccctgaccgtaaggagcttacggtctagagtagatggtatgtgagcataaaccactataacacaaggtaaactatgattcatagtctgggagaggtaccgttgaagtgggcaagagagagaggaaatccagcccctccccactggcctcaagtggaagcagtgacaccagttctgaaagtttggattggagggccaggtaggagtgagactcctacccactcctatgaaatatgttctgggccaggcgcggtggctcacgcctgtaatcccagcactttgggagcccgaggcaggcggatcacgaggtcaagagatcaagaccatcctagccaacatggtgacaccccgtctctactaaagatacaaaaattagccgggtgtggtagcaggcgcctgtagtcccagctacttgggaggctagggcaggagaatcgcttgaacctgggaggcggagattgcagtgagccgagatcacaccactgcactccagcctggtgacagagcgagactccgtctcaaaaataaaaaataaaagaaagaaagaaagatgttccaagcagagagaattccataagcagaggcagagaggtgaataattgtgtgtgcacatgcactaggaacagataggtggctggagcacagtgtagagaaggataaggaatggcttaaaaggctggggccagatggtggaaggctctgaattcctggccaaggaattgagagcatgttcagtaagcagtaggcacctctgcaggtttgagtcagggaataagcagatcacactgcgcttcagaagagtcaccaggtggcagcgtataggatgtgcctgaagcaccgggcacggtggctcacgcctgtaatcccagcactttgggaggctgaggtgagcagatcacaaggtcaggagatcgaaaccatcctagctaacacgatgaagccccatctccactaaaaatacaaaaaatgagccgggcgcggtggcggctgcctgtagtcccagctactcgggaggctgaggcaggagaatggcgtgaacctgggaggcggaacgtgcagtgagctgagatcgtgccactgcactccagcctgggtgacagagcgagactccgactcaaaaaaaaaaagaaaaagaaaaggatgtgcctgaagcaagatgcccagcggtaagaacacccatcaggaggctacttcagggcagttacaaggacccagacagttggaagctgtctcttctgcgtctgcactcccacggccctttatcagtacttctcttaggtacttaccaatttttaccttatctacatttttaattaaaaatagttgtggttcattataaaggaaaattagacagtatagaaaaatataaattgtaatcccaccatccattaaataactactgttgacactc

SEQ ID NO: 21823 - DNA, 1762 bp, Homo sapiens
  misc_feature 1..1762: note = ENST00000561302
  source 1..1762: mol_type = unassigned DNA; mol_type = unassigned DNA
agagccgagcgaatcccgagcccgggcagcagggcactatatttgtatgtgtcttgtagaacccacgcttggaaatgctgacagcaggcttcaggacagctgagccccactaaacaccaagaaaacccatggctgtggctccatctttcaacatgaccaatccacagcctgccatagaaggaggaatttctgaagttgagatcatctcccaacaagtagacgaagaaaccaagagcattgctcctgtgcagctggtgaactttgcctatcgggacttgcccctggctgctgtcgatctctccacggcgggctcgcagctcctgtcaaatctggacgaagattaccaaagagaaggtttccagcgcattccagtttgctggcgtgattcactggatcagcctggtcattctgtccgtgttcttctcagagactgttctacggattgtggtgcttgggatctgggattacatcgaaaacaaaatagaggtgtttgacggggctgtgatcatcctatctttggctccgatggtggcatccactgtggccaatggacccaggagcccctgggacgccatcagcctcatcatcatgctccggatctggagggtgaagagggtcattgatgcctacgtcctgccagtgaagctggagatggagatggttatccagcagtacgagaaggccaaggtcatccaagacgagcagctggagaggctgacgcagatctgtcaggagcaagggtttgagatccggcagctgcgcgcgcacctggcgcagcaggacctggacctggctgccgagcgcgaagcggcgctccaggccccgcacgtgctcagccagccgcgcagccgcttcaaagtgttggaggccggcacgtgggacgaggagacggcggccgagagcgtcgtggaggagctgcagccctcgcaagaagccacgatgaaggacgacatgaacagctacatcagtcagtattacaatgggcccagcagtgacagcggtgtcccagagccagctgtgtgtatggtcaccacggccgcaatagacattcaccagcccaacatctcctcggacctcttctctctggacatgcccctcaaactcggcggtaatggcaccagcgccacctcggagagtgcctcccgcagctcagtcacccgggcccagagtgacagcagccagacgctgggctcctccatggactgcagcactgcccgcgaggagccgtcctctgagcccggcccttctcccccgccgctgccatcccagcagcaggtggaggaggccacagtccaggacctgctgtcctccctgtcggaggacccctgcccttcccagaaggccttggacccagcccccctcgcccggcccagcccagcgggctcggcccaaaccagccccgagctggaacacaggatggagtctcgttctgtcaccctggctggactgcagtggcgcgatctcggctcactgcagcctccgcctcctggattcacgccattcttctgcctcagcctcccaagtagctgggaccacaggcgcccgccaccatgcccagctaattttttgtatttttagtagagatggggtttcatcgtgttagccaggatggtctcgatctcctgacctcaggtgatctgcccgcctcggcctcccaaagtgctgggattgcacgtggcctcaaccatattactgtgtattagttcagaaagtgctttcattagattcatttgatttaacaatcaaatcttgaattccttca

SEQ ID NO: 21824 - DNA, 1974 bp, Homo sapiens
  misc_feature 1..1974: note = ENST00000558249
  source 1..1974: mol_type = unassigned DNA; mol_type = unassigned DNA
cgtggagaaaacgagccagtgttcagaccagcgggcagtgacgccaggatggggtcccccaggctgggacgggggccctgggtgtcctgaggtttcctgttctgaaagaggctttcatgttgtcgagcaccccttggggtcacacatctgggcgaagagctagaactgaatttgcacccagggctcctgactccccgtccagtggcctttccacaaaggaaacacgttgtgtttcctctcccgggcatccgtgagatgggggccagactgcaaggcacctgagacgcaggatcgcacaggttggaaaaggctccgcaaccgtaagaagctcttgcgaaccgcgatgctgggagattcctaaggaatcatccagctgcgggaggctcagcccagtcctccccaccccgcccccatgcaggagcaaagcgcccagaggtcaggctggaggcccccgccggcccctcgccgctgattcagccttgcccgtctccctccgcagtttgagatccggcagctgcgcgcgcacctggcgcagcaggacctggacctggctgccgagcgcgaagcggcgctccaggccccgcacgtgctcagccagccgcgcagccgcttcaaagtgttggaggccggcacgtgggacgaggagacggcggccgagagcgtcgtggaggagctgcagccctcgcaagaagccacgatgaaggacgacatgaacagctacatcagtcagtattacaatgggcccagcagtgacagcggtgtcccagagccagctgtgtgtatggtcaccacggccgcaatagacattcaccagcccaacatctcctcggacctcttctctctggacatgcccctcaaactcggcggtaatggcaccagcgccacctcggagagtgcctcccgcagctcagtcacccgggcccagagtgacagcagccagacgctgggctcctccatggactgcagcactgcccgcgaggagccgtcctctgagcccggcccttctcccccgccgctgccatcccagcagcaggtggaggaggccacagtccaggacctgctgtcctccctgtcggaggacccctgcccttcccagaaggccttggacccagcccccctcgcccggcccagcccagcgggctcggcccaaaccagccccgagctggaacacagggtaagtctgttcaaccagaagaaccaggagggcttcactgtctttcagatcaggcctgtcatccacttccagcccactgtgcccatgctggaggacaagttcagatctttggaatccaaagagcaaaagctgcacagggtccctgaggcctagagcctgccatgggctgggtgagatgaggggagacagccatctcaaagctctcctgggaccctggaggctgccaagggccacacgcggggcccaggagcccacctggcctccctcagggtgctgcctgcctccagggaggcgacgccaggccaggaggccacaagcttcagacctcaaagcccagagctggcgcctcttctcgccctgctcaggggagggtggtgctcgtggctgggttttctttttaaccatttttacaaaaaccagcctgtggcccagcttcagcagggtagagtgtgggggggccagctcagcctcttgcgttgccttcgttcctgacgcccaccctggactctagggaacagcactgtgagcaggggctgtccagccccacccctaagccgtctttcccaggaatcctgggtggagtccaacacaatcacacggagaccaccatctgagcctatgtcatttgtcctcattctcattccagcatgagcgtttctgagtctcttcaagacgaatctagttttcaccttcacaggatataaagggatcaacctagaggtgggtgggagggtcctagagggcaggggaacaaccattttccaaccttggctttaataataaaaaccagctgcactgag

SEQ ID NO: 21825 - DNA, 2490 bp, Homo sapiens
  misc_feature 1..2490: note = ENST00000392432
  source 1..2490: mol_type = unassigned DNA
ggaaacttttccccggcgccttcgccgccgccgcccgcgcccgggagcgcgcccttctctgcccgcggtcggtgcgctcggccggaggcgccgcggcggaacggaacccagagaagggcacgcggggcggcggcgctcggggcttgcccgcggcgagggaggctgcgcccaggtccccggccccgcgccgcgcgcccagccgcgccatgggggaggcgcccagccccgcgcccgcgctctgggactgggactacctggaccgctgcttcgcccgccaccgcgtctgcatctccttcggcctgtggatctgcgcctcctcctgctggatcgccgcccacgcgctgcttctctatctgagatgtgcacagaaacccagacaggaccagtcggcactgtgtgctgcgtgctgcctcctgaccagtctgtgtgacaccgtcggggctcttctggccagacagctcacaatccaggttttcactggtgcctacctagcagctattgacttagtgaactttatgttcattctcttcccagtctgtggatccaaattcaagtctaattcagatcgggaagcccgagagaggaagaggaggcggcagctcagggccagtgtgtttgccctggccctgccgctgagcctgggcccgtgctgggctctgtgggttgctgtcccgaaggcttcagccaccatccgggggccacagcggaggctgctagcgagcctgctgcaggaaaatactgagatcctcggctacctgctgggtagcgttgctgcctttggctcctgggcttctcggatcccccctctctccagaattgccccacctccgacactggggattacgactcaacatgagatctggcggggacaaatgtccaaaccatcccagtctccctcacgttctcccagcggacattggcgagccgctgcccagcgtcaggtgctgggcactgagatgtgccgggggaagacatttccctccatccacctgtggacccggctcctgtcggccctggctggcctcctctatgcctcggccattgtggcccacgaccagcaccctgagtacctgctgcgggccacaccctggttcctgacctccctcggccgtgcggcactggacctcgctattattttcctttcgtgtgtgatgaagagcaagatgagacaggccttaggatttgccaaggaagccagagagagccctgacacccaagcccttttgacctgtgcagagaaagaggaagaaaaccaggagaatttggattgggtgcctctcaccacactgtcacactgcaagtcactgaggacaatgacagcaatcagtcgctacatggagctgaccatcgagcctgtgcagcaggcaggctgcagtgccaccaggctgccaggtgacgggcagacgagcgccggagatgcgtccctgcaggaccccccgtcgtaccctcccgttcaggtcatccgggcccgggtgtcttccggcagctcctctgaggtctcctccatcaactccgacctggagtgggaccctgaagatgtgaacctcgaaggcagcaaagaaaatgtggagctactgggatcccaggtgcaccaggactctgtgaggacagcacacctgagtgatgatgattaacaccttctggagccagctcatcagctcagagcccagggtcaggagttcgttcagtaacgcagcgggaatcaatctgcactgacaccgcggcaggaactgaagctgccctggcaagtgaggaaccaggagccgtcactgagtgtggctgggctacatcatagctcatcacggagctacgactttgggtactgcggacagacctggataggcccagcattcgttctgaagatcacagttcacagaagcttttgcttcgtaaagataatccaaaggatctcagacccgctcttccttttcccttcattcccttgagagtcagccatgaacggaatacctgctaggttccaggaatgagctcacctaacagatagcaaatgtgtctggttagatctcagcagagcccattctgcaagacctggctgagccagatgagagggtgggccctgtgctggggggccttgggtcacacacaggaaccgagacctggcttccaccccccagtcacccacttgggttatctgctggaagttatcgataggactgtgtggccaaccaagtgcttgtgagatcactgacactgcaaaaacaaagcaaactgctccgggtaccaggacttcctccaacctggcaagggtgtgcgctgaggcggggcttgcaggtgagggggctgtatgcttcaggaactaactaaatgcatgcagaaggtaagaggcatgatgggaggtgttcaagcacagcaatcccatttgggagttattttgatactgcgatgagtaagggtaagggcgcatggaatggggctaaggtgggagtgaacactggggtgaataaattttaaatcaattcaagtatctca

SEQ ID NO: 21826 - DNA, 1445 bp, Homo sapiens
  misc_feature 1..1445: note = ENST00000432352
  source 1..1445: mol_type = unassigned DNA
ctgcgggccacaccctggttcctgacctccctcggccgtgcggcactggacctcgctattattttcctttcgtgtgtgatgaagagcaagatgagacaggccttaggatttgccaaggaagccagagagagccctgacacccaagcccttttgacctgtgcagagaaagaggaagaaaaccaggagaatttggattgggtgcctctcaccacactgtcacactgcaagtcactgaggacaatgacagcaatcagtcgctacatggagctgaccatcgagcctgtgcagcaggcaggctgcagtgccaccaggctgccaggtgacgggcagacgagcgccggagatgcgtccctgcaggaccccccgtcgtaccctcccgttcaggtcatccgggcccgggtgtcttccggcagctcctctgaggtctcctccatcaactccgacctggagcagaagtattgggaggccctaaactcggagcagtgggaccctgaagatgtgaacctcgaaggcagcaaagaaaatgtggagctactgggatcccaggtgcaccaggactctgtgaggacagcacacctgagtgatgatgattaacaccttctggagccagctcatcagctcagagcccagggtcaggagttcgttcagtaacgcagcgggaatcaatctgcactgacaccgcggcaggaactgaagctgccctggcaagtgaggaaccaggagccgtcactgagtgtggctgggctacatcatagctcatcacggagctacgactttgggtactgcggacagacctggataggcccagcattcgttctgaagatcacagttcacagaagcttttgcttcgtaaagataatccaaaggatctcagacccgctcttccttttcccttcattcccttgagagtcagccatgaacggaatacctgctaggttccaggaatgagctcacctaacagatagcaaatgtgtctggttagatctcagcagagcccattctgcaagacctggctgagccagatgagagggtgggccctgtgctggggggccttgggtcacacacaggaaccgagacctggcttccaccccccagtcacccacttgggttatctgctggaagttatcgataggactgtgtggccaaccaagtgcttgtgagatcactgacactgcaaaaacaaagcaaactgctccgggtaccaggacttcctccaacctggcaagggtgtgcgctgaggcggggcttgcaggtgagggggctgtatgcttcaggaactaactaaatgcatgcagaaggtaagaggcatgatgggaggtgttcaagcacagcaatcccatttgggagttattttgatactgcgatgagtaagggtaagggcgcatggaatggggctaaggtgggagtgaacactggggtgaataaattttaaatcaattcaagta

SEQ ID NO: 21827 - DNA, 1899 bp, Homo sapiens
  misc_feature 1..1899: note = ENST00000477651
  source 1..1899: mol_type = unassigned DNA
cactgagatggtgaggacccctgcccagccctcaggagctctctgactgtgtaaagagctgagtcatgatcaatcaaaggtactccgctggagggatgcgttagggcccagaaaagggagttgcttgctcgccttagggtggagttggtaaggggaggtttcccagagttaagttgaagccaggttctgagggatgagtaggagtttgacaggcagaagaagcaactcgagcaaaagctgtaagtctaacagaagcattgccctggaggactggctgcaggcagagggcttgccccgcaacctgctgtgccactgagggccctgggtcttgtgatctgctgcttctcccgcccagcccctccctctctctgcccagtgccgggggaagacatttccctccatccacctgtggacccggctcctgtcggccctggctggcctcctctatgcctcggccattgtggcccacgaccagcaccctgagtacctgctgcgggccacaccctggttcctgacctccctcggccgtgcggcactggacctcgctattattttcctttcgtgtgtgatgaagagcaagatgagacaggccttaggatttgccaaggaagccagagagagccctgacacccaagcccttttgacctgtgcagagaaagaggaagaaaaccaggagaatttggattgggtgcctctcaccacactgtcacactgcaagtcactgaggacaatgacagcaatcagtcgctacatggagctgaccatcgagcctgtgcagcaggcaggctgcagtgccaccaggctgccaggtgacgggcagacgagcgccggagatgcgtccctgcaggaccccccgtcgtaccctcccgttcaggtcatccgggcccgggtgtcttccggcagctcctctgaggtctcctccatcaactccgacctggagtgggaccctgaagatgtgaacctcgaaggcagcaaagaaaatgtggagctactgggatcccaggtgcaccaggactctgtgaggacagcacacctgagtgatgatgattaacaccttctggagccagctcatcagctcagagcccagggtcaggagttcgttcagtaacgcagcgggaatcaatctgcactgacaccgcggcaggaactgaagctgccctggcaagtgaggaaccaggagccgtcactgagtgtggctgggctacatcatagctcatcacggagctacgactttgggtactgcggacagacctggataggcccagcattcgttctgaagatcacagttcacagaagcttttgcttcgtaaagataatccaaaggatctcagacccgctcttccttttcccttcattcccttgagagtcagccatgaacggaatacctgctaggttccaggaatgagctcacctaacagatagcaaatgtgtctggttagatctcagcagagcccattctgcaagacctggctgagccagatgagagggtgggccctgtgctggggggccttgggtcacacacaggaaccgagacctggcttccaccccccagtcacccacttgggttatctgctggaagttatcgataggactgtgtggccaaccaagtgcttgtgagatcactgacactgcaaaaacaaagcaaactgctccgggtaccaggacttcctccaacctggcaagggtgtgcgctgaggcggggcttgcaggtgagggggctgtatgcttcaggaactaactaaatgcatgcagaaggtaagaggcatgatgggaggtgttcaagcacagcaatcccatttgggagttattttgatactgcgatgagtaagggtaagggcgcatggaatggggctaaggtgggagtgaacactggggtgaataaattttaaatcaattcaa

SEQ ID NO: 21828 - DNA, 2197 bp, Homo sapiens
  misc_feature 1..2197: note = ENST00000381975
  source 1..2197: mol_type = unassigned DNA
ggcttgcccgcggcgagggaggctgcgcccaggtccccggccccgcgccgcgcgcccagccgcgccatgggggaggcgcccagccccgcgcccgcgctctgggactgggactacctggaccgctgcttcgcccgccaccgcgtctgcatctccttcggcctgtggatctgcgcctcctcctgctggatcgccgcccacgcgctgcttctctatctgagatgtgcacagaaacccagacaggaccagtcggcactgtgtgctgcgtgctgcctcctgaccagtctgtgtgacaccgtcggggctcttctggccagacagctcacaatccaggttttcactggtgcctacctagcagctattgacttagtgaactttatgttcattctcttcccagtctgtggatccaaattcaagtctaattcagatcgggaagcccgagagaggaagaggaggcggcagctcagggccagtgtgtttgccctggccctgccgctgagcctgggcccgtgctgggctctgtgggttgctgtcccgaaggcttcagccaccatccgggggccacagcggaggctgctagcgagcctgctgcaggaaaatactgagatcctcggctacctgctgggtagcgttgctgcctttggctcctgggcttctcggatcccccctctctccagaatttgccgggggaagacatttccctccatccacctgtggacccggctcctgtcggccctggctggcctcctctatgcctcggccattgtggcccacgaccagcaccctgagtacctgctgcgggccacaccctggttcctgacctccctcggccgtgcggcactggacctcgctattattttcctttcgtgtgtgatgaagagcaagatgagacaggccttaggatttgccaaggaagccagagagagccctgacacccaagcccttttgacctgtgcagagaaagaggaagaaaaccaggagaatttggattgggtgcctctcaccacactgtcacactgcaagtcactgaggacaatgacagcaatcagtcgctacatggagctgaccatcgagcctgtgcagcaggctgcagtgccaccaggctgccaggtgacgggcagacgagcgccggagatgcgtccctgcaggaccccccgtcgtaccctcccgttcaggtcatccgggcccgggtgtcttccggcagctcctctgaggtctcctccatcaactccgacctggagtgggaccctgaagatgtgaacctcgaaggcagcaaagaaaatgtggagctactgggatcccaggtgcaccaggactctgtgaggacagcacacctgagtgatgatgattaacaccttctggagccagctcatcagctcagagcccagggtcaggagttcgttcagtaacgcagcgggaatcaatctgcactgacaccgcggcaggaactgaagctgccctggcaagtgaggaaccaggagccgtcactgagtgtggctgggctacatcatagctcatcacggagctacgactttgggtactgcggacagacctggataggcccagcattcgttctgaagatcacagttcacagaagcttttgcttcgtaaagataatccaaaggatctcagacccgctcttccttttcccttcattcccttgagagtcagccatgaacggaatacctgctaggttccaggaatgagctcacctaacagatagcaaatgtgtctggttagatctcagcagagcccattctgcaagacctggctgagccagatgagagggtgggccctgtgctggggggccttgggtcacacacaggaaccgagacctggcttccaccccccagtcacccacttgggttatctgctggaagttatcgataggactgtgtggccaaccaagtgcttgtgagatcactgacactgcaaaaacaaagcaaactgctccgggtaccaggacttcctccaacctggcaagggtgtgcgctgaggcggggcttgcaggtgagggggctgtatgcttcaggaactaactaaatgcatgcagaaggtaagaggcatgatgggaggtgttcaagcacagcaatcccatttgggagttattttgatactgcgatgagtaagggtaagggcgcatggaatggggctaaggtgggagtgaacactggggtgaataaattttaaatcaattcaa

SEQ ID NO: 21829 - DNA, 2245 bp, Homo sapiens
  misc_feature 1..2245: note = ENST00000347147
  source 1..2245: mol_type = unassigned DNA
cggaacggaacccagagaagggcacgcggggcggcggcgctcggggcttgcccgcggcgagggaggctgcgcccaggtccccggccccgcgccgcgcgcccagccgcgccatgggggaggcgcccagccccgcgcccgcgctctgggactgggactacctggaccgctgcttcgcccgccaccgcgtctgcatctccttcggcctgtggatctgcgcctcctcctgctggatcgccgcccacgcgctgcttctctatctgagatgtgcacagaaacccagacaggaccagtcggcactgtgtgctgcgtgctgcctcctgaccagtctgtgtgacaccgtcggggctcttctggccagacagctcacaatccaggttttcactggtgcctacctagcagctattgacttagtgaactttatgttcattctcttcccagtctgtggatccaaattcaagtctaattcagatcgggaagcccgagagaggaagaggaggcggcagctcagggccagtgtgtttgccctggccctgccgctgagcctgggcccgtgctgggctctgtgggttgctgtcccgaaggcttcagccaccatccgggggccacagcggaggctgctagcgagcctgctgcaggaaaatactgagatcctcggctacctgctgggtagcgttgctgcctttggctcctgggcttctcggatcccccctctctccagaatttgccgggggaagacatttccctccatccacctgtggacccggctcctgtcggccctggctggcctcctctatgcctcggccattgtggcccacgaccagcaccctgagtacctgctgcgggccacaccctggttcctgacctccctcggccgtgcggcactggacctcgctattattttcctttcgtgtgtgatgaagagcaagatgagacaggccttaggatttgccaaggaagccagagagagccctgacacccaagcccttttgacctgtgcagagaaagaggaagaaaaccaggagaatttggattgggtgcctctcaccacactgtcacactgcaagtcactgaggacaatgacagcaatcagtcgctacatggagctgaccatcgagcctgtgcagcaggcaggctgcagtgccaccaggctgccaggtgacgggcagacgagcgccggagatgcgtccctgcaggaccccccgtcgtaccctcccgttcaggtcatccgggcccgggtgtcttccggcagctcctctgaggtctcctccatcaactccgacctggagtgggaccctgaagatgtgaacctcgaaggcagcaaagaaaatgtggagctactgggatcccaggtgcaccaggactctgtgaggacagcacacctgagtgatgatgattaacaccttctggagccagctcatcagctcagagcccagggtcaggagttcgttcagtaacgcagcgggaatcaatctgcactgacaccgcggcaggaactgaagctgccctggcaagtgaggaaccaggagccgtcactgagtgtggctgggctacatcatagctcatcacggagctacgactttgggtactgcggacagacctggataggcccagcattcgttctgaagatcacagttcacagaagcttttgcttcgtaaagataatccaaaggatctcagacccgctcttccttttcccttcattcccttgagagtcagccatgaacggaatacctgctaggttccaggaatgagctcacctaacagatagcaaatgtgtctggttagatctcagcagagcccattctgcaagacctggctgagccagatgagagggtgggccctgtgctggggggccttgggtcacacacaggaaccgagacctggcttccaccccccagtcacccacttgggttatctgctggaagttatcgataggactgtgtggccaaccaagtgcttgtgagatcactgacactgcaaaaacaaagcaaactgctccgggtaccaggacttcctccaacctggcaagggtgtgcgctgaggcggggcttgcaggtgagggggctgtatgcttcaggaactaactaaatgcatgcagaaggtaagaggcatgatgggaggtgttcaagcacagcaatcccatttgggagttattttgatactgcgatgagtaagggtaagggcgcatggaatggggctaaggtgggagtgaacactggggtgaataaattttaaatcaattcaa

SEQ ID NO: 21830 - DNA, 946 bp, Homo sapiens
  misc_feature 1..946: note = ENST00000476750
  source 1..946: mol_type = unassigned DNA
cttgtgcctcagaatcatcatagacgcttggaaatgggagagatcttcttatctcgttgctgatccaataccacagcatacacatggggaaactgaggccccaaaaacgaaggcaaattagtgacaggaggagaactggagcccaatccctacttgcctccatggctggaacctcaaagtgggaccctgaagatgtgaacctcgaaggcagcaaagaaaatgtggagctactgggatcccaggtgcaccaggactctgtgaggacagcacacctgagtgatgatgattaacaccttctggagccagctcatcagctcagagcccagggtcaggagttcgttcagtaacgcagcgggaatcaatctgcactgacaccgcggcaggaactgaagctgccctggcaagtgaggaaccaggagccgtcactgagtgtggctgggctacatcatagctcatcacggagctacgactttgggtactgcggacagacctggataggcccagcattcgttctgaagatcacagttcacagaagcttttgcttcgtaaagataatccaaaggatctcagacccgctcttccttttcccttcattcccttgagagtcagccatgaacggaatacctgctaggttccaggaatgagctcacctaacagatagcaaatgtgtctggttagatctcagcagagcccattctgcaagacctggctgagccagatgagagggtgggccctgtgctggggggccttgggtcacacacaggaaccgagacctggcttccaccccccagtcacccacttgggttatctgctggaagttatcgataggactgtgtggccaaccaagtgcttgtgagatcactgacactgcaaaaacaaagcaaactgctccgggtaccaggacttcctccaacctggcaagggtgtgcgctgaggcggggcttgc

SEQ ID NO: 21831 - DNA, 1508 bp, Homo sapiens
  misc_feature 1..1508: note = ENST00000473092
  source 1..1508: mol_type = unassigned DNA
cggaacggaacccagagaagggcacgcggggcggcggcgctcggggcttgcccgcggcgagggaggctgcgcccaggtccccggccccgcgccgcgcgcccagccgcgccatgggggaggcgcccagccccgcgcccgcgctctgggactgggactacctggaccgctgcttcgcccgccaccgcgtctgcatctccttcggcctgtggatctgcgcctcctcctgctggatcgccgcccacgcgctgcttctctatctgagatgtgcacagaaacccagacaggaccagtcggcactgtgtgctgcgtgctgcctcctgaccagtctgtgtgacaccgtcggggctcttctggccagacagctcacaatccaggttttcactggtgcctacctagcagctattgacttagtgaactttatgttcattctcttcccagtctgtggatccaaattcaagtctaattcagatcgggaagcccgagagaggaagaggaggcggcagctcagggccagtgtgtttgccctggccctgccgctgagcctgggcccgtgctgggctctgtgggttgctgtcccgaaggcttcagccaccatccgggggccacagcggaggctgctagcgagcctgctgcaggaaaatactgagatcctcggctacctgctgggtagcgttgctgcctttggctcctgggcttctcggatcccccctctctccagaatttgccgggggaagacatttccctccatccacctgtggacccggctcctgtcggccctggctggcctcctctatgcctcggccattgtggcccacgaccagcaccctgagtacctgctgcgggccacaccctggttcctgacctccctcggccgtgcggcactggacctcgctattattttcctttcgtgtgtgatgaagagcaagatgagacaggccttaggatttgccaaggaagccagagagagccctgacacccaagcccttttgacctgtgcagagaaagaggaagaaaaccaggagaatttggattgggtgcctctcaccacactgtcacactgcaagtcactgaggacaatgacagcaatcagtcgctacatggagctgaccatcgagcctgtgcagcaggcaggctgcagtgccaccaggctgccaggtgacgggcagacgagcgccggagatgcgtccctgcaggaccccccgtcgtaccctcccgttcaggtcatccgggcccgggtgtcttccggcagctcctctgaggtctcctccatcaactccgacctggagaagtattgggaggccctaaactcggagcagtgggaccctgaagatgtgaacctcgaaggcagcaaagaaaatgtggagctactgggatcccaggtgcaccaggactctgtgaggacagcacacctgagtgatgatgattaacaccttctggagccagctcatcagctcagagcccagggtcaggagttcgttcagtaacgcagcgggaatcaatctgcactg

SEQ ID NO: 21832 - DNA, 846 bp, Homo sapiens
  misc_feature 1..846: note = ENST00000452358
  source 1..846: mol_type = unassigned DNA
aactttatgttcattctcttcccagtctgtggatccaaattcaagtctaattcagatcgggaagcccgagagaggaagaggaggcggcagctcagggccagtgtgtttgccctggccctgccgctgagcctgggcccgtgctgggctctgtgggttgctgtcccgaaggcttcagccaccatccgggggccacagcggaggctgctagcgagcctgctgcaggaaaatactgagatcctcggctacctgctgggtagcgttgctgcctttggctcctgggcttctcggatcccccctctctccagaattagcaagatgagacaggccttaggatttgccaaggaagccagagagagccctgacacccaagcccttttgacctgtgcagagaaagaggaagaaaaccaggagaatttggattgggtgcctctcaccacactgtcacactgcaagtcactgaggacaatgacagcaatcagtcgctacatggagctgaccatcgagcctgtgcagcaggcaggctgcagtgccaccaggctgccaggtgacgggcagacgagcgccggagatgcgtccctgcaggaccccccgtcgtaccctcccgttcaggtcatccgggcccgggtgtcttccggcagctcctctgaggtctcctccatcaactccgacctggagtgggaccctgaagatgtgaacctcgaaggcagcaaagaaaatgtggagctactgggatcccaggtgcaccaggactctgtgaggacagcacacctgagtgatgatgattaacaccttctggagccagctcatcagctcagagcccagggtcaggagttcgttcagtaacgc

SEQ ID NO: 21833 - DNA, 452 bp, Homo sapiens
  misc_feature 1..452: note = ENST00000429560
  source 1..452: mol_type = unassigned DNA
atgaagagcaagatgagacaggccttaggatttgccaaggaagccagagagagccctgacacccaagcccttttgacctgtgcagagaaagaggaagaaaaccaggagaatttggattgggtgcctctcaccacactgtcacactgcaagtcactgaggacaatgacagcaatcagtcgctacatggagctgaccatcgagcctgtgcagcaggctgcagtgccaccaggctgccaggtgacgggcagacgagcgccggagatgcgtccctgcaggaccccccgtcgtaccctcccgttcaggtcatccgggcccgggtgtcttccggcagctcctctgagtgggaccctgaagatgtgaacctcgaaggcagcaaagaaaatgtggagctactgggatcccaggtgcaccaggactctgtgaggacagcacacctgagtgatgatgattaa

SEQ ID NO: 21834 - DNA, 1212 bp, Homo sapiens
  misc_feature 1..1212: note = ENST00000419280
  source 1..1212: mol_type = unassigned DNA
acgccgtgccttacagcgaccggcagggactcggccgtccgcgagcccagccgcccgccccgctccggccaggatgttggaggcttctctatctgagatgtgcacagaaacccagacaggaccagtcggcactgtgtgctgcgtgctgcctcctgaccagtctgtgtgacaccgtcggggctcttctggccagacagctcacaatccaggttttcactggtgcctacctagcagctattgacttagtgaactttatgttcattctcttcccagtctgtggatccaaattcaagtctaattcagatcgggaagcccgagagaggaagaggaggcggcagctcagggccagtgtgtttgccctggccctgccgctgagcctgggcccgtgctgggctctgtgggttgctgtcccgaaggcttcagccaccatccgggggccacagcggaggctgctagcgagcctgctgcaggaaaatactgagatcctcggctacctgctgggtagcgttgctgcctttggctcctgggcttctcggatcccccctctctccagaattatggagtctcgctgtgttgcccaggctggagtgcagtggcgtgatcttggctcactgcaaccttcacctcccaatttcaagcaattctcctgcctcagcctcccgagtagctgggactacagctgccagtggagctgcaggagctgctagtggctcctggtgtcccttgatgcatggcagtgtcgtttacatttctgccttgcccttcatgtggccttcttccctttgtattattttcctttcgtgtgtgatgaagagcaagatgagacaggccttaggatttgccaaggaagccagagagagccctgacacccaagcccttttgacctgtgcagagaaagaggaagaaaaccaggagaatttggattgggtgcctctcaccacactgtcacactgcaagtcactgaggacaatgacagcaatcagtcgctacatggagctgaccatcgagcctgtgcagcaggcaggctgcagtgccaccaggctgccaggtgacgggcagacgagcgccggagatgcgtccctgcaggaccccccgtcgtaccctcccgttcaggtcatccgggcccgggtgtcttccggcagctcctctgaggtctcctccatcaactccgacctggagcagaagtattgggaggccctaaactcggagcag

SEQ ID NO: 21835 - DNA, 683 bp, Homo sapiens
  misc_feature 1..683: note = ENST00000467284
  source 1..683: mol_type = unassigned DNA
tcactgaggacaatgacagcaatcagtcgctacatggagctgaccatcgagcctgtgcagcaggcaggctgcagtgccaccaggctgccaggtgacgggcagacgagcgccggagatgcgtccctgcaggaccccccgtcgtaccctcccgttcaggtcatccgggcccgggtgtcttccggcagctcctctgaggtctcctccatcaactccgacctggagcccctgggattcaagaaaaggttcagtccacctttgtgacaaaagtacatttatagacagcatccagtcaatttttcccttctgtgcttcccagcattgcaagagacggggtataagctttataggaattctgcaaggaggctgtttctgtcattggaacaaagtctgcatagtgaagaacgcctgtgcctggagccagtgcagtcctgtgtgggtgtgcgtgtgcatgtgggtgtgtgcacgcatgcccatgtgtgggtgtacctgtgtgggccatgagaacagtgctaaatgccagattgctctgtctgaagagggccaagtcccaggcccgtgtgttcctattaattctgtgcctaaggctcttgataacccaactgcttgttctctctccaaactttctggcaccagcagataagggcatattcccctggatgtctgccctttttaaagccaaatca

SEQ ID NO: 21836 - DNA, 859 bp, Homo sapiens
  misc_feature 1..859: note = ENST00000494894
  source 1..859: mol_type = unassigned DNA
gacgccgtgccttacagcgaccggcagggactcggccgtccgcgagcccagccgcccgccccgctccggccaggatgttggaggcttctctatctgagatgtgcacagaaacccagacaggaccagtcggcactgtgtgctgcgtgctgcctcctgaccagtctgtgtgacaccgtcggggctcttctggccagacagctcacaatccagatcgggaagcccgagagaggaagaggaggcggcagctcagggccagtgtgtttgccctggccctgccgctgagcctgggcccgtgctgggctctgtgggttgctgtcccgaaggcttcagccaccatccgggggccacagcggaggctgctagcgagcctgctgcaggaaaatactgagatcctcggctacctgctgggtagcgttgctgcctttggctcctgggcttctcggatcccccctctctccagaatttgccgggggaagacatttccctccatccacctgtggacccggctcctgtcggccctggctggcctcctctatgcctcggccattgtggcccacgaccagcaccctgagtacctgctgcgggccacaccctggttcctgacctccctcggccgtgcggcactggacctcgctattattttcctttcgtgtgtgatgaagagcaagatgagacaggccttaggatttgccaaggaagccagagagagccctgacacccaagcccttttgacctgtgcagagaaagaggaagaaaaccaggagaatttggattgggtgcctctcaccacactgtcacactgcaagtcactgaggacaatgacagcaatcagtcgctacatggagctgaccatcgagcc

SEQ ID NO: 21837 - DNA, 1278 bp, Homo sapiens
  misc_feature 1..1278: note = ENST00000330115
  source 1..1278: mol_type = unassigned DNA
ctaattgctgttggctcaggaaatgtggacaatacgcaggaagggacgccgtgccttacagcgaccggcagggactcggccgtccgcgagcccagccgcccgccccgctccggccaggatgttggaggcttctctatctgagatgtgcacagaaacccagacaggaccagtcggcactgtgtgctgcgtgctgcctcctgaccagtctgtgtgacaccgtcggggctcttctggccagacagctcacaatccaggttttcactggtgcctacctagcagctattgacttagtgaactttatgttcattctcttcccagtctgtggatccaaattcaagtctaattcagatcgggaagcccgagagaggaagaggaggcggcagctcagggccagtgtgtttgccctggccctgccgctgagcctgggcccgtgctgggctctgtgggttgctgtcccgaaggcttcagccaccatccgggggccacagcggaggctgctagcgagcctgctgcaggaaaatactgagatcctcggctacctgctgggtagcgttgctgcctttggctcctgggcttctcggatcccccctctctccagaattgtgaggccgggggtggggatgggactgtgggtcacatgacagtctcagggcatctgggagcatcctgagagggtcatggggcggaggtgtggcgtcaccgtgggtgcatggacatgggctcagcttttcctgaagagcgttagtgtgtatgacagcaaggagggggtgtgtgtggagagtgggcagccaacccagggcgtcctgaggacggcgggagcctctcggggaaagcccgtgtgttcttccccatttcctatagcaaatgaaaagcaggctctgaggaagaagcccctgaggctgaacccataagagaaggagatttgacaccggacaggcagccaggtgtgaggttctgtgtagatcaagagtgtcttaggccgggcgcgggggctcacgcctggaatcccagcactttgcgaggccgaggcggggcgggtcgcttgaggtcaggagttggagactagcctgaccaacacggtgaaaccctgtctctactaaaatacaaaaattagccaggcatggtggtgcatgcttgtaatcccagctactctggaggctgaggtggagaatcgcttgaacccaggaggcagaggttgcagtgagccgagattgtgccactgcactccagcctgggcgacaagagggaaactccgtctaaaaaaaaaaaaaaaaaaaa

SEQ ID NO: 21838 - DNA, 682 bp, Homo sapiens
  misc_feature 1..682: note = ENST00000430601
  source 1..682: mol_type = unassigned DNA
tgcgctcggccggaggcgccgcggcggaacggaacccagagaagggcacgcggggcggcggcgctcggggcttgcccgcggcgagggaggctgcgcccaggtccccggccccgcgccgcgcgcccagccgcgccatgggggaggcgcccagccccgcgcccgcgctctgggactgggactacctggaccgctgcttcgcccgccaccgcgtctgcatctccttcggcctgtggatctgcgcctcctcctgctggatcgccgcccacgcgctgcttctctatctgagatgtgcacagaaacccagacaggaccagtcggcactgtgtgctgcgtgctgcctcctgaccagtctgtgtgacaccgtcggggctcttctggccagacagctcacaatccagtctgtggatccaaattcaagtctaattcagatcgggaagcccgagagaggaagaggaggcggcagctcagggccagtgtgtttgccctggccctgccgctgagcctgggcccgtgctgggctctgtgggttgctgtcccgaaggcttcagccaccatccgggggccacagcggaggctgctagcgagcctgctgcaggaaaatactgagatcctcggctacctgctgggtagcgttgctgcctttggctcctgggcttctcggatcccccctctctccagaatt

SEQ ID NO: 21839 - DNA, 1843 bp, Homo sapiens
  misc_feature 1..1843: note = ENST00000376014
  source 1..1843: mol_type = unassigned DNA
aaagggctggacgctcacccaagaaggggaccccggcctgacctctctcggaattcaaaaaaatctaaggctcagagagggaatgggagctggctcttccctctgtgtttagcatccacgttttttggcggtctggctgaaaccagcccaccctagttcgggcgccagagcaacgcagttccgagggcagatctccaaggggcggaggcagagccgcgggtggatctttaactcaagactagcatgaagagttgccttctggcctgccctgagtctcctcaaataacaacaggcccttccaccgcagccatccgcacgggaggcctcgcgattgctcggaaccatcccgcaggagttcagctgatattttctagtgtggggcgagagattttgtggagcgcatttaaggggtttttgttgtgactgctgccttgtatacatttattttctttcttggaactgggcctcgccctcctcccactgacatgatggcccagtccaaggccaatggctcgcactatgcgctgaccgccatcggcctggggatgctggtccttggggtgatcatggccatgtggaacctggtacccggcttcagcgcggccgagaagccaacagctcagggcagcaacaagaccgaggtgggtggcggcatcctcaagagcaagaccttctctgtggcctacgtgctggtcggggccggggtgatgctgctgctgctttctatctgcctgagtatcagggataagaggaagcagcggcagggcgaggacctggcccatgtccagcacccgacaggcgctgggcctcacgcccaggaggaagacagccaggaggaagaagaggaggatgaggaggctgcctcaaggtactatgttcccagctacgaggaagtgatgaacacaaactactcagaagcaaggggagaggagcagaacccgaggttgagcatctctctcccgtcctatgagtcactgacggggctcgacgagaccacccccacatccaccagggctgacgtggaggccagccctgggaacccccctgacaggcagaactctaagttggccaaacgactgaaaccgctgaaagttcgaaggattaaatctgaaaagcttcacctcaaagactttaggatcaacctcccagacaaaaacgtccctcctccctcgatagagcctttgactcctccaccgcagtatgatgaagtccaggagaaggcccccgacacccggccgcccgactgaatggccccacttgagccacgctccctcctgtctctcacacctttcacccccaagactctaacaaagccacatgagccacagttgagaagcggaggggccagctgtgcatggagccatttggatggcggcgggcggggggggattctctgtatcaggagtgactttgttgccccacacagcctcctgctgcaggtgctttggaaagagatgctgccttggagctggtgaatctgtggaccacattcaagggtgtggcacaggcatcttcccatccttttcactccgaatcgctggcgacacattctcctttccagctaggaaagggttcctcgcggctggtttagattgtggttgtttgttttgcttctactaagactgttttgtttcaaaaaggaaacaagttttgtgtttgctgtctacgctggagtcctgaactgtgggtagaaaacacgacctggctttgtagaaaggacacagggctgttttatgaactaagcggtgaggctcaggtggcggctctcgcagagcccctgatgctgttgttctttgagggcttaaggcctgatgaacgtaggcacgtgatgcataatagtctt

SEQ ID NO: 21840 - DNA, 766 bp, Homo sapiens
  misc_feature 1..766: note = ENST00000451326
  source 1..766: mol_type = unassigned DNA
cgctcacccaagaaggggaccccggcctgacctctctcggaattcaaaaaaatctaaggctcagagagggaatgggagctggctcttccctctgtgtttagcatccacgttttttggcggtctggctgaaaccagcccaccctagttcgggcgccagagcaacgcagttccgagggcagatctccaaggggcggaggcagagccgcgggcccttccaccgcagccatccgcacgggaggcctcgcgattgctcggaaccatcccgcaggagttcagctgatattttctagtgtggggcgagagattttgtggagcgcatttaaggggtttttgttgtgactgctgccttgtatacatttattttctttcttggaactgggcctcgccctcctcccactgacatgatggcccagtccaaggccaatggctcgcactatgcgctgaccgccatcggcctggggatgctggtccttggggtgatcatggccatgtggaacctggtacccggcttcagcgcggccgagaagccaacagctcagggcagcaacaagaccgaggtgggtggcggcatcctcaagagcaagaccttctctgtggcctacgtgctggtcggggccggggtgatgctgctgctgctttctatctgcctgagtatcagggataagaggaagcagcggcagggcgaggacctggcccatgtccagcacccgacaggcgctgggcctcacgcccaggaggaagacagccaggaggaagaagaggagga

SEQ ID NO: 21841 - DNA, 1842 bp, Homo sapiens
  misc_feature 1..1842: note = ENST00000400796
  source 1..1842: mol_type = unassigned DNA
acgccggcgctcccaggccgcgcttcctgcgtccccaacccggtccctgagagggcagtgcgccctctccaccactgcgttccctcggctaagaatcccccgaaccccagccccgcgatcgcggcgcccaccgaggaggccgcccgggtggggcgcgggggtcgcgaagcccgcagtcccggaccgcccagccgagacggagccggacccgccgcctcccgggcccttccaccgcagccatccgcacgggaggcctcgcgattgctcggaaccatcccgcaggagttcagctgatattttctagtgtggggcgagagattttgtggagcgcatttaaggggtttttgttgtgactgctgccttgtatacatttattttctttcttggaactgggcctcgccctcctcccactgacatgatggcccagtccaaggccaatggctcgcactatgcgctgaccgccatcggcctggggatgctggtccttggggtgatcatggccatgtggaacctggtacccggcttcagcgcggccgagaagccaacagctcagggcagcaacaagaccgaggtgggtggcggcatcctcaagagcaagaccttctctgtggcctacgtgctggtcggggccggggtgatgctgctgctgctttctatctgcctgagtatcagggataagaggaagcagcggcagggcgaggacctggcccatgtccagcacccgacaggcgctgggcctcacgcccaggaggaagacagccaggaggaagaagaggaggatgaggaggctgcctcaaggtactatgttcccagctacgaggaagtgatgaacacaaactactcagaagcaaggggagaggagcagaacccgaggttgagcatctctctcccgtcctatgagtcactgacggggctcgacgagaccacccccacatccaccagggctgacgtggaggccagccctgggaacccccctgacaggcagaactctaagttggccaaacgactgaaaccgctgaaagttcgaaggattaaatctgaaaagcttcacctcaaagactttaggatcaacctcccagacaaaaacgtccctcctccctcgatagagcctttgactcctccaccgcagtatgatgaagtccaggagaaggcccccgacacccggccgcccgactgaatggccccacttgagccacgctccctcctgtctctcacacctttcacccccaagactctaacaaagccacatgagccacagttgagaagcggaggggccagctgtgcatggagccatttggatggcggcgggcggggggggattctctgtatcaggagtgactttgttgccccacacagcctcctgctgcaggtgctttggaaagagatgctgccttggagctggtgaatctgtggaccacattcaagggtgtggcacaggcatcttcccatccttttcactccgaatcgctggcgacacattctcctttccagctaggaaagggttcctcgcggctggtttagattgtggttgtttgttttgcttctactaagactgttttgtttcaaaaaggaaacaagttttgtgtttgctgtctacgctggagtcctgaactgtgggtagaaaacacgacctggctttgtagaaaggacacagggctgttttatgaactaagcggtgaggctcaggtggcggctctcgcagagcccctgatgctgttgttctttgagggcttaaggcctgatgaacgtaggcacgtgatgcataatagtcttcaatggtacacttaactagtctcttctgtgtaacagcaaaaaaaaaaaaaaaaagaagaagaaagaaaa

SEQ ID NO: 21842 - DNA, 1861 bp, Homo sapiens
  misc_feature 1..1861: note = ENST00000434578
  source 1..1861: mol_type = unassigned DNA
caacccggtccctgagagggcagtgcgccctctccaccactgcgttccctcggctaagaatcccccgaaccccagccccgcgatcgcggcgcccaccgaggaggccgcccgggtggggcgcgggggtcgcgaagcccgcagtcccggaccgcccagccgagacggagccggacccgccgcctcccgggtggatctttaactcaagactagcatgaagagttgccttctggcctgccctgagtctcctcaaataacaacaggcccttccaccgcagccatccgcacgggaggcctcgcgattgctcggaaccatcccgcaggagttcagctgatattttctagtgtggggcgagagattttgtggagcgcatttaaggggtttttgttgtgactgctgccttgtatacatttattttctttcttggaactgggcctcgccctcctcccactgacatgatggcccagtccaaggccaatggctcgcactatgcgctgaccgccatcggcctggggatgctggtccttggggtgatcatggccatgtggaacctggtacccggcttcagcgcggccgagaagccaacagctcagggcagcaacaagaccgaggtgggtggcggcatcctcaagagcaagaccttctctgtggcctacgtgctggtcggggccggggtgatgctgctgctgctttctatctgcctgagtatcagggataagaggaagcagcggcagggcgaggacctggcccatgtccagcacccgacaggcgctgggcctcacgcccaggaggaagacaggaggaagaagaggaggatgaggaggctgcctcaaggtactatgttcccagctacgaggaagtgatgaacacaaactactcagaagcaaggggagaggagcagaacccgaggttgagcatctctctcccgtcctatgagtcactgacggggctcgacgagaccacccccacatccaccagggctgacgtggaggccagccctgggaacccccctgacaggcagaactctaagttggccaaacgactgaaaccgctgaaagttcgaaggattaaatctgaaaagcttcacctcaaagactttaggatcaacctcccagacaaaaacgtccctcctccctcgatagagcctttgactcctccaccgcagtatgatgaagtccaggagaaggcccccgacacccggccgcccgactgaatggccccacttgagccacgctccctcctgtctctcacacctttcacccccaagactctaacaaagccacatgagccacagttgagaagcggaggggccagctgtgcatggagccatttggatggcggcgggcggggggggattctctgtatcaggagtgactttgttgccccacacagcctcctgctgcaggtgctttggaaagagatgctgccttggagctggtgaatctgtggaccacattcaagggtgtggcacaggcatcttcccatccttttcactccgaatcgctggcgacacattctcctttccagctaggaaagggttcctcgcggctggtttagattgtggttgtttgttttgcttctactaagactgttttgtttcaaaaaggaaacaagttttgtgtttgctgtctacgctggagtcctgaactgtgggtagaaaacacgacctggctttgtagaaaggacacagggctgttttatgaactaagcggtgaggctcaggtggcggctctcgcagagcccctgatgctgttgttctttgagggcttaaggcctgatgaacgtaggcacgtgatgcataatagtcttcaatggtacacttaactagtctcttctgtgtaacagcaaaaaaaaaaaaaaaaa

SEQ ID NO: 21843 - DNA, 1931 bp, Homo sapiens
  misc_feature 1..1931: note = ENST00000376008
  source 1..1931: mol_type = unassigned DNA
agtgcgccctctccaccactgcgttccctcggctaagaatcccccgaaccccagccccgcgatcgcggcgcccaccgaggaggccgcccgggtggggcgcgggggtcgcgaagcccgcagtcccggaccgcccagccgagacggagccggacccgccgcctcccgggtggatctttaactcaagactagcatgaagagttgccttctggcctgccctgagtctcctcaaataacaacaggcccttccaccgcagccatccgcacgggaggcctcgcgattgctcggaaccatcccgcaggagttcagctgatattttctagtgtggggcgagagattttgtggagcgcatttaaggggtttttgttgtgactgctgccttgtatacatttattttctttcttggaactgggcctcgccctcctcccactgacatgatggcccagtccaaggccaatggctcgcactatgcgctgaccgccatcggcctggggatgctggtccttggggtgatcatggccatgtggaacctggtacccggcttcagcgcggccgagaagccaacagctcagggcagcaacaagaccgaggtgggtggcggcatcctcaagagcaagaccttctctgtggcctacgtgctggtcggggccggggtgatgctgctgctgctttctatctgcctgagtatcagggataagaggaagcagcggcagggcgaggacctggcccatgtccagcacccgacaggcgctgggcctcacgcccaggaggaagacagccaggaggaagaagaggaggatgaggaggctgcctcaaggtactatgttcccagctacgaggaagtgatgaacacaaactactcagaagcaaggggagaggagcagaacccgaggttgagcatctctctcccgtcctatgagtcactgacggggctcgacgagaccacccccacatccaccagggctgacgtggaggccagccctgggaacccccctgacaggcagaactctaagttggccaaacgactgaaaccgctgaaagttcgaaggattaaatctgaaaagcttcacctcaaagactttaggatcaacctcccagacaaaaacgtccctcctccctcgatagagcctttgactcctccaccgcagtatgatgaagtccaggagaaggcccccgacacccggccgcccgactgaatggccccacttgagccacgctccctcctgtctctcacacctttcacccccaagactctaacaaagccacatgagccacagttgagaagcggaggggccagctgtgcatggagccatttggatggcggcgggcggggggggattctctgtatcaggagtgactttgttgccccacacagcctcctgctgcaggtgctttggaaagagatgctgccttggagctggtgaatctgtggaccacattcaagggtgtggcacaggcatcttcccatccttttcactccgaatcgctggcgacacattctcctttccagctaggaaagggttcctcgcggctggtttagattgtggttgtttgttttgcttctactaagactgttttgtttcaaaaaggaaacaagttttgtgtttgctgtctacgctggagtcctgaactgtgggtagaaaacacgacctggctttgtagaaaggacacagggctgttttatgaactaagcggtgaggctcaggtggcggctctcgcagagcccctgatgctgttgttctttgagggcttaaggcctgatgaacgtaggcacgtgatgcataatagtcttcaatggtacacttaactagtctcttctgtgtaacagcaaaaaaaaaaaaaaaaagaagaagaaagaaaactgtaggaaatgttctttttgaaatgccatgcaatggagctttttgtaataaaatattttatatgtagtaca

SEQ ID NO: 21844 - DNA, 1942 bp, Homo sapiens
  misc_feature 1..1942: note = ENST00000428417
  source 1..1942: mol_type = unassigned DNA
cagctgcctatcggcttctcagtgtttgaacttcaaagggctggacgctcacccaagaaggggaccccggcctgacctctctcggaattcaaaaaaatctaaggctcagagagggaatgggagctggctcttccctctgtgtttagcatccacgttttttggcggtctggctgaaaccagcccaccctagttcgggcgccagagcaacgcagttccgagggcagatctccaaggggcggaggcagagccgcgggcccttccaccgcagccatccgcacgggaggcctcgcgattgctcggaaccatcccgcaggagttcagctgatattttctagtgtggggcgagagattttgtggagcgcatttaaggggtttttgttgtgactgctgccttgtatacatttattttctttcttggaactgggcctcgccctcctcccactgacatgatggcccagtccaaggccaatggctcgcactatgcgctgaccgccatcggcctggggatgctggtccttggggtgatcatggccatgtggaacctggtacccggcttcagcgcggccgagaagccaacagctcagggcagcaacaagaccgaggtgggtggcggcatcctcaagagcaagaccttctctgtggcctacgtgctggtcggggccggggtgatgctgctgctgctttctatctgcctgagtatcagggataagaggaagcagcggcagggcgaggacctggcccatgtccagcacccgacaggcgctgggcctcacgcccaggaggaagacagccaggaggaagaagaggaggatgaggaggctgcctcaaggtactatgttcccagctacgaggaagtgatgaacacaaactactcagaagcaaggggagaggagcagaacccgaggttgagcatctctctcccgtcctatgagtcactgacggggctcgacgagaccacccccacatccaccagggctgacgtggaggccagccctgggaacccccctgacaggcagaactctaagttggccaaacgactgaaaccgctgaaagttcgaaggattaaatctgaaaagcttcacctcaaagactttaggatcaacctcccagacaaaaacgtccctcctccctcgatagagcctttgactcctccaccgcagtatgatgaagtccaggagaaggcccccgacacccggccgcccgactgaatggccccacttgagccacgctccctcctgtctctcacacctttcacccccaagactctaacaaagccacatgagccacagttgagaagcggaggggccagctgtgcatggagccatttggatggcggcgggcggggggggattctctgtatcaggagtgactttgttgccccacacagcctcctgctgcaggtgctttggaaagagatgctgccttggagctggtgaatctgtggaccacattcaagggtgtggcacaggcatcttcccatccttttcactccgaatcgctggcgacacattctcctttccagctaggaaagggttcctcgcggctggtttagattgtggttgtttgttttgcttctactaagactgttttgtttcaaaaaggaaacaagttttgtgtttgctgtctacgctggagtcctgaactgtgggtagaaaacacgacctggctttgtagaaaggacacagggctgttttatgaactaagcggtgaggctcaggtggcggctctcgcagagcccctgatgctgttgttctttgagggcttaaggcctgatgaacgtaggcacgtgatgcataatagtcttcaatggtacacttaactagtctcttctgtgtaacagcaaaaaaaaaaaaaaaaagaagaagaaagaaaactgtaggaaatgttctttttgaaatgccatgcaatggagctttttgtaataaaatattttatatgtagt

SEQ ID NO: 21845 - DNA, 4098 bp, Homo sapiens
  misc_feature 1..4098: note = ENST00000366835
  source 1..4098: mol_type = unassigned DNA
gtaacttttaagtggtcggaacacgccccgcgctgctgggtcccgccagacacgccgccgccgcaggaaagtctacagtttggtaccccaggactcgctggtcaggaaagccctgcaggacatgagtgttaggcccgacgcctggcccttggcagcttgggaggtggctggggctgcttttgcctttgccagagacagctccaactgaggacctctccaacgggcccatccacagtccttccttcccctagtgtctgggaagacaggcgcgatgatggactccccgttcctggagctgtggcagtccaaggcagtgtccatcagggagcagctgggactcggggaccggcccaacgactcctattgctacaactcggccaaaaacagcaccgtgctccagggggtcacctttggtggcatccccactgtcctgctcatagacgtcagctgcttcctgttcttaatcttggtgttttctattataagaagaagattctgggactatggccgcattgccctggtgtcagaagcagacagcgagtccagatttcagagattgtcatcgacttcctcctcaggtcaacaagactttgaaaatgagctgggatgctgtccctggctgactgccatcttccgtctgcatgatgaccagatcctggaatggtgtggggaggacgccatccactacctgtccttccagaggcacatcatcttcctgttggtggtggtcagctttttgtccctgtgtgtcatcctgcctgtcaacctctcaggggacttgctggacaaagacccgtatagttttgggaggacaacaatagcaaacctacagactgacaatgacctcctttggctgcacaccatctttgctgtcatttacctcttcctcactgtgggtttcatgcggcaccacactcagtccattaagtacaaagaggagaacctggtgaggcggaccctgttcatcacaggactccccagagatgccaggaaggagactgtggagagccacttccgggacgcgtatcccacgtgtgaggtggttgatgtgcagctgtgctacaacgtggccaaactgatctacctgtgcaaggagaaaaagaagactgagaagagcctgacctattacacaaacctgcaggtgaagacaggccagcggaccctcatcaaccccaagccctgtggccagttttgctgctgtgaagtgctgggctgtgagtgggaagacgccatctcttactacacacggatgaaggacaggctgctggagaggatcacagaggaagaacgccacgtccaggaccagcccctgggaatggccttcgtcaccttccaggagaagtccatggccacctacatcctgaaagatttcaatgcctgcaagtgtcagagccttcagtgcaaaggtgagccccagccgtcctcccatagcagggagctctatacctccaagtggacagtcacctttgctgctgaccctgaggacatctgctggaagaacctctctatccagggcctccgctggtggctacagtggctgggcatcaacttcaccctcttcctggggctatttttcctgaccacaccctccatcatcctgtccaccatggacaagtttaatgtcaccaaacccatccatgcgctgaataacccgatcatcagccagttcttccccaccctcctgctctggtccttctcggccctgctcccctccattgtctactactctacactgctggagtctcactggaccaagtcgggggaaaaccagatcatgatgaccaaagtctacatattcttgatcttcatggtgctgatcctgccctccctgggtctcaccagtctagattttttcttccggtggctctttgacaaaacttcctcggaggcctccatcaggttggagtgcgtcttcctgcctgaccagggtgccttctttgtgaactatgtcatcgcctcggccttcatcggcaatggcatggagctgctgcggctgccaggtctcatcctctataccttccgcatgatcatggccaagacggctgctgaccgcaggaatgtcaagcagaaccaggccttccagtacgagtttggagccatgtatgcatggatgctgtgtgtcttcactgtcatcgtggcctacagcatcacttgtcccatcatcgcgccatttggcctcatctacatcctgctcaagcacatggtggaccggcacaacctctacttcgtctacctcccagccaagctggagaaggggatccactttgccgctgtgaaccaggccttggcagcccccatcctgtgcctcttctggctctacttcttttccttcctgcgcctgggtatgaaggcccccgccactctgttcaccttcctggtgctgctgctcaccatcctggtctgcctggctcacacctgctttggatgcttcaagcacctcagccctctgaactacaaaacagaagagcctgcaagtgacaaaggaagtgaggcagaggcccacatgcccccaccgttcacaccctacgtgcctcggattctgaacggcttggcctcggagaggacagcactgtctccgcagcagcagcagcagcagacctatggtgccatccacaacatcagcgggactatccctggacagtgcttggcgcagagcgccacgggcagtgtggctgctgccccccaggaggcctgaggctgggtctcactgctctgaaaagacacaaccagaatggcctggggctcaggcccttggctgagtgggaatgcgttgggactgcccagctgagctatcaggtgcccatcttttctggtcccagcagtggtgaggagagcacaggcaggcctcgcccctcccttgctcacccagtttcccctccggcacaagcttccagctctgcagctggggtgacatccccagtggtttgtcgccaagaccatgtggtggacttttcgccccccaaactgatgagtccgggagaatatatggagagagagatgtaacaaggggaaggcctcctcccttctgagcacacacacaaccgataaccaaagagatgctgcagtccaggtctgaggtcccgctggcatccagctccctgctccatggccagtccctccccagcccagcagtccctccaggctacatccaggagtaagctatggggaacaggttgggaggtggccagtgctcctgccagctgtgcacacatctctgtatcccgctagagttctgtgtttttgtatcatgttgtcagggacgctagctgggtcagggttaccccatagcaggcagggacaaggaccactcataatatgcccattggaccacagttaagatccagcctctctcacctcttcagggctgagtgcatgagtctgcacctccaggcaggctctgtgcagtactcaccccctccgtctgctccctccaaggtgtgggggtgggcagtgctcagggcctcctcggagccaaaggacagcatggtcggcacagaggaaggggtacctgggctgggtgcagggccatcccactgcccttgagctgtggctctggcaggaaggaggggcagcccatccctcttctccctcctggggattctggggaatgggatgcaacttaagacttctgcctgagaagcctcctccctgctgcctccagggggcaccaaggcacaagcctgtgcagtaggggcgggatgggggtgtggaagagcaggtccaggctcctagcacaactggcctggggccttggcacctctgtaggccctgcctgtgcctgtccgctggcctggggggcctgggcttatctgggccttctcactcagggactctcttgacgctgacttgcccccgcagtggtggccagtgctgcctctgctccaagctgcccctgcgctgggaggggtgggggcggtgccattggtctggtgcagcatagccctggccagtggcctcatccccagcaggcctcccgtgcctctgccagcaaggaggggccggccagctctgcttgcacagggggccccatgtggggtcagcgcacgctcatgtcactgagttccagccgcttttagagtaaagtcgtttatcatcaaa

SEQ ID NO: 21846 - DNA, 789 bp, Homo sapiens
  misc_feature 1..789: note = ENST00000496025
  source 1..789: mol_type = unassigned DNA
gagaactgctctcttgtgcttccttctgtgatcatgagaactgtataactgtgctttctcttttgccctggctgctaggaaattctgcaggtgtcatattttcggtcttaatgtcctaaatggatgtcggtgtttcttcatatgtcctttatggccactgtctgtgtcctgttgggagaagggcaggaggggagggatgcagtgtggaagctcatgcctgtccaggccaagcacaaatccatttgctgacagccctacgtgcctcggattctgaacggcttggcctcggagaggacagcactgtctccgcagcagcagcagcagcagacctatggtgccatccacaacatcagcgggactatccctggacagtgcttggcgcagagcgccacgggcagtgtggctgctgccccccaggaggcctgaggctgggtctcactgctctgaaaagacacaaccagaatggcctggggctcaggcccttggctgagtgggaatgcgttgggactgcccagctgagctatcaggtgcccatcttttctggtcccagcagtggtgaggagagcacaggcaggcctcgcccctcccttgctcacccagtttcccctccggcacaagcttccagctctgcagctggggtgacatccccagtggtttgtcgccaagaccatgtggtggacttttcgccccccaaactgatgagtccgggagaatatatggagagagagatgtaacaaggggaaggcctcctcccttctgagcacacacacaaccgataaccaaagagat

SEQ ID NO: 21847 - DNA, 405 bp, Homo sapiens
  misc_feature 1..405: note = ENST00000482753
  source 1..405: mol_type = unassigned DNA
tcaccttcctggtgctgctgctcaccatcctggtctgcctggctcacacctgctttggatgcttcaagcacctcagccctctgaactacaaaacagaagagcctgcaagtgacaaaggaagtgaggcagaggcccacatgcccccaccgttcacaatcacatggcaggcaagtttgtgaattaatggcagagaaggaatcctggtccccctgggtattttaacctgcatatttgaaactgttgaggagatagagtcttgtctcgattcatggccatcccccttggtttcagttccctgctctctttccttctctgcatatttaatgcctgccctacgtgcctcggattctgaacggcttggcctcggagaggacagcactgtctccgcagcagcagcagcagcag

SEQ ID NO: 21848 - DNA, 488 bp, Homo sapiens
  misc_feature 1..488: note = ENST00000487971
  source 1..488: mol_type = unassigned DNA
catctgagagaataattgttccctctgagctcttggggacctaagatttggtctttctgtagttgaaggtcagtgcagagaacttgcccccaggctagtctcttggtctgcctaaatctgaccttctgacccacctaagccacgagcactgggagacaagcctcgagacctgtatcccctctcccgctgcaggaagaacctctctatccagggcctccgctggtggctacagtggctgggcatcaacttcaccctcttcctggggctatttttcctgaccacaccctccatcatcctgtccaccatggacaagtttaatgtcaccaaacccatccatgcgctgaataacccgatcatcagccagttcttccccaccctcctgctctggtccttctcggccctgctcccctccattgtctactactctacactgctggagtctcactggaccaagtcgggggaaaaccagatcatgatgaccaaagtct

SEQ ID NO: 21849 - DNA, 5407 bp, Homo sapiens
  misc_feature 1..5407: note = ENST00000474478
  source 1..5407: mol_type = unassigned DNA
cagtctcctgccatgcaaagaaggctcatagagttgctttggaagtggattctttgtacagcctggaagaagacgctgtgtaaatgacatgctttgggggctcccccggccacagaaggagaaaactggagccttctgatttcctgttgtttactttccagaggctggagttgggtaggaaacctgagcataccggcacactggcttgtgggtgacttctctccctgctgtatttcccggacaggtgaggcggaccctgttcatcacaggactccccagagatgccaggaaggagactgtggagagccacttccggtaagcaggtggggtgggaggggagctgagccccctccacgtaggaccaacacagccccacccgcagggcgagcaccttaggtgagcgccttctgtctctcgcttgggtatccaggtgagatctgagaaggacctggccctgccacacgtgtatggagtggctcctgtgtgccagccctgctggtgctgtgcagtgaatagcgccctggtggcctatcctcttcaagcagcctgtgcacagtgtccagagcacagaccagggtgtaggtgcgaataaacgtcttgagagcatacgggggaaaaaattgttgaccccggggttcttagcatcacctttgcagaataagagagacgtgagctgagcatttgtatggacccacagggctagggtctcacaggtggaaggacctcggggccatctctgcgtttgttcgtttgtccacccactgagcgggtgtctgttgagtgagcactgtgtctgagtccaggctctccctggtagaacctcctttccagcggctccctttgagtatctgcaccaccaattcctgcagatggaggctggaggaaagtctttcctgtgaggagattacgtgtgcagccagggatgcggggaaaggcccagagcatcaggaaaggtggcggtggggtgcaggggggcagggcaagcagtccgggaaggctcccaggaccccatgctggaggacctgaaggctgggctgaggagctgacattttattctttcttcattcctttttttgtaatcttatttttttagagacagggtcttgctctgttgcccaggctagagttcagtagtgcaataatagcttactgcggcctcaactcctggacttaaggcatcttcctgcctcagcctcccaagtagctgggactgcagacacatggcaccacacccagctaatttttaaattttttatggagatagagtcttgctatgttgcccaggctggtctcgaattgctgggctcaagtgatcctcctgccttgccctcccaaagtgctgggattacaggcgtgagccaccatgcccggcctctcttcattccttatcaatacagcagccactaatttgttgcatggactaggagttggctgcactttaactttgcactatttgtgaagaaagcacttgctaagcaaattgctagacaggatcgtaaactgaatgtttaaaatttgaaaaacttcttcagaaactctaagtattttagaaatatttactaatatgtaaatactcaataccagaatcatttttctgtatttccttgaagcaactcctcaaagttgcctgctaggcaacacctggaaacagtaattccacttaatgtataactttaaagagaaaaaaaaagtctcctcattctcatacaaacattgcatgactcatgctttcccctattttaagaggcctttttagtgaatgctgttgcagtccgtggggattgatgtatgaatttgcctttcaagcagggatgcttaaattgcagttttcttcctcacagctcttattgagaccagaaattgtcctactgtttaatttcatgattgatatacctatgggctgtctctctcactaaaatgtaagcacatccaggccctgttaccagcacctagaacagtgcctggcaggtggtaggtggggatttacatggttctggaatcccctggaattgtatgtataattttgcgtgtatggtgagggggtattgcatggtggccatgagcattgaccttggagccaggttgcctgtattcacctcctggctcagacactcactagctgtgtgatcttgggcacaagccacttacctctgtcggcctcagtttactcatctgtaaaatggggacaaaacctcacaggttatgatgaggattaaataaataaatatatgtaacaatacctggtcaatagtgagtatgtattttgctgggtgacagagtgagaccctgtctctaaacaaaacaaaacaaaacaaaagccctctttgtattaaatttcaaaatttcccccttttggaggataaaagacaaagagaagagaggtctccgctggcacagaaaccagcagcgagatcactctgccatcctttcccttggatccgtgggcacgtctcctgcttggggtgttttcttttccaacggtgtcttttgcctccttctctccctggccacagggacgcgtatcccacgtgtgaggtggttgatgtgcagctgtgctacaacgtggccaaactgatctacctgtgcaaggagaaaaagaagactgagaagagcctgacctattacacaaacctgcaggtgaagacaggccagcggaccctcatcaaccccaagccctgtggccagttttgctgctgtgaagtgctgggctgtgagtgggaagacgccatctcttactacacacggatgaaggacaggctgctggagaggatcacagaggaagaacgccacgtccaggaccagcccctgggaatggccttcgtcaccttccaggagaagtccatggccacctagtgagtgtaggcacatccagaccccttcttggctgactccctgttcccctccagataactcactgtccctctcgagtggagatggtactgctgacccaccatccctgggatttatctgtggtgtttccttctcctccctcagctacccacactcactttcagccagcccagcccatgtttgtgtaacaggcggtgggggtgtgggcagcagccacggagtgggtgattctggctgaccccctcgagctgatgtggcctggccccactgctgggctcttccctgctgccctggacccatcctgttggcttcatgtgccagccttgccccaggggagatggaggcaccctcctttcagacatctgctctgggccacagatccttctgtctgtggctccccaccttcccacaaatgcaaagctgtggggaagacccctggggcacgctggggcgctcactgcagtggggagcttgaccctggggagtggcttttcacagtggcccttggcatgggactctaggctctcatgcctgtggtctcagtgtcatctcgccttaggagcagcacagggtgggtcgggagaggggtgtggaaaggtgtccagccactgccccaggcattgtgacactaggaatggactcacacaggacttcctgcctccttgcagacactggggcaggaggaaaggggaaggcatctgaggcaggagtagaggggctgctgggctccttacgggaggttaaaggaggaaaagctgtgacctgttgagatggtgagggtcgaggtgggagccctgaggagggaagcttgggaacaggcaatgtgtaacgtggtctattgctacacttgggcctggggaaaaagtgacagaatgaaaagttgagccactggcctggcagtagcactgatcagagctccagcttaacaggcagggtggagggggatggccctatggaagagcagtgtgttgccctcagtttccttatctgtaaaatgggaatcgtactccctttgttgctggtggttgcgaggattaaacaaaattctccacacactgtgctagcgtggcacctcttacatagcgttactcataatacactaatcacaacaaagcaaaggtcctatgccactgcctcccactcctactcagtccccacttgccacatgtgtgcttggtaacctgagtagcctgggcctggctgttgctacatttccttgcagcatcctgaaagatttcaatgcctgcaagtgtcagagccttcagtgcaaaggtgagccccagccgtcctcccatagcagggagctctatacctccaagtggacagtcacctttgctgctgaccctgaggacatctgctggtaagctcctagaccaaggagaggtgggagagaggcctgggttcctggtgggagctgcccatcacctggagcacaggtgtgacctggcagtcaatggagatctccacacatctgcaattctgtgggctgtgatgctgtgatgtgctcggtgtggcccaactggggtatctgcccagcccttccctccagtgttcctccctagcattcaagtgctacccagcagaaatataatgccagttctgcatctaattttaaatttcctaatagccatgctaaaaaagtaaaaagaaacagttgaaattaattttaataatgtatctcgcccaatatatccaaactgttatttcaacatgcaatttttgaaaaatgtgagatgttttacattctctttttcacacttagtcttcaatatctggtgtgtattttacacttctagcacctctcaattcacaccagccacatttaaaatgctcagtagccgcatgcagcttgtgcagccttacttaggtccagtgtcagcctggggccgtgctggggagctgagctgtgtccatgggggccctggtgagcctccagtgctgtgctgagggtaagggcacccagcgcaagccccagcgcagctgcctgtccagccctgcctcagctccttgcacagaatgagcttgaagtgctcccctctgctcggttctagttctgcctctgacagttttgctctttggttcacaaggcttcctaaactcaggattgctttgtgggtctgttctttgggatgagaggccagggcaggtgcaagctatgccttcactcctttgtccctgccttcctccttcctgtaccccagctacagccccgttgggaagaatgtgtcgttagtcacaaagcattgcagatgtgtctaagaaatgccacgctggggccgggcgtggtgctcacacctgtaatcccagcacttcgagaggctgaggcaggcggattgcctgagctcaggatttcaagaccaccctgggtaacatggtgaaaccctgtctctactaaaaatacaaaaaaattagctgggtgtggtggtacacgcctatagtcccagctacatgggaggctgagcaggagaattgcttgaacctgggaggcagaggttgcagtgagccgagatcacaccactgcactctagcctgggtgactgagcaagactctgtctcc

SEQ ID NO: 21850 - DNA, 634 bp, Homo sapiens
  misc_feature 1..634: note = ENST00000483779
  source 1..634: mol_type = unassigned DNA
aaaaaaacagtttcctggtggattgtttcaagatttggacagttactggtgctaagtaaagaaatttgggttgagagcagccctttctctttgccgcccacagcttcacaggggaggggagcttctgtggcttggttccaggcctgggtcctcctctgatctgctgtgtgaccgcatttgagtcacttcccctctttctcagtctcctgccatgcaaagaaggctcatagagttgctttggaagtggattctttgtacagcctggaagaagacgctgtgtaaatgacatgctttgggggctcccccggccacagaaggagaaaactggagccttctgatttcctgttgtttactttccagaggctggagttgggtaggaaacctgagcataccggcacactggcttgtgggtgacttctctccctgctgtatttcccggacaggtgaggcggaccctgttcatcacaggactccccagagatgccaggaaggagactgtggagagccacttccgggacgcgtatcccacgtgtgaggtggttgatgtgcagctgtgctacaacgtggccaaactgatctacctgtgcaaggagaaaaagaagactgagaagagcctgacctattacacaaacct

SEQ ID NO: 21851 - DNA, 454 bp, Homo sapiens
  misc_feature 1..454: note = ENST00000436966
  source 1..454: mol_type = unassigned DNA
gcctttggctctgccagcactggtgggaacctgcaagaaatttgagccctgaacgtctgccttgtcctgttgtcctgtgctccagggaagacaggcgcgatgatggactccccgttcctggagctgtggcagtccaaggcagtgtccatcagggagcagctgggactcggggaccggcccaacgactcctattgctacaactcggccaaaaacagcaccgtgctccagggggtcacctttggtggcatccccactgtcctgctcatagacgtcagctgcttcctgttcttaatcttggtgttttctattataagaagaagattctgggactatggccgcattgccctggtgtcagaagcagacagcgagtccagatttcagagattgtcatcgacttcctcctcaggtcaacaagactttgaaaatgagctgggatgctgtccctggctgactg

SEQ ID NO: 21852 - DNA, 660 bp, Homo sapiens
  misc_feature 1..660: note = ENST00000487817
  source 1..660: mol_type = unassigned DNA
ctcctattgctacaactcggccaaaaacagcaccgtgctccagggggtcacctttggtggcatccccactgtcctgctcatagacgtcagctgcttcctgttcttaatcttggtgttttctattataagaagaagattctgggactatggccgcattgccctggtgtcagaagcagacagcgagtccagatttcagagattgtcatcgacttcctcctcaggtcaacaagactttgaaaatgagctggttggtatctaaggcccagttgtggtcatggccagggggtggggactggcagtcatggttttggggagggagcagggcggatcttgagcggcaagtgctggagaaagtgcttttctgcatcgacgaaggcacctgaacttgggaaataccacaggagggatggcagctggatgacccgggaccttgagactggatgaatttgcaggcaggaaggggtacggaatcccttgggcttccccagcacttctctctcttacacctatggctttgtatgacagttaattatggacttgctggctggattatgagccagatgtgggcaggagccctgccctctccagccctgtttcccagcgcctgatgcatagtaggtgtttagtcattgttgaatgaattattgaacaaatatttgt

SEQ ID NO: 21853 - DNA, 1018 bp, Homo sapiens
  misc_feature 1..1018: note = ENST00000537914
  source 1..1018: mol_type = unassigned DNA
ccagctctgcacccccagctccctgcctgggatcccagccctgatggcaggtggtttccctctcagcaatgacctcctttggctgcacaccatctttgctgtcatttacctcttcctcactgtgggtttcatgcggcaccacactcagtccattaagtacaaagaggagaacctgtctcctgccatgcaaagaaggctcatagagttgctttggaagtggattctttgtacagcctggaagaagacgctgtaggctggagttgggtaggaaacctgagcataccggcacactggcttgtgggtgacttctctccctgctgtatttcccggacaggtgaggcggaccctgttcatcacaggactccccagagatgccaggaaggagactgtggagagccacttccgggacgcgtatcccacgtgtgaggtggttgatgtgcagctgtgctacaacgtggccaaactgatctacctgtgcaaggagaaaaagaagactgagaagagcctgacctattacacaaacctgcaggtgaagacaggccagcggaccctcatcaaccccaagccctgtggccagttttgctgctgtgaagtgctgggctgtgagtgggaagacgccatctcttactacacacggatgaaggacaggctgctggagaggatcacagaggaagaacgccacgtccaggaccagcccctgggaatggccttcgtcaccttccaggagaagtccatggccacctacatcctgaaagatttcaatgcctgcaagtgtcagagccttcagtgcaaaggtgagccccagccgtcctcccatagcagggagctctatacctccaagtggacagtcacctttgctgctgaccctgaggacatctgctggtaagctcctagaccaaggagaggtgggagagaggcctgggttcctggtgggagctgcccatcacctggagcacaggtgtgacctggcagtcaatggagatctccacacatctgcaattctgtgggctgtgatgct

SEQ ID NO: 21854 - DNA, 492 bp, Homo sapiens
  misc_feature 1..492: note = ENST00000378821
  source 1..492: mol_type = unassigned DNA
atgagtgagcaggggagggagacggaggaggaggaggggggaggtggtgcttccgacacagcgcccatgctgccccggggacctcccgaccaccaggcctcagccctgacgtgcccagggtggtcggggcccccgctgctgcccggccggctgctggccgggctcctgctgcacctcctgctgcccgccgcagccttcctgctggtgctcctgcccgcggccgccgtcgtctacctgggattcctgtgccactcgagggtccaccccgctccgggtccccggtgccgcgcgctgttctcagaccgcggctccgcggcgctcatcgtgttcgggcttctctcgctgccgccgctgctggtgctcgcctcggccgtccgcgcccgcctagcccggcgcctccgcccgctgctgcctccgcccgctgggacccccggaccccgccgccccccggggcgccccgacgaggacgagcaactctgcgcctgggtgtga

SEQ ID NO: 21855 - DNA, 1683 bp, Homo sapiens
  misc_feature 1..1683: note = ENST00000394642
  source 1..1683: mol_type = unassigned DNA
cccggggcggggcgcaggcagggaccctccgctcccctctccgtctgccgcccggacgggccaccgcgggggcgcgaggaaggggtgttgggtcgccagggcccgcctcccagctgccccggccgccggggggcctggcggtgacggcggcgcctggcggcggggatttggcgcgggccgggggccgggggccggggcgcgggggcgcgaggctggattcctagggccgcggcgcttcccggcatgctccgctgcaggcccgcgcccgcgcccggactttgccatcggcggggcagtcgcgggatgcgcccgggagccacagcctgagctttagcccatgaggaggatgtgaccgggactgagtcaggagccctctggaagcatggagactgtggtgattgttgccataggtgtgctggccaccatctttctggcttcgtttgcagccttggtgctggtttgcaggcagcgctactgccggccgcgagacctgctgcagcgctatgattctaagcccattgtggacctcattggtgccatggagacccagtctgagccctctgagttagaactggacgatgtcgttatcaccaacccccacattgaggccattctggagaatgaagactggatcgaagatgcctcgggtctcatgtcccactgcattgccatcttgaagatttgtcacactctgacagagaagcttgttgccatgacaatgggctctggggccaagatgaagacttcagccagtgtcagcgacatcattgtggtggccaagcggatcagccccagggtggatgatgttgtgaagtcgatgtaccctccgttggaccccaaactcctggacgcacggacgactgccctgctcctgtctgtcagtcacctggtgctggtgacaaggaatgcctgccatctgacgggaggcctggactggattgaccagtctctgtcggctgctgaggagcatttggaagtccttcgagaagcagccctagcttctgagccagataaaggcctcccaggccctgaaggcttcctgcaggagcagtctgcaatttagtgcctacaggccagcagctagccatgaaggcccctgccgccatccctggatggctcagcttagccttctactttttcctatagagttagttgttctccacggctggagagttcagctgtgtgtgcatagtaaagcaggagatccccgtcagtttatgcctcttttgcagttgcaaactgtggctggtgagtggcagtctaatactacagttaggggagatgccattcactctctgcaagaggagtattgaaaactggtggactgtcagctttatttagctcacctagtgttttcaagaaaattgagccaccgtctaagaaatcaagaggtttcacattaaaattagaatttctggcctctctcgatcggtcagaatgtgtggcaattctgatctgcattttcagaagaggacaatcaattgaaactaagtaggggtttcttcttttggcaagacttgtactctctcacctggcctgtttcatttatttgtattatctgcctggtccctgaggcgtctgggtctctcctctcccttgcaggtttgggtttgaagctgaggaactacaaagttgatgatttcttttttatctttatgcctgcaattttacctagctaccact

SEQ ID NO: 21856 - DNA, 4434 bp, Homo sapiens
  misc_feature 1..4434: note = ENST00000579849
  source 1..4434: mol_type = unassigned DNA
tccgctcccctctccgtctgccgcccggacgggccaccgcgggggcgcgaggaaggggtgttgggtcgccagggcccgcctcccagctgccccggccgccggggggcctggcggtgacggcggcgcctggcggcggggatttggcgcgggccgggggccgggggccggggcgcgggggcgcgaggctggattcctagggccgcggcgcttcccggcatgctccgctgcaggcccgcgcccgcgcccggactttgccatcggcggggcagtcgcgggatgcgcccgggagccacagcctgaggccctcaggtctctgcaggtgtcgtggaggaacctagcacctgccatcctcttccccaatttgccacttccagcagctttagcccatgaggaggatgtgaccgggactgagtcaggagccctctggaagcatggagactgtggtgattgttgccataggtgtgctggccaccatctttctggcttcgtttgcagccttggtgctggtttgcaggcagcgctactgccggccgcgagacctgctgcagcgctatgattctaagcccattgtggacctcattggtgccatggagacccagtctgagccctctgagttagaactggacgatgtcgttatcaccaacccccacattgaggccattctggagaatgaagactggatcgaagatgcctcgggtctcatgtcccactgcattgccatcttgaagatttgtcacactctgacagagaagcttgttgccatgacaatgggctctggggccaagatgaagacttcagccagtgtcagcgacatcattgtggtggccaagcggatcagccccagggtggatgatgttgtgaagtcgatgtaccctccgttggaccccaaactcctggacgcacggacgactgccctgctcctgtctgtcagtcacctggtgctggtgacaaggaatgcctgccatctgacgggaggcctggactggattgaccagtctctgtcggctgctgaggagcatttggaagtccttcgagaagcagccctagcttctgagccagataaaggcctcccaggccctgaaggcttcctgcaggagcagtctgcaatttagtgcctacaggccagcagctagccatgaaggcccctgccgccatccctggatggctcagcttagccttctactttttcctatagagttagttgttctccacggctggagagttcagctgtgtgtgcatagtaaagcaggagatccccgtcagtttatgcctcttttgcagttgcaaactgtggctggtgagtggcagtctaatactacagttaggggagatgccattcactctctgcaagaggagtattgaaaactggtggactgtcagctttatttagctcacctagtgttttcaagaaaattgagccaccgtctaagaaatcaagaggtttcacattaaaattagaatttctggcctctctcgatcggtcagaatgtgtggcaattctgatctgcattttcagaagaggacaatcaattgaaactaagtaggggtttcttcttttggcaagacttgtactctctcacctggcctgtttcatttatttgtattatctgcctggtccctgaggcgtctgggtctctcctctcccttgcaggtttgggtttgaagctgaggaactacaaagttgatgatttcttttttatctttatgcctgcaattttacctagctaccactaggtggatagtaaatttatacttatgtttccctcaagtgtgtagttattgagtcaaattcatatgcatggtgtattgtgggacatacttagatggaaggagagagcctaagaatcctgaggatgatttctgtgtatgcctcaaaatgagatatttaggctgggcgcggtggctcacacctgtaatcctcgcactttgggaggctaaggtgggtggattgcttgagcccaggagtttgagaccagcctgggcaacatggtgaaacctcatctctacacaaactacaaaaattagctgggcatggtgacacgtgcggctgcttggtaggctgaggtgggaggatcgcttgagcccaggaggtgaaggttgcagtgagccctgattgtgccactgcattccagcctgggcgacagagtgagaccatgtctccaaaacatacatatatataaaatatatttaaagacctcttggagttcaggcagaagtgaagatagcactatgaagtagtttccacattaacaatagcaatgacttgaacgatgtgttccccctttcttctgatattaatatctgttcattttgcaaacattgaaagattatgaaagctatgacccagaatcacaattatataatttggatacatacccaaatggcataatttctgtcataagcctgtaggaaaagcttgaattcttcacttctcagattctcagagccagcttgctcttgggagaggggcctggtataggggctgcccaggttcgtagcctatgctgtcaagcatgtttggagttgcacatctgttcccatgtcattttctctgtctaactgaagtcagaaaattcctcagctggattctggggaaccaggaacccatattcccaaatccaagattgggacctggtttgtctttccatttgggcacatttcattctttccaggaaaacaggccacttccaacctgcacaatgtacaccaaaccacagaaccacagctgggatatggagtcaggagagggaagctggagctcaactctcatggactaaaggatggattctggatgggctccaggggacaccttattggattggtggcttccatcaactcttaaaaacgttaagtggtgaactttcccgtcctgtcaagctgtgaatggggaatgtatacaaagtcactttgacttttctatttgaggcctccacagtaaacatccagagtcatcctatttttgtctttttacctccctttcagaacctgttttcgtaattagactggaaagcaattcatgctaagtttgcaatggctgccacagttgtaagtgtcccctgcattttaacctgcactagagccctaagccacagagaagcagttctgaattggtatctcaaataccatccacctggtgtgggtctgcagggtggagagctttcccagcacccctgaagcaatgcccaatgtcgattaccttctctgagtcctggcaagtcctggcacattggctttctggatcccttagatgctgccctttctgttgtgaggagaggttgccgaagatattggaggtgtctgctggactgtaggatttctgatcccactgctgtgtagtttttttttctagtgctggacaagtaagaagcctctggataaatttggtgttggtggctgatggttgaagtggaagcagtctttggggtaggaggcaatgccactcctctaggcccttcgggagttggctgaagttacttcctcccttggaaggggctggttagtgagtgccagggatctcaggactgtctctgtgccaggtgtggtttcccaggcaacagacacattcctaagtgcctagttctctagcgtctgtatacatggtagtagagccttccttccatgtctctcttccctctggcctggaataggagcattagactcaaattctgatgaaaaagaaattacttggagatagagattcaatgtgaagagaacaagatatttgaagtcagaattaggtttgaatttgggctcagtgacttacagtgtgagcttggtcaagttcttaacattctggtccttagcattctcatctgtatggtcaaggctattgtcattgggttggtatgtcaacaagcaaaacggtatgtgtgagctgcccaattgtgggcctggttctgattagccaatgttaacacccttctctccacagcttcccattctctgatgccgctgacccagatggcgtcacctcagttaccatggcttggtccaagcagtgacttctgttcatgggctctggaattgagtggccaaaaatctggaatccctacagtagggagagtagccttgtccctgccccactacaagtctgttcatatgaagacatacaaagccgtcgcctctaatcagtgttcaaagggtcgattgtgcaactcacattcctccagagaaattcccccagcttgtgagatctccaagagggaacacgtattcctggcatccaacttcccctggtgctccccctgacctgcctcattccaggagttccctctccagagaccctgtgtgcccacacgagcagacttttagaaaatggcctacagttcaaaggccctgcattgctttatggccttggaaatgtggggaaagtgtcagatgaagaatttctatcctcctcacctcctccctgtctccaataaatgcataccaaga

SEQ ID NO: 21857 - DNA, 808 bp, Homo sapiens
  misc_feature 1..808: note = ENST00000395149
  source 1..808: mol_type = unassigned DNA; mol_type = unassigned DNA
tggcggtgacggcggcgcctggcggcggggatttggcgcgggccgggggccgggggccggggcgcgggggcgcgaggctggattcctagggccgcggcgcttcccggcatgctccgctgcaggcccgcgcccgcgcccggactttgccatcggcggggcagtcgcgggatgcgcccgggagccacagcctgaggccctcaggtctctgcaggtgtcgtggaggaacctagcacctgccatcctcttccccaatttgccacttccagcaggtaagacccacctgtcccactctctttcgtggcttcttgaccagatctgctctgacttcatgttctctcaagctttagcccatgaggaggatgtgaccgggactgagtcaggagccctctggaagcatggagactgtggtgattgttgccataggtgtgctggccaccatctttctggcttcgtttgcagccttggtgctggtttgcaggcagcgctactgccggccgcgagacctgctgcagcgctatgattctaagcccattgtggacctcattggtgccatggagacccagtctgagccctctgagttagaactggacgatgtcgttatcaccaacccccacattgaggccattctggagaatgaagactggatcgaagatgcctcgggtctcatgtcccactgcattgccatcttgaagatttgtcacactctgacagagaagcttgttgccatgacaatgggctctggggccaagatgaagacttcagccagtgtcagcgacatcattgtggtggccaagcggatcagccccag

SEQ ID NO: 21858 - DNA, 826 bp, Homo sapiens
  misc_feature 1..826: note = ENST00000261713
  source 1..826: mol_type = unassigned DNA; mol_type = unassigned DNA
ggggatttggcgcgggccgggggccgggggccggggcgcgggggcgcgaggctggattcctagggccgcggcgcttcccggcatgctccgctgcaggcccgcgcccgcgcccggactttgccatcggcggggcagtcgcgggatgcgcccgggagccacagcctgagctttagcccatgaggaggatgtgaccgggactgagtcaggagccctctggaagcatggagactgtggtgattgttgccataggtgtgctggccaccatctttctggcttcgtttgcagccttggtgctggtttgcaggcagcgctactgccggccgcgagacctgctgcagcgctatgattctaagcccattgtggacctcattggtgccatggagacccagtctgagccctctgagttagaactggacgatgtcgttatcaccaacccccacattgaggccattctggagaatgaagactggatcgaagatgcctcgggtctcatgtcccactgcattgccatcttgaagatttgtcacactctgacagagaagcttgttgccatgacaatgggctctggggccaagatgaagacttcagccagtgtcagcgacatcattgtggtggccaagcggatcagccccaggacgactgccctgctcctgtctgtcagtcacctggtgctggtgacaaggaatgcctgccatctgacgggaggcctggactggattgaccagtctctgtcggctgctgaggagcatttggaagtccttcgagaagcagccctagcttctgagccagataaaggcctcccaggccctgaaggcttcctgcagga

SEQ ID NO: 21859 - DNA, 424 bp, Homo sapiens
  misc_feature 1..424: note = ENST00000582227
  source 1..424: mol_type = unassigned DNA; mol_type = unassigned DNA
agtcgcgggatgcgcccgggagccacagcctgagctttagcccatgaggaggatgtgaccgggactgagtcaggagccctctggaagcatggagactgtggtgattgttgccataggtgtgctggccaccatctttctggcttcgtttgcagccttggtgctggtttgcaggcagcgctactgccggccgcgagacctgctgcagcgctatgattctaagcccattgtggacctcattggtgccatggagacccagtctgagccctctgagttagaactggacgatgtcgttatcaccaacccccacattgaggccattctggagaatgaagactggatcgaagatgcctcgggtctcatgtcccactgcattgccatcttgaaggtaaccctctcttatttctctgtgggataaagggtagtc

SEQ ID NO: 21860 - DNA, 806 bp, Homo sapiens
  misc_feature 1..806: note = ENST00000578289
  source 1..806: mol_type = unassigned DNA; mol_type = unassigned DNA
agtcgcgggatgcgcccgggagccacagcctgaggccctcaggtctctgcaggtgtcgtggaggaacctagcacctgccatcctcttccccaatttgccacttccagcagctttagcccatgaggaggatgtgaccgggactgagtcaggagccctctggaagcatggagactgtggtgattgttgccataggtgtgctggccaccatctttctggcttcgtttgcagccttggtgctggtttgcaggcagcgctactgccggccgcgagacctgctgcagcgctatgattctaagcccattgtggacctcattggtgccatggagacccagtctgagccctctgagttagaactggacgatgtcgttatcaccaacccccacattgaggccattctggagaatgaagactggatcgaagatgcctcgggtctcatgtcccactgcattgccatcttgaagatttgtcacactctgacagagaagcttgttgccatgacaatgggctctggggccaagatgaagacttcagccagtgtcagcgacatcattgtggtggccaagcggatcagccccaggtaaggagaccaaagcagaaagatcagtaaccctcctggagtctcacaattaatatgaatcagagcaggatcttcaactcctcaacttgtgtttttaactggcacatcttcctgcctgggtgcagcaggtgggaaatccatcatggaaaggaaagaacagacatgagagtcattccattctcttccagttcaaatctttttttgtgaaaaaaatggtagttgtgaccca

SEQ ID NO: 21861 - DNA, 896 bp, Homo sapiens
  misc_feature 1..896: note = ENST00000439138
  source 1..896: mol_type = unassigned DNA; mol_type = unassigned DNA
gggatgcgcccgggagccacagcctgagggtttaaaaagctattttaaggccgggctcggtgtctcacgcgtgtaatcccagcactttgggaggcccgaggccctcaggtctctgcaggtgtcgtggaggaacctagcacctgccatcctcttccccaatttgccacttccagcagctttagcccatgaggaggatgtgaccgggactgagtcaggagccctctggaagcatggagactgtggtgattgttgccataggtgtgctggccaccatctttctggcttcgtttgcagccttggtgctggtttgcaggcagcgctactgccggccgcgagacctgctgcagcgctatgattctaagcccattgtggacctcattggtgccatggagacccagtctgagccctctgagttagaactggacgatgtcgttatcaccaacccccacattgaggccattctggagaatgaagactggatcgaagatgcctcgggtctcatgtcccactgcattgccatcttgaagatttgtcacactctgacagagaagcttgttgccatgacaatgggctctggggccaagatgaagacttcagccagtgtcagcgacatcattgtggtggccaagcggatcagccccagggtggatgatgttgtgaagtcgatgtaccctccgttggaccccaaactcctggacgcacggacgactgccctgctcctgtctgtcagtcacctggtgctggtgacaaggaatgcctgccatctgacgggaggcctggactggattgaccagtctctgtcggctgctgaggagcatttggaagtccttcgagaagcagccctagcttctgagccagataaaggcctcccaggccctgaaggcttcctgcaggag

SEQ ID NO: 21862 - DNA, 776 bp, Homo sapiens
  misc_feature 1..776: note = ENST00000583437
  source 1..776: mol_type = unassigned DNA; mol_type = unassigned DNA
ctctactaaaaatacaaaaaattagccgggtgtggtgtcaggcacctgtaatcctagctacttgggaggctgaggcaggagaatcgcttgaacccaggaggcagaggttgcagtgagctgagatcgtgccattgcactccagcctgggtgacagagctagactccatcttaaaaaaacaaacaaacacaaacaaacaaacaaaaaattttagtccaactggggagcaaattcttctgagaaaggaaaaggcaaatttggggcatggcataaattttaccttggttctcttcaggccctcaggtctctgcaggtgtcgtggaggaacctagcacctgccatcctcttccccaatttgccacttccagcaggtaagacccacctgtcccactctctttcgtggcttcttgaccagatctgctctgacttcatgttctctcaagctttagcccatgaggaggatgtgaccgggactgagtcaggagccctctggaagcatggagactgtggtgattgttgccataggtgtgctggccaccatctttctggcttcgtttgcagccttggtgctggtttgcaggcagcgctactgccggccgcgagacctgctgcagcgctatgattctaagcccattgtggacctcattggtgccatggagacccagtctgagccctctgagttagaactggacgatgtcgttatcaccaacccccacattgaggccattctggagaatgaagactggatcgaagatgcctcgggtctcatgtcccactg

SEQ ID NO: 21863 - DNA, 504 bp, Homo sapiens
  misc_feature 1..504: note = ENST00000583120
  source 1..504: mol_type = unassigned DNA
ttgccacttccagcagctttagcccatgaggaggatgtgaccgggactgagtcaggagccctctggaagcatggagactgtggtgattgttgccataggtgtgctggccaccatctttctggcttcgtttgcagccttggtgctggtttgcaggcagcgctactgccggccgcgagacctgctgcagcgctatgattctaagcccattgtggacctcattggtgccatggagacccagtctgagccctctgagttagaactggacgatgtcgttatcaccaacccccacattgaggccattctggagaatgaagactggatcgaagatgcctcgggtctcatgtcccactgcattgccatcttgaagatttgtcacactctgacagagaagcttgttgccatgacaatgggctctggggccaagatgaagacttcagccagtgtcagcgacatcattgtggtggccaagcggatcagccccaggtgagcaattggcggcttcga

SEQ ID NO: 21864 - DNA, 3343 bp, Homo sapiens
  misc_feature 1..3343: note = ENST00000259365
  source 1..3343: mol_type = unassigned DNA
agctcccgcccgcccgcggccgcccgggagctcgtccagccccgcgctgcgctcgcccgcccgctgcccgccggagcaccgcggcctccgcccgcgtccatctgcccgccgcccgcgcctgttccgcagcccgcgtccgcgccggccccacagctctgcgtccgggtattactcagcacagaaattcaggagacacagacaagttcttccacgatgtcgtacagacgagaactagagaaataccgtgacctggatgaagatgaaatccttggagccctaacagaggaagagctgaggaccctggaaaatgagctggatgagctggaccctgataatgcactgctgcctgcaggcctgaggcagaaggatcagaccaccaaggcgcccacgggcccctttaaaagagaggagctcttggatcacttggaaaagcaagcaaaggagtttaaggaccgagaagatctggtcccctacacaggggaaaaacgaggaaaggtctgggttcctaagcagaagccactggatcctgtgctggaaagtgtgacgctggaaccggagctggaggaagccttggcaaatgcttcagatgcagaactctgtgacattgcagcgatcctgggcatgcacacgctcatgagtaaccagcagtactaccaggccctgagcagcagctccatcatgaacaaggaggggctcaacagcgtgattaaacccacacaatacaagcctgtgcccgacgaagaaccaaattcaacagacgtagaggaaacgctggaacggataaagaacaacgacccaaaacttgaagaagttaacctcaataatatccggaatatccccatccccaccctcaaggcatatgcagaagccctgaaagaaaactcatatgtgaagaagttcagcatcgtggggacacggagtaatgaccccgtggcgtatgcccttgctgagatgctcaaggagaacaaggtgttgaagacactgaatgtggaatccaacttcatttctggagctgggattctgcgcctggtagaagccctcccatacaacacttctctggtggaaatgaaaattgacaaccagagccagcccctgggcaacaaagtggaaatggagattgtgagcatgttggaaaaaaacgcaacacttctcaaattcggctaccactttacccagcaaggaccccggcttcgggcatccaacgcaatgatgaacaacaatgaccttgtgaggaagaggaggcttgcggacctgactgggcccatcattcccaagtgccggagtggtgtctagtgtgtggcggtggagtccatgcctttgaactggatgtgttctattgatgacctgtgctctgcaggggaaaccagaaggcaaaatgctggcagcatgaaacccttttgtggttcagttctttatgcactaaggttttaggttgactagtggttgtagttgaaaattttataaaataccgttaatgtgaagtttttctttagtcacagaagttgaatctggttattatttaaaaactagaagcccccaaaccagcagatcttactgaagatgatgttccagcagcagcgacttagccccaggagcccagtttcaatggccttgctgtgtggtgtttcaagtgcatttaaaatgtgtgacacagaaacggcacactcttccacatgcttttgaagtattataaaacactttattacaaatttgtcttagctattagcaaataaaactgattatcattctttattaaccctccttggaattttgaaaacctcgattaaagttgccaaattgattactggatccagaacacaattttcccctcagaacagatagacagactgaagccactgaactctgccaggagtcaacatgagattccttttgctggatatgcagaaatgataggaaaaaaaccaatggtgaaatttcaagtttcaaaaaccaacctttcattaccaatcccaggcaacaaacatgtccctgagtgttctttaagaacatttgggatttatgtacaatttaatactggagttagaactttttccttattgaatgccaaccttatgatggatgtgaaaatctacggccaaatacttttgaaaacacctttctatattgcacagtgggcaaatggcttatgtgaggtaagacactagagggataaatttccagatcaacatggctatggtatttagtaatggcccagcttagagacttcagctactgatctcatcacttattagacaaattgctgctgaccttacgcctgtatattaagcctccgcaggatgccggacaatggtgaagaaactccagatatcaaggaattgggaaatcctggccaaaccaccccaagatgattacactgaaatgtagtattagtactgctgccagatctctttttaacatcatgtgcgtctcttgggatccagcaaaagtgttaagccacaatgcccttgtgccttttaatataccacagtgccagttaaactaatatttttgtttgttgcttttgggagttattttcattagtgatttcagcaaatctcatgataaaggacaaggtcaagaactccagagcactgagcagagaggctggtgatgaaaaggtgaaggcctgcgcactgaactgtaaggcagtgggcagtacagggtaactggaggcggggccagggcctcagcgctatggaagagtgtccactgaggctgcacatggcccaggagtggcaccatgttgcagggacaaccatccccatttggcttctccttaaaacacaattgcagctgcattctgcatcgctgaaaactgcaatataatattaaatctgttggtctatgcatggctgcgtatgtgtttcttggaacctgtgtgacagggacatgtgcctggcacactggccagaagactgggcagccaccatggcagtgctggatgacctcagtaagaatgtgtcatgtattccaggtgctgatctaaaaactgtggctcaaatgtcaccgagcttatatgaagctcccagagagaacatttaaaagctcagagagtaagtgctggggaaagcagagctatcagaggaaatctctcatagaaacgaaaccaaaccaacagaaaatgaagaaggccacatctttaaggccacctctgcctctatcagatgagctgctggtctagatcaggggctggcaaacttttctgtaaaaggccagacagtaaaaatttccgattttgcaggccacatagtgtctgttgcaactattcaactctgccatagatcatgtgtaaaggaatgggtgtggctgttcaataaactatacagttgacccttgaacaata

SEQ ID NO: 21865 - DNA, 2516 bp, Homo sapiens
  misc_feature 1..2516: note = ENST00000375175
  source 1..2516: mol_type = unassigned DNA
gtgccaggtcagagctgcaactctgtgctacgtttctgtgtggctttcttgaaactacttctctttatttttgttggcgtggctatttattgttatctgtaacgacgcaatatgctgccgaagtctgggaaggagaggggagctgtaagtctacaccagtgttaactggctaaccttggatgcctgtcatttgatgttggacatttgaaagatggcagcatctctggggaaggagggactgaacacttttgaccacctaccatgtcccaggttctatcgatcctgggcatgcacacgctcatgagtaaccagcagtactaccaggccctgagcagcagctccatcatgaacaaggaggggctcaacagcgtgattaaacccacacaatacaagcctgtgcccgacgaagaaccaaattcaacagacgtagaggaaacgctggaacggataaagaacaacgacccaaaacttgaagaagttaacctcaataatatccggaatatccccatccccaccctcaaggcatatgcagaagccctgaaagaaaactcatatgtgaagaagttcagcatcgtggggacacggagtaatgaccccgtggcgtatgcccttgctgagatgctcaaggagaacaaggtgttgaagacactgaatgtggaatccaacttcatttctggagctgggattctgcgcctggtagaagccctcccatacaacacttctctggtggaaatgaaaattgacaaccagagccagcccctgggcaacaaagtggaaatggagattgtgagcatgttggaaaaaaacgcaacacttctcaaattcggctaccactttacccagcaaggaccccggcttcgggcatccaacgcaatgatgaacaacaatgaccttgtgaggaagaggaggcttgcggacctgactgggcccatcattcccaagtgccggagtggtgtctagtgtgtggcggtggagtccatgcctttgaactggatgtgttctattgatgacctgtgctctgcaggggaaaccagaaggcaaaatgctggcagcatgaaacccttttgtggttcagttctttatgcactaaggttttaggttgactagtggttgtagttgaaaattttataaaataccgttaatgtgaagtttttctttagtcacagaagttgaatctggttattatttaaaaactagaagcccccaaaccagcagatcttactgaagatgatgttccagcagcagcgacttagccccaggagcccagtttcaatggccttgctgtgtggtgtttcaagtgcatttaaaatgtgtgacacagaaacggcacactcttccacatgcttttgaagtattataaaacactttattacaaatttgtcttagctattagcaaataaaactgattatcattctttattaaccctccttggaattttgaaaacctcgattaaagttgccaaattgattactggatccagaacacaattttcccctcagaacagatagacagactgaagccactgaactctgccaggagtcaacatgagattccttttgctggatatgcagaaatgataggaaaaaaaccaatggtgaaatttcaagtttcaaaaaccaacctttcattaccaatcccaggcaacaaacatgtccctgagtgttctttaagaacatttgggatttatgtacaatttaatactggagttagaactttttccttattgaatgccaaccttatgatggatgtgaaaatctacggccaaatacttttgaaaacacctttctatattgcacagtgggcaaatggcttatgtgaggtaagacactagagggataaatttccagatcaacatggctatggtatttagtaatggcccagcttagagacttcagctactgatctcatcacttattagacaaattgctgctgaccttacgcctgtatattaagcctccgcaggatgccggacaatggtgaagaaactccagatatcaaggaattgggaaatcctggccaaaccaccccaagatgattacactgaaatgtagtattagtactgctgccagatctctttttaacatcatgtgcgtctcttgggatccagcaaaagtgttaagccacaatgcccttgtgccttttaatataccacagtgccagttaaactaatatttttgtttgttgcttttgggagttattttcattagtgatttcagcaaatctcatgataaaggacaaggtcaagaactccagagcactgagcagagaggctggtgatgaaaaggtgaaggcctgcgcactgaactgtaaggcagtgggcagtacagggtaactggaggcggggccagggcctcagcgctatggaagagtgtccactgaggctgcacatggcccaggagtggcaccatgttgcagggacaaccatccccatttggcttctccttaaaacacaattgcagctgcattctgcatcgctgaaaactgcaatataatattaaatctgttggtctatgca

SEQ ID NO: 21866 - DNA, 3259 bp, Homo sapiens
  misc_feature 1..3259: note = ENST00000395211
  source 1..3259: mol_type = unassigned DNA
agacaaaacgatcgcggttaaagcttgcggctcagagcccacctggccgcgctgctgggaaacggacggagcggcgcttcaatcagaggtattactcagcacagaaattcaggagacacagacaagttcttccacgatgtcgtacagacgagaactagagaaataccgtgacctggatgaagatgaaatccttggagccctaacagaggaagagctgaggaccctggaaaatgagctggatgagctggaccctgataatgcactgctgcctgcaggcctgaggcagaaggatcagaccaccaaggcgcccacgggcccctttaaaagagaggagctcttggatcacttggaaaagcaagcaaaggagtttaaggaccgagaagatctggtcccctacacaggggaaaaacgaggaaaggtctgggttcctaagcagaagccactggatcctgtgctggaaagtgtgacgctggaaccggagctggaggaagccttggcaaatgcttcagatgcagaactctgtgacattgcagcgatcctgggcatgcacacgctcatgagtaaccagcagtactaccaggccctgagcagcagctccatcatgaacaaggaggggctcaacagcgtgattaaacccacacaatacaagcctgtgcccgacgaagaaccaaattcaacagacgtagaggaaacgctggaacggataaagaacaacgacccaaaacttgaagaagttaacctcaataatatccggaatatccccatccccaccctcaaggcatatgcagaagccctgaaagaaaactcatatgtgaagaagttcagcatcgtggggacacggagtaatgaccccgtggcgtatgcccttgctgagatgctcaaggagaacaaggtgttgaagacactgaatgtggaatccaacttcatttctggagctgggattctgcgcctggtagaagccctcccatacaacacttctctggtggaaatgaaaattgacaaccagagccagcccctgggcaacaaagtggaaatggagattgtgagcatgttggaaaaaaacgcaacacttctcaaattcggctaccactttacccagcaaggaccccggcttcgggcatccaacgcaatgatgaacaacaatgaccttgtgaggaagaggaggcttgcggacctgactgggcccatcattcccaagtgccggagtggtgtctagtgtgtggcggtggagtccatgcctttgaactggatgtgttctattgatgacctgtgctctgcaggggaaaccagaaggcaaaatgctggcagcatgaaacccttttgtggttcagttctttatgcactaaggttttaggttgactagtggttgtagttgaaaattttataaaataccgttaatgtgaagtttttctttagtcacagaagttgaatctggttattatttaaaaactagaagcccccaaaccagcagatcttactgaagatgatgttccagcagcagcgacttagccccaggagcccagtttcaatggccttgctgtgtggtgtttcaagtgcatttaaaatgtgtgacacagaaacggcacactcttccacatgcttttgaagtattataaaacactttattacaaatttgtcttagctattagcaaataaaactgattatcattctttattaaccctccttggaattttgaaaacctcgattaaagttgccaaattgattactggatccagaacacaattttcccctcagaacagatagacagactgaagccactgaactctgccaggagtcaacatgagattccttttgctggatatgcagaaatgataggaaaaaaaccaatggtgaaatttcaagtttcaaaaaccaacctttcattaccaatcccaggcaacaaacatgtccctgagtgttctttaagaacatttgggatttatgtacaatttaatactggagttagaactttttccttattgaatgccaaccttatgatggatgtgaaaatctacggccaaatacttttgaaaacacctttctatattgcacagtgggcaaatggcttatgtgaggtaagacactagagggataaatttccagatcaacatggctatggtatttagtaatggcccagcttagagacttcagctactgatctcatcacttattagacaaattgctgctgaccttacgcctgtatattaagcctccgcaggatgccggacaatggtgaagaaactccagatatcaaggaattgggaaatcctggccaaaccaccccaagatgattacactgaaatgtagtattagtactgctgccagatctctttttaacatcatgtgcgtctcttgggatccagcaaaagtgttaagccacaatgcccttgtgccttttaatataccacagtgccagttaaactaatatttttgtttgttgcttttgggagttattttcattagtgatttcagcaaatctcatgataaaggacaaggtcaagaactccagagcactgagcagagaggctggtgatgaaaaggtgaaggcctgcgcactgaactgtaaggcagtgggcagtacagggtaactggaggcggggccagggcctcagcgctatggaagagtgtccactgaggctgcacatggcccaggagtggcaccatgttgcagggacaaccatccccatttggcttctccttaaaacacaattgcagctgcattctgcatcgctgaaaactgcaatataatattaaatctgttggtctatgcatggctgcgtatgtgtttcttggaacctgtgtgacagggacatgtgcctggcacactggccagaagactgggcagccaccatggcagtgctggatgacctcagtaagaatgtgtcatgtattccaggtgctgatctaaaaactgtggctcaaatgtcaccgagcttatatgaagctcccagagagaacatttaaaagctcagagagtaagtgctggggaaagcagagctatcagaggaaatctctcatagaaacgaaaccaaaccaacagaaaatgaagaaggccacatctttaaggccacctctgcctctatcagatgagctgctggtctagatcaggggctggcaaacttttctgtaaaaggccagacagtaaaaatttccgattttgcaggccacatagtgtctgttgcaactattcaactctgccatagatcatgtgtaaaggaatgggtgtggctgttcaataaactatacagttgacccttg

SEQ ID NO: 21867 - DNA, 1811 bp, Homo sapiens
  misc_feature 1..1811: note = ENST00000536856
  source 1..1811: mol_type = unassigned DNA
ctttaatcaatgctggcctgagaacaggagcggaacattgcctagtagaccctgaggctttacaacagtgccactgacccctatgtgctgtatctgtgtcctgctgcctctcagcccatttccgggaccttgcaggatgaggagataactttgagctgctcagaggccagcgctgaggaagctctgctccctgcacttcccaaaacagtatctttcagaataaacagcgaagacttcttgctggaagcgcaagtgagggatcagccacgctggctcctggtctgccatgagggctggagccccgccctggggctgcagatctgctggagccttgggcatctcagactcactcaccacaagggagtaaacctcactgacatcaaactcaacagttcccaggagtttgctcagctctctcctagactgggaggcttcctggaggaggcgtggcagcccaggaacaactgcacttctggtcaagttgtttccctcagatgctctgagtgtggagcgaggcccctggcttcccggatagttggtgggcagtctgtggctcctgggcgctggccgtggcaggccagcgtggccctgggcttccggcacacgtgtgggggctctgtgctagcgccacgctgggtggtgactgctgcacattgtatgcacagtttcaggctggcccgcctgtccagctggcgggttcatgcggggctggtcagccacagtgccgtcaggccccaccaaggggctctggtggagaggattatcccacaccccctctacagtgcccagaatcatgactacgacgtcgccctcctgaggctccagaccgctctcaacttctcagacactgtgggcgctgtgtgcctgccggccaaggaacagcattttccgaagggctcgcggtgctgggtgtctggctggggccacacccaccctagccatacttacagctcggatatgctccaggacacggtggtgcccttgttcagcactcagctctgcaacagctcttgcgtgtacagcggagccctcaccccccgcatgctttgcgctggctacctggacggaagggctgatgcatgccaggactccctcctctgagtcctgctgtttcctccagtctcactgcacaccactgcctcatgcttcctggggcctccagcagctccactaatggaggagaggcagtagcctccgacacagaacgcatggacctcctactactgtgtgtgaggaacagtcactacccactggccagccacccagccaacaggtctctcctcttgggccctgatttcagagtcctctttctcactagagactcaatgacagaagagaggctgggacttggttgggcatgctgtggttgctgagggatgagggggaggagagaggtaggagctggagatgaagaggctgctagaagcagcaggaagcctgcccttctgccctctcccctccctgcccctgtgtgagtcttttgggagggtgctgggaggtgccccccgtcccacctttttcctgtgctctaggtgggctaagtgcctccctagaggactccatggctgagaggctcctgggcagatggggtcaaggctgggccagcccagatgaagcctatgggagtcaggaccctctccactctccctctccactccccttcctgttctcacctggctgtggctggccctgtgtggggtgggtacactggaaaacaagaaggttggagttggtctaggacattggttttaaatgacagttctgtgaactggtccaaggagttctgttattaaagtgatatatggtcttgg

SEQ ID NO: 21868 - DNA, 2001 bp, Homo sapiens
  misc_feature 1..2001: note = ENST00000540540
  source 1..2001: mol_type = unassigned DNA
gggagacctcatcttccaaccaagcttgctgggctagctttaatcaatgctggcctgagaacaggagcggaacattgcctagtagaccctgaggctttacaacagtgccactgacccctatgtgctgtatctgtgtcctgctgcctctcagcccatttccgggaccttgcaggatgaggagataactttgagctgctcagaggccagcgctgaggaagctctgctccctgcacttcccaaaacagtatctttcagaataaacagcgaagacttcttgctggaagcgcaagtgagggatcagccacgctggctcctggtctgccatgagggctggagccccgccctggggctgcagatctgctggagccttgggcatctcagactcactcaccacaagggagtaaacctcactgacatcaaactcaacagttcccaggagtttgctcagctctctcctagactgggaggcttcctggaggaggcgtggcagcccaggaacaactgcacttctggtcaagttgtttccctcagatgctctgagtgtggagcgaggcccctggcttcccggatagttggtgggcagtctgtggctcctgggcgctggccgtggcaggccagcgtggccctgggcttccggcacacgtgtgggggctctgtgctagcgccacgctgggtggtgactgctgcacattgtatgcacagtttcaggctggcccgcctgtccagctggcgggttcatgcggggctggtcagccacagtgccgtcaggccccaccaaggggctctggtggagaggattatcccacaccccctctacagtgcccagaatcatgactacgacgtcgccctcctgaggctccagaccgctctcaacttctcagacactgtgggcgctgtgtgcctgccggccaaggaacagcattttccgaagggctcgcggtgctgggtgtctggctggggccacacccaccctagccatacttacagctcggatatgctccaggacacggtggtgcccttgttcagcactcagctctgcaacagctcttgcgtgtacagcggagccctcaccccccgcatgctttgcgctggctacctggacggaagggctgatgcatgccagggagatagcgggggccccctagtgtgcccagatggggacacatggcgcctagtgggggtggtcagctgggggcgtggctgcgcagagcccaatcacccaggtgtctacgccaaggtagctgagtttctggactggatccatgacactgctcaggactccctcctctgagtcctgctgtttcctccagtctcactgcacaccactgcctcatgcttcctggggcctccagcagctccactaatggaggagaggcagtagcctccgacacagaacgcatggacctcctactactgtgtgtgaggaacagtcactacccactggccagccacccagccaacaggtctctcctcttgggccctgatttcagagtcctctttctcactagagactcaatgacagaagagaggctgggacttggttgggcatgctgtggttgctgagggatgagggggaggagagaggtaggagctggagatgaagaggctgctagaagcagcaggaagcctgcccttctgccctctcccctccctgcccctgtgtgagtcttttgggagggtgctgggaggtgccccccgtcccacctttttcctgtgctctaggtgggctaagtgcctccctagaggactccatggctgagaggctcctgggcagatggggtcaaggctgggccagcccagatgaagcctatgggagtcaggaccctctccactctccctctccactccccttcctgttctcacctggctgtggctggccctgtgtggggtgggtacactggaaaacaagaaggttggagttggtctaggacattggttttaaatgacagttctgtgaactggtccaaggagttctgttattaaagtgatatatggtcttgg

SEQ ID NO: 21869 - DNA, 2232 bp, Homo sapiens
  misc_feature 1..2232: note = ENST00000299882
  source 1..2232: mol_type = unassigned DNA
gggatacagggaggggccatgtgcgaaccagggagacctcatcttccaaccaagcttgctgggctagctttaatcaatgctggcctgagaacaggagcggaacattgcctagtagaccctgaggctttacaacagtgccactgacccctatgagcctgatgctggatgaccaaccccctatggaggcccagtatgcagaggagggcccaggacctgggatcttcagagcagagcctggagaccagcagcatcccatttctcaggcagtgtgctggcgttccatgcgacgtggctgtgcagtgctgggagccctggggctgctggccggtgcaggtgttggctcatggctcctagtgctgtatctgtgtcctgctgcctctcagcccatttccgggaccttgcaggatgaggagataactttgagctgctcagaggccagcgctgaggaagctctgctccctgcacttcccaaaacagtatctttcagaataaacagcgaagacttcttgctggaagcgcaagtgagggatcagccacgctggctcctggtctgccatgagggctggagccccgccctggggctgcagatctgctggagccttgggcatctcagactcactcaccacaagggagtaaacctcactgacatcaaactcaacagttcccaggagtttgctcagctctctcctagactgggaggcttcctggaggaggcgtggcagcccaggaacaactgcacttctggtcaagttgtttccctcagatgctctgagtgtggagcgaggcccctggcttcccggatagttggtgggcagtctgtggctcctgggcgctggccgtggcaggccagcgtggccctgggcttccggcacacgtgtgggggctctgtgctagcgccacgctgggtggtgactgctgcacattgtatgcacagtttcaggctggcccgcctgtccagctggcgggttcatgcggggctggtcagccacagtgccgtcaggccccaccaaggggctctggtggagaggattatcccacaccccctctacagtgcccagaatcatgactacgacgtcgccctcctgaggctccagaccgctctcaacttctcagacactgtgggcgctgtgtgcctgccggccaaggaacagcattttccgaagggctcgcggtgctgggtgtctggctggggccacacccaccctagccatacttacagctcggatatgctccaggacacggtggtgcccttgttcagcactcagctctgcaacagctcttgcgtgtacagcggagccctcaccccccgcatgctttgcgctggctacctggacggaagggctgatgcatgccagggagatagcgggggccccctagtgtgcccagatggggacacatggcgcctagtgggggtggtcagctgggggcgtggctgcgcagagcccaatcacccaggtgtctacgccaaggtagctgagtttctggactggatccatgacactgctcaggactccctcctctgagtcctgctgtttcctccagtctcactgcacaccactgcctcatgcttcctggggcctccagcagctccactaatggaggagaggcagtagcctccgacacagaacgcatggacctcctactactgtgtgtgaggaacagtcactacccactggccagccacccagccaacaggtctctcctcttgggccctgatttcagagtcctctttctcactagagactcaatgacagaagagaggctgggacttggttgggcatgctgtggttgctgagggatgagggggaggagagaggtaggagctggagatgaagaggctgctagaagcagcaggaagcctgcccttctgccctctcccctccctgcccctgtgtgagtcttttgggagggtgctgggaggtgccccccgtcccacctttttcctgtgctctaggtgggctaagtgcctccctagaggactccatggctgagaggctcctgggcagatggggtcaaggctgggccagcccagatgaagcctatgggagtcaggaccctctccactctccctctccactccccttcctgttctcacctggctgtggctggccctgtgtggggtgggtacactggaaaacaagaaggttggagttggtctaggacattggttttaaatgacagttctgtgaactggtccaaggagttctgttattaaagtgatatatggtcttg

SEQ ID NO: 21870 - DNA, 2163 bp, Homo sapiens
  misc_feature 1..2163: note = ENST00000545579
  source 1..2163: mol_type = unassigned DNA
ccagggagacctcatcttccaaccaagcttgctgggctagctttaatcaatgctggcctgagaacaggagcggaacattgcctagtagaccctgaggctttacaacagtgccactgacccctatgagcctgatgctggatgaccaaccccctatggaggcccagtatgcagaggagggcccaggacctgggatcttcagagcagagcctggagaccagcagcatcccagtaggccagactgggccataggggaatgacagggtggggacagtggagggcaatcatcctacattccccggatcctccttggggtcagccccacatgattgatgtttctcaggcagtgtgctggcgttccatgcgacgtggctgtgcagtgctgggagccctggggctgctggccggtgcaggtgttggctcatggctcctagtgctgtatctgtgtcctgctgcctctcagcccatttccgggaccttgcaggatgaggagataactttgagctgctcagaggccagcgctgaggaagctctgctccctgcacttcccaaaacagtatctttcagaataaacagcgaagacttcttgctggaagcgcaagtgagggatcagccacgctggctcctggtctgccatgagggctggagccccgccctggggctgcagatctgctggagccttgggcatctcagactcactcaccacaagggagtaaacctcactgacatcaaactcaacagttcccaggagtttgctcagctctctcctagactgggaggcttcctggaggaggcgtggcagcccaggaacaactgcacttctggtcaagttgtttccctcagatgctctgagtgtggagcgaggcccctggcttcccggatagttggtgggcagtctgtggctcctgggcgctggccgtggcaggccagcgtggccctgggcttccggcacacgtgtgggggctctgtgctagcgccacgctgggtggtgactgctgcacattgtatgcacagtttcaggctggcccgcctgtccagctggcgggttcatgcggggctggtcagccacagtgccgtcaggccccaccaaggggctctggtggagaggattatcccacaccccctctacagtgcccagaatcatgactacgacgtcgccctcctgaggctccagaccgctctcaacttctcagacactgtgggcgctgtgtgcctgccggccaaggaacagcattttccgaagggctcgcggtgctgggtgtctggctggggccacacccaccctagccatacttacagctcggatatgctccaggacacggtggtgcccttgttcagcactcagctctgcaacagctcttgcgtgtacagcggagccctcaccccccgcatgctttgcgctggctacctggacggaagggctgatgcatgccagggagatagcgggggccccctagtgtgcccagatggggacacatggcgcctagtgggggtggtcagctgggggcgtggctgcgcagagcccaatcacccaggtgtctacgccaaggtagctgagtttctggactggatccatgacactgctcaggactccctcctctgagtcctgctgtttcctccagtctcactgcacaccactgcctcatgcttcctggggcctccagcagctccactaatggaggagaggcagtagcctccgacacagaacgcatggacctcctactactgtgtgtgaggaacagtcactacccactggccagccacccagccaacaggtctctcctcttgggccctgatttcagagtcctctttctcactagagactcaatgacagaagagaggctgggacttggttgggcatgctgtggttgctgagggatgagggggaggagagaggtaggagctggagatgaagaggctgctagaagcagcaggaagcctgcccttctgccctctcccctccctgcccctgtgtgagtcttttgggagggtgctgggaggtgccccccgtcccacctttttcctgtgctctaggtgggctaagtgcctccctagaggactccatggctgagaggctcctgggcagatggggtcaaggctgggccagcccagatgaagcctatgggagtcaggaccctctccactctccctctccactccccttcc

SEQ ID NO: 21871 - DNA, 1956 bp, Homo sapiens
  misc_feature 1..1956: note = ENST00000538955
  source 1..1956: mol_type = unassigned DNA
ccagggagacctcatcttccaaccaagcttgctgggctagctttaatcaatgctggcctgagaacaggagcggaacattgcctagtagaccctgaggctttacaacagtgccactgacccctatgtttctcaggcagtgtgctggcgttccatgcgacgtggctgtgcagtgctgggagccctggggctgctggccggtgcaggtgttggctcatggctcctagtgctgtatctgtgtcctgctgcctctcagcccatttccgggaccttgcaggatgaggagataactttgagctgctcagaggccagcgctgaggaagctctgctccctgcacttcccaaaacagtatctttcagaataaacagcgaagacttcttgctggaagcgcaagtgagggatcagccacgctggctcctggtctgccatgagggctggagccccgccctggggctgcagatctgctggagccttgggcatctcagactcactcaccacaagggagtaaacctcactgacatcaaactcaacagttcccaggagtttgctcagctctctcctagactgggaggcttcctggaggaggcgtggcagcccaggaacaactgcacttctggtcaagttgtttccctcagatgctctgagtgtggagcgaggcccctggcttcccggatagttggtgggcagtctgtggctcctgggcgctggccgtggcaggccagcgtggccctgggcttccggcacacgtgtgggggctctgtgctagcgccacgctgggtggtgactgctgcacattgtatgcacagtttcaggctggcccgcctgtccagctggcgggttcatgcggggctggtcagccacagtgccgtcaggccccaccaaggggctctggtggagaggattatcccacaccccctctacagtgcccagaatcatgactacgacgtcgccctcctgaggctccagaccgctctcaacttctcagacactgtgggcgctgtgtgcctgccggccaaggaacagcattttccgaagggctcgcggtgctgggtgtctggctggggccacacccaccctagccatacttacagctcggatatgctccaggacacggtggtgcccttgttcagcactcagctctgcaacagctcttgcgtgtacagcggagccctcaccccccgcatgctttgcgctggctacctggacggaagggctgatgcatgccagggagatagcgggggccccctagtgtgcccagatggggacacatggcgcctagtgggggtggtcagctgggggcgtggctgcgcagagcccaatcacccaggtgtctacgccaaggtagctgagtttctggactggatccatgacactgctcaggactccctcctctgagtcctgctgtttcctccagtctcactgcacaccactgcctcatgcttcctggggcctccagcagctccactaatggaggagaggcagtagcctccgacacagaacgcatggacctcctactactgtgtgtgaggaacagtcactacccactggccagccacccagccaacaggtctctcctcttgggccctgatttcagagtcctctttctcactagagactcaatgacagaagagaggctgggacttggttgggcatgctgtggttgctgagggatgagggggaggagagaggtaggagctggagatgaagaggctgctagaagcagcaggaagcctgcccttctgccctctcccctccctgcccctgtgtgagtcttttgggagggtgctgggaggtgccccccgtcccacctttttcctgtgctctaggtgggctaagtgcctccctagaggactccatggctgagaggctcctgggcagatggggtcaaggctgggccagcccagatgaagcctatgggagtcaggaccctctccactctccctctccactccccttcc

SEQ ID NO: 21872 - DNA, 1524 bp, Homo sapiens
  misc_feature 1..1524: note = ENST00000544634
  source 1..1524: mol_type = unassigned DNA
aatcaatgctggcctgagaacaggagcggaacattgcctagtagaccctgaggctttacaacagtgccactgacccctatgagcctgatgctggatgaccaaccccctatggaggcccagtatgcagaggagggcccaggacctgggatcttcagagcagagcctggagaccagcagcatcccatttctcaggcagtgtgctggcgttccatgcgacgtggctgtgcagtgctgggagccctggggctgctggccggtgcaggtgttggctcatggctcctagtgctgtatctgtgtcctgctgcctctcagcccatttccgggaccttgcaggatgaggagataactttgagctgctcagaggccagcgctgaggaagctctgctccctgcacttcccaaaacagtatctttcagaataaacagcgaagacttcttgctggaagcgcaagtgagggatcagccacgctggctcctggtctgccatgagggctggagccccgccctggggctgcagatctgctggagccttgggcatctcagactcactcaccacaagggagtaaacctcactgacatcaaactcaacagttcccaggagtttgctcagctctctcctagactgggaggcttcctggaggaggcgtggcagcccagtttcaggctggcccgcctgtccagctggcgggttcatgcggggctggtcagccacagtgccgtcaggccccaccaaggggctctggtggagaggattatcccacaccccctctacagtgcccagaatcatgactacgacgtcgccctcctgaggctccagaccgctctcaacttctcagacactgtgggcgctgtgtgcctgccggccaaggaacagcattttccgaagggctcgcggtgctgggtgtctggctggggccacacccaccctagccatacttacagctcggatatgctccaggacacggtggtgcccttgttcagcactcagctctgcaacagctcttgcgtgtacagcggagccctcaccccccgcatgctttgcgctggctacctggacggaagggctgatgcatgccagggagatagcgggggccccctagtgtgcccagatggggacacatggcgcctagtgggggtggtcagctgggggcgtggctgcgcagagcccaatcacccaggtgtctacgccaaggtagctgagtttctggactggatccatgacactgctcaggactccctcctctgagtcctgctgtttcctccagtctcactgcacaccactgcctcatgcttcctggggcctccagcagctccactaatggaggagaggcagtagcctccgacacagaacgcatggacctcctactactgtgtgtgaggaacagtcactacccactggccagccacccagccaacaggtctctcctcttgggccctgatttcagagtcctctttctcactagagactcaatgacagaagagaggctgggacttggttgggcatgctgtggttgctgagggatga

SEQ ID NO: 21873 - DNA, 1320 bp, Homo sapiens
  misc_feature 1..1320: note = ENST00000544476
  source 1..1320: mol_type = unassigned DNA
agctttaatcaatgctggcctgagaacaggagcggaacattgcctagtagaccctgaggctttacaacagtgccactgacccctatgtttctcaggcagtgtgctggcgttccatgcgacgtggctgtgcagtgctgggagccctggggctgctggccggtgcaggtgttggctcatggctcctagtgctgtatctgtgtcctgctgcctctcagcccatttccgggaccttgcaggatgaggagataactttgagctgctcagaggccagcgctgaggaagctctgctccctgcacttcccaaaacagtatctttcagaataaacagcgaagacttcttgctggaagcgcaagtgagggatcagccacgctggctcctggtctgccatgagggctggagccccgccctggggctgcagatctgctggagccttgggcatctcagactcactcaccacaagggagtaaacctcactgacatcaaactcaacagttcccaggagtttgctcagctctctcctagactgggaggcttcctggaggaggcgtggcagcccagtttcaggctggcccgcctgtccagctggcgggttcatgcggggctggtcagccacagtgccgtcaggccccaccaaggggctctggtggagaggattatcccacaccccctctacagtgcccagaatcatgactacgacgtcgccctcctgaggctccagaccgctctcaacttctcagacactgtgggcgctgtgtgcctgccggccaaggaacagcattttccgaagggctcgcggtgctgggtgtctggctggggccacacccaccctagccatacttacagctcggatatgctccaggacacggtggtgcccttgttcagcactcagctctgcaacagctcttgcgtgtacagcggagccctcaccccccgcatgctttgcgctggctacctggacggaagggctgatgcatgccagggagatagcgggggccccctagtgtgcccagatggggacacatggcgcctagtgggggtggtcagctgggggcgtggctgcgcagagcccaatcacccaggtgtctacgccaaggtagctgagtttctggactggatccatgacactgctcaggactccctcctctgagtcctgctgtttcctccagtctcactgcacaccactgcctcatgcttcctggggcctccagcagctccactaatggaggagaggcagtagcctccgacacagaacgcatggacctcctactactgtgtgtgaggaacagtcactacccactggccagccacccagccaacag

SEQ ID NO: 21874 - DNA, 556 bp, Homo sapiens
  misc_feature 1..556: note = ENST00000545265
  source 1..556: mol_type = unassigned DNA
atgacttggaggaatgaatgaatgatgagtgaatgagctctttgatcttctcttggtgccggacagggcagagagtgtaatccccattttaccgaggctgagagggagaagtgcctctcccatgatcacacacatttcaggctggcccgcctgtccagctggcgggttcatgcggggctggtcagccacagtgccgtcaggccccaccaaggggctctggtggagaggattatcccacaccccctctacagtgcccagaatcatgactacgacgtcgccctcctgaggctccagaccgctctcaacttctcagacactgtgggcgctgtgtgcctgccggccaaggaacagcattttccgaagggctcgcggtgctgggtgtctggctggggccacacccaccctagccatacttacagctcggatatgctccaggacacggtggtgcccttgttcagcactcagctctgcaacagctcttgcgtgtacagcggagccctcaccccccgcatgctttgcgctggctacctggacggaagggctgatgcatgccagg

SEQ ID NO: 21875 - DNA, 280 bp, Homo sapiens
  misc_feature 1..280: note = ENST00000545412
  source 1..280: mol_type = unassigned DNA
tgtcctgtatcaaatgttcgtgtccaactgtctccagctttttgctccaaaaggtttcaggctggcccgcctgtccagctggcgggttcatgcggggctggtcagccacagtgccgtcaggccccaccaaggggctctggtggagaggattatcccacaccccctctacagtgcccagaatcatgactacgacgtcgccctcctgaggctccagaccgctctcaacttctcaggctctgcagtgggggaagccaagcctgactggggaccaggaccatgt

SEQ ID NO: 21876 - DNA, 581 bp, Homo sapiens
  misc_feature 1..581: note = ENST00000539732
  source 1..581: mol_type = unassigned DNA
aatcaatgctggcctgagaacaggagcggaacattgcctagtagaccctgaggctttacaacagtgccactgacccctatgtatctttcagaataaacagcgaagacttcttgctggaagcgcaagtgagggatcagccacgctggctcctggtctgccatgagggctggagccccgccctggggctgcagatctgctggagccttgggcatctcagactcactcaccacaagggagtaaacctcactgacatcaaactcaacagttcccaggagtttgctcagctctctcctagactgggaggcttcctggaggaggcgtggcagcccaggaacaactgcacttctggtcaagttgtttccctcagatgctctgagtgtggagcgaggcccctggcttcccggatagttggtgggcagtctgtggctcctgggcgctggccgtggcaggccagcgtggccctgggcttccggcacacgtgtgggggctctgtgctagcgccacgctgggtggtgactgctgcacattgtatgcacagtttcaggctggcccgcctgtccagctggcgggttcatgcgggg

SEQ ID NO: 21877 - DNA, 584 bp, Homo sapiens
  misc_feature 1..584: note = ENST00000538770
  source 1..584: mol_type = unassigned DNA
aatcaatgctggcctgagaacaggagcggaacattgcctagtagaccctgaggctttacaacagtgccactgacccctatgtatctttcagaataaacagcgaagacttcttgctggaagcgcaagtgagggatcagccacgctggctcctggtctgccatgagggctggagccccgccctggggctgcagatctgctggagccttgggcatctcagactcactcaccacaagggagtaaacctcactgacatcaaactcaacagttcccaggagtttgctcagctctctcctagactgggaggcttcctggaggaggcgtggcagcccaggtaggactactgaggctgttaggaacaactgcacttctggtcaagttgtttccctcagatgctctgagtgtggagcgaggcccctggcttcccggatagttggtgggcagtctgtggctcctgggcgctggccgtggcaggccagcgtggccctgggcttccggcacacgtgtgggggctctgtgctagcgccacgctgggtggtgactgctgcacattgtatgcacagtttcaggctggcccgcctgtccag

SEQ ID NO: 21878 - DNA, 583 bp, Homo sapiens
  misc_feature 1..583: note = ENST00000538091
  source 1..583: mol_type = unassigned DNA
agctttaatcaatgctggcctgagaacaggagcggaacattgcctagtagaccctgaggctttacaacagtgccactgacccctatgagcctgatgctggatgaccaaccccctatggaggcccagtatgcagaggagggcccaggacctgggatcttcagagcagagcctggagaccagcagcatcccagtaggccagactgggccataggggaatgacagggtggggacagtggagggcaatcatcctacattccccggatcctccttggggtcagccccacatgattgatgtttctcaggcagtgtgctggcgttccatgcgacgtggctgtgcagtgctgggagccctggggctgctggccggtgcaggtgttggctcatggctcctagtgctgtatctgtgtcctgctgcctctcagcccatttccgggaccttgcaggatgaggagataactttgagctgctcagaggccagcgctgaggaagctctgctccctgcacttcccaaaacaggtgggctgcacccctaaggctacgggcctccctccccagcagggacctgtcacagctgagggcaaga

SEQ ID NO: 21879 - DNA, 8805 bp, Homo sapiens
  misc_feature 1..8805: note = ENST00000256062
  source 1..8805: mol_type = unassigned DNA
agatagaaaaagtagtttgcttggcatctcccaaattatcttgagcaaacaataaaataagaaatgtttcagaagacaattcggctcccaggcccaaaccaaaactcgaacctggtactttttgtaagtgcgggccaagaaaggggctgtaaagttaaagagccggtggcgcctctgaacacacccgggcagggcgagcaggatgtccttgtccagggagaccccttctcctggctttgaggaaggtgctccctatccccgcgggttcctccgccaagcgggacgccgcgccgggcgggtgagagaaagcccgggcaggagagcacagagccggcgactggacgcgagcgcggggcgggtggagagcgtctctccgggcgccgctgctgttgtcccgggtgctgaaaagccgggaacttcccgggaagcagcggcacttttctccctggaaggctaaacatatttttgactggtatgaacccattctactttcatgcagtaaatataattttacactgcttagtgactcttgtgctgatgtacacctgtgataaaactgtcttcaagaatcgtggacttgcttttgtaacggcattgctttttgctgtacatcctattcatactgaggcggtggctgggatcgttggcagagcggacgtgttagcgtgtctgctgtttctattggcctttctctcgtacaacaggagtctggatcagggctgtgttgggggaagtttcccttccacggtgtctcccttcttcttgctgctcagtttgtttctggggacctgtgcgatgctggtgaaagagacaggcatcacggtgtttggagtgtgcttggtttatgacctcttttccctttccaacaagcaagacaagtcgagcaatggggccctctgtccacgcagcccacagcagcccgggagcccccagccctcctcactgccaggccatcctcaccgggagaatgggaagcagcagcggttccctcacaaaggagcttggggtggctgccactctccactgccaccagaacccaagagcagtggattcccagtgtccccacgagctgtgtggtccatgatgagattcctcacctattcctacctcttggccttcaatgtgtggcttctgcttgcacccgtgaccctgtgctatgactggcaggtcggcagtattcctctggtagagaccatatgggacatgcggaacttagccaccatctttctggcggttgtgatggccttattgagcctgcactgcttagcagcctttaagagactggagcacaaggaggttttagtcggcttgttgttcctggtgttcccgttcattccagccagcaacctcttcttcagggtgggttttgtggtggcggagagagtcctttacatgcctagcatgggctactgcatcctttttgtgcatggactgagcaagctctgcacttggctgaatcgatgtggggccaccaccctgattgtgtccactgtgttgctgctgttgcttttctcttggaaaactgtgaaacagaatgaaatttggctgtcaagagagtccctattcaggtctggagttcaaactctgccccacaatgccaaggttcactacaactatgccaatttcctgaaggaccaaggtcggaacaaggaagcgatctaccactacagaacagctctcaagttgtatccacgccatgcaagtgcgctcaacaaccttggaacactgacgagagacacagcagaggcaaagatgtactatcagagggctctccagctccatccacagcataaccgggctcttttcaatctggggaatctcctcaagtcccaggagaaaaaggaagaagctatcaccttactgaaggattccatcaaatatggtccagagtttgcagatgcatattcaagcttagcttcgttattggctgagcaggagcggtttaaagaagctgaagaaatataccaaactggaataaagaactgtccagacagctcagatttacacaacaactatggggttttcttagttgatactggcttaccagaaaaggcagtggcccattaccagcaggccatcaaacttagccccagtcatcacgtggccatggtgaacttgggaagactctacaggtcactgggagagaacagcatggctgaagaatggtacaagcgcgccctgcaggtggcacacaaagctgagatattgtcacctttgggagcactgtattacaacactggccgatacgaagaggctttgcagatttaccaggaagctgcagcacttcagccttctcagagggagctccgcttggcactggctcaggttttggccgtgatgggtcagacaaaagaagctgaaaagatgaccaatcacattgtgtcagaggagaccggatgccttgaatgctatcgcctcttgtcagccatctatagcaagcaggagaaccacgacaaggcacttgatgctatagacaaggctctccagctgaaaccaaaggacccaaaagtcatttctgaactttttttcacaaaaggaaaccaattaagagagcagaaccttctcgacaaagcttttgagagctatagagtggctgtgcaactaaacccagaccaagcacaggcctggatgaacatgggtggcatccaacacatcaagggaaaatatgtgtctgcaagagcttattatgagagagccttacagctggttccagacagcaaactgctgaaggaaaatcttgccaaattggatcgcctagaaaaacgattacaagaagttcgagaaaaggatcaaacatagcaccaccgtctgacccaacctcataggataatgtggtgcctctgaaaggggagtgatggaagccttgctttcacatcagcaggggcacaactaatgagattttctctcattccgagttcagggtgacacattttgggacatctgctggtagcccagtgctgaaggacttgcttttccatgaagaagacgaaaacagcaaacaagggcaagaaggtctgagagggaaggagaatgacatttacacattttacagatttttgtttggtttaactccagatttctcttgatatatctctgtgcttttgagacctggagatctaattctgtttagacattttttgtcccagaaatacagaagcttgaaatgctatgaaggcagagcttctattctttatgggatgaaatatttcaaaagaggataaatcctctgtggtaagccatttggaaaatcctaccaagaattggcttatttaattttccagaaccaggaatgagtatctaatagcttttgtagaaccttccagaatatgtggggaaaaagggctattgctaagtgagctttatctaatatcctcctaagagttttactagtgcttttttgaggaattacagggaagctcctggaattgtacatggatatctttatccctagggggaaatcaaggagctgggcacccctaattctttatggaagtgtttaaaactattttaattttattacaagtattactagagtggtggttctactctaagatttcaaaagtgcatttaaaatcatacatgttcccgcctgcaaatatattgttattttggtggagaaaaaaatagtatattctacataaaaaattaaagatattaactaagagaaatgtcctactttattatcttaatgttcagacatcatgagatttattatttttttgaaaaatatattgaaccattgaggaacctttatgatgtatcacagaaatcttcatagattctaactagatggaaaaagagctctatttatttgtgttcctaggcttaatgagaattctgggcttagaacatcaacgattaatacccagaattctttgttttgagaatattatggagaatgctctaaaaatctagggtaaagatctaaattcaaattttaaatatatatttatatttaagaaataggaaaggcaaagttgaactcacaatttgacatttatttttagtgttatttatttcataacttataaaatatttaatatatacatacacactcttcttttttctctgtacaaagtggttttaatatcagctttcaaaactgatcttataaaatgtaaatctaaattgtaaaatagttaagttttaacagtccctcccaaactttgtgttgattattcacttgctaaagagatgtgaggaatcagccttcagttttttggcagtagtatattttggaagtgaagaaattggaacacctgtttctaatttggtcttcatcattagagacaaaaccaaaacactccaggcagtactgtttatagtgctgagccaggtagcacacagacatagtagcctaaaggctcacataattcgcatgctcaggccagggcagggtaaaaatagccttctgcttctttcaacccagtatcaggaagcactaccccagtgttattatttgttttgtcaaggtaagtctaaataaacaagaaaaacttcttcggaaggcatggcgaagggagtattttaaatgaaaatgattacagaatttgaattagcatgcatctctttgtgtgcaacagtaatccaagaatgtatatgttaccactacaaccatttgtttctaatagttttttcatgttatataacataaatgtatccacaaccttaattaagaactattcttcccccaaaatcatagtcctagtgtcaagaaacatactccagtgtttattgtaaaataacaaccacaccctcaaattgaaaaaagtgaatgtctaggactttattacaacttttcagaataatctgtaatgaaaactcatgcttaaaaatttaatggaaaagactgagccccaaattttgaatagtgattacgccttacttgaagtgctaataaaggtaggagagtacatttgttggaataacagaaatggtgatttcagcctaaaagtttctgagggtaaaggatcacatgaccttcaggaaactctctgcctcctgtaggtgctttcctatctcccccatccttccctaccccttttcccttttccttcctctctttttctctcactgtcactctgtctacacacactggcatcttttgaacactaaaagtaagcactgttttttaaaaaagtaattatttgttggatcagatacttttatcccaagtgaataccttcactgagatgtggccaatgcaatagtttcacagtaaaaacagtgcctataagaaaatagatcacatactatttttcaatgatattaagtgtattttgtaactattttcatttggtccttgtaacatgaaataatacatggaacttacctttataataaaaatggagtgccctggttcatcatagaggtgcatctagtttgcccttaatggaagtatacttgctgtgtggattgatagcaccttcttgaaatggaggagctcagctggcctcatggatgtgcaatttttgcagtcccacagggccttgcatacagaagcaccccgagctcagttgaatgtctgtttgattttttcttatttatttttttgagacacagttccactttgtctttttgtcacccaggatggagttcagtggcacaaacatggctcactgtagcctcgacctccctggctgaagggatcctcccacctcagcctcccaagtaaccgagactacaggcatatgccagcatgtccagctaatttttgtattttttgtagagacagggtttcaccatgttgcccaggctggtctcaaactcctgggctcaagcgatctgcccacctctgcctcccaaagtgctgggattaaaggcataagccaccatgtccaactgaaattcttaataattaataatttttgagcaagaggtccacactttcattttgcactgggttcccaaacaggtcctgggtaggaaggatggctgaggataaaacaggagttgctttggcctggctgaacatttgaaccaatgatcagagtttcattttatgattgtgttactctgaacagatttgctatttttttccagctacatttagagttcctcatgtatatatcacccctctttttccagtccatctaacctctccttttttttgtgcctagaatcagttctccttgccttcaaaatccctgataagtgtccatttctttttgtatcctttgatgtagaagccacaagaatggctttagcagcttattttaatcttatgaattattcattcaggattttttaaatgattcagatgctttcaatctgttaacagtatttataaaacatgtttcagtgatacaacataggtgaactaaaccaaagatgcaaatgccttggaggaaaagaaattgtattatagagaatcctgagatatatccttttgggttgtttaatttaaagcctatcacaaaacaaagagaattgtcgcactttaattccaacctcctgcagtacttcacaacccttagcataagattctgaaatttgtaataggtggtacctagtttgatgcagggttttgcagcagttgtgcgaatgcctctgcgcaacggcctttcagtcagactaaatgagaaaatccaaactgtcctatcaaaactgacccacaataactgtactctgaggcgaaacagagcaaatgtgggtttcctgttttcattgtaaaacattccaggttctcagattgaagagctacattcagctgatagttgacatctgttccctcacacgtagtggctctcaacacgggctgcactttggaatcacctgaggacctttcggaatcttcggttgaatcatcctggctgtcctggtgatgcttcttatgtgcagctaggctggagaaccactacagggctgacacctggaatgggagcttgtaacttttacaaaataatagatgtttatcatcttttgcaatttttacttttaagtctatactaaaatgagccaaagaagtcttaacaatgatgtatggcacaattggttggttgaggctatcattccatgattacaaataggtggttatgtggggtggttttgcacttgtggcaattggactgcaatttggccttaaaatgacacaattcctcgttctcagatggagaggaattgccttgaaatttgcatgtaccagactaagtgccagtatatatatgactgatattttcgtgactcatagaaggtgtccatggtatagagtttatgcctacatctctatctttattttgggcacacatgagcttttgttaattatttctttgtacttgttagaatctgtttttgaaaaaaaaaaaaacttttgctttgatttgtggtggattcaccttcttaaaataataaatttagaggatattaggaatgacattcaaaacaaatatagtgagaggtgattttttaaaaatttttgttcctggtttccaaattatgtttactttgatttgattatatgttggtatctcccaaatataggttaacttagctatttaaatggtatcttttgacatttaaaaagaattaagtacctgtcaaatctagcattgaggttgcagttgaataagataaaagcttaggatgtcaaaaaataatatagagaaatattataagattttatgattattcttgacgtttttgatgcaaaaggaaaatatgctgaatagttcttccaaaaaatattatttccctcaatattttatttgtagccatgtaatttaaagagaacagaaaataactgcaatcaaaagtatggtttaatatcaatcaaagtggcacaacagaattgataagatctttataacaatcaattggctgatattaaaatattgattttaattgatcttttcaattaaaatctttagggcctgtaactcataaaatcagcatccaccacaatatatggtcattattggtttgtaagcatagatcaccattgactcctacctggagagacatgtctatttctaaaaatccagtagtttctttgcattctcagtagtacacgttgtatatatatatatgtaacaaatttggtagttttcagtatgtgtgatgtcctttgggggttatttatcttgctggtccataggaggggtacactaccccaagaatcaagacatctgagttctagttctagttctagctctgccactgaagagccaccttacctggggcaagttagccattgtctcccagtcatgtttaccacccatgaaaggactcgtcggtttgatgtttccattaagctcaatgagtaactctaatagttactcttgaatctggattgaaaaacaccatgcatctgatgagataattcataaatgttgccccttttttaaatgatacaaccctaaaagtgactgaattgcccaagtgcttgaacatggcagaggtagttactcctattttgcagtttgtgcacttaaaaattcctacagtgattgttactttactggggaaaaaagatgaggtgaaacttcctcccaaggaattaaaatatctgtagaagccatggcttgcttttataatgtggaaatcatttgatttgctgtaattcacgcagatccctccttttgtcagggggaaatgatttgcatcatgttcttttttcataatgcttttacttcctgtttggatcagttgtatgtaaatgtacatttttgttactttggctgtgcccgttagaatttatcttccataaagtatttctcccattgagtctaatgatgtatactttgcctaggtctttccaaaattaaatttatgtaaatgtctattttatataaaatatgattaaaataa

SEQ ID NO: 21880 - DNA, 4228 bp, Homo sapiens
  misc_feature 1..4228: note = ENST00000551659
  source 1..4228: mol_type = unassigned DNA
gcgcggggagctcgcggcgggtccagctgccgcagcaccatgcccgagcccccctccgggcagacgccgcgcgccgccggggccccggtaggggaggatgccagacgcccgggagaggccagggcagcagcggcggcggcggcgcgatggtggtgaccacctctgcccgaggcggcggcggggaccgcacaccctcccggcggcggggctgcgggctagcgccggccggggccgcggcgctgctggccggggcaagctgcctgtgctacggccgctccctgcagggcgagttcgtgcacgacgacgtgtgggcgatcgtgaacaaccccgacgtgcggcccggcgccccgctccgctggggcatcttcaccaacgacttctggggcaagggcatggccgagaacaccagccacaagtcctaccggccgctctgcgtcctcaccttcaagctaaacatatttttgactggtatgaacccattctactttcatgcagtaaatataattttacactgcttagtgactcttgtgctgatgtacacctgtgataaaactgtcttcaagaatcgtggacttgcttttgtaacggcattgctttttgctgtacatcctattcatactgaggcggtggctgggatcgttggcagagcggacgtgttagcgtgtctgctgtttctattggcctttctctcgtacaacaggagtctggatcagggctgtgttgggggaagtttcccttccacggtgtctcccttcttcttgctgctcagtttgtttctggggacctgtgcgatgctggtgaaagagacaggcatcacggtgtttggagtgtgcttggtttatgacctcttttccctttccaacaagcaagacaagtcgagcaatggggccctctgtccacgcagcccacagcagcccgggagcccccagccctcctcactgccaggccatcctcaccgggagaatgggaagcagcagcggttccctcacaaaggagcttggggtggctgccactctccactgccaccagaacccaagagcagtggattcccagtgtccccacgagctgtgtggtccatgatgaggtatctgagagcaagcagcaatagaaatttcctgcttaccatgagaccatttttaaaaagggccattttggtcctaagttatgtgcttgtcattttgtacttccgtctgtggataatgggaggatctatgcccctcttttcagagcaggataatccagcttcattttcgccttacattcttacgagattcctcacctattcctacctcttggccttcaatgtgtggcttctgcttgcacccgtgaccctgtgctatgactggcaggtcggcagtattcctctggtagagaccatatgggacatgcggaacttagccaccatctttctggcggttgtgatggccttattgagcctgcactgcttagcagcctttaagagactggagcacaaggaggttttagtcggcttgttgttcctggtgttcccgttcattccagccagcaacctcttcttcagggtgggttttgtggtggcggagagagtcctttacatgcctagcatgggctactgcatcctttttgtgcatggactgagcaagctctgcacttggctgaatcgatgtggggccaccaccctgattgtgtccactgtgttgctgctgttgcttttctcttggaaaactgtgaaacagaatgaaatttggctgtcaagagagtccctattcaggtctggagttcaaactctgccccacaatgccaaggttcactacaactatgccaatttcctgaaggaccaaggtcggaacaaggaagcgatctaccactacagaacagctctcaagttgtatccacgccatgcaagtgcgctcaacaaccttggaacactgacgagagacacagcagaggcaaagatgtactatcagagggctctccagctccatccacagcataaccgggctcttttcaatctggggaatctcctcaagtcccaggagaaaaaggaagaagctatcaccttactgaaggattccatcaaatatggtccagagtttgcagatgcatattcaagcttagcttcgttattggctgagcaggagcggtttaaagaagctgaagaaatataccaaactggaataaagaactgtccagacagctcagatttacacaacaactatggggttttcttagttgatactggcttaccagaaaaggcagtggcccattaccagcaggccatcaaacttagccccagtcatcacgtggccatggtgaacttgggaagactctacaggtcactgggagagaacagcatggctgaagaatggtacaagcgcgccctgcaggtggcacacaaagctgagatattgtcacctttgggagcactgtattacaacactggccgatacgaagaggctttgcagatttaccaggaagctgcagcacttcagccttctcagagggagctccgcttggcactggctcaggttttggccgtgatgggtcagacaaaagaagctgaaaagatgaccaatcacattgtgtcagaggagaccggatgccttgaatgctatcgcctcttgtcagccatctatagcaagcaggagaaccacgacaaggcacttgatgctatagacaaggctctccagctgaaaccaaaggacccaaaagtcatttctgaactttttttcacaaaaggaaaccaattaagagagcagaaccttctcgacaaagcttttgagagctatagagtggctgtgcaactaaacccagaccaagcacaggcctggatgaacatgggtggcatccaacacatcaagggaaaatatgtgtctgcaagagcttattatgagagagccttacagctggttccagacagcaaactgctgaaggaaaatcttgccaaattggatcgcctagaaaaacgattacaagaagttcgagaaaaggatcaaacatagcaccaccgtctgacccaacctcataggataatgtggtgcctctgaaaggggagtgatggaagccttgctttcacatcagcaggggcacaactaatgagattttctctcattccgagttcagggtgacacattttgggacatctgctggtagcccagtgctgaaggacttgcttttccatgaagaagacgaaaacagcaaacaagggcaagaaggtctgagagggaaggagaatgacatttacacattttacagatttttgtttggtttaactccagatttctcttgatatatctctgtgcttttgagacctggagatctaattctgtttagacattttttgtcccagaaatacagaagcttgaaatgctatgaaggcagagcttctattctttatgggatgaaatatttcaaaagaggataaatcctctgtggtaagccatttggaaaatcctaccaagaattggcttatttaattttccagaaccaggaatgagtatctaatagcttttgtagaaccttccagaatatgtggggaaaaagggctattgctaagtgagctttatctaatatcctcctaagagttttactagtgcttttttgaggaattacagggaagctcctggaattgtacatggatatctttatccctagggggaaatcaaggagctgggcacccctaattctttatggaagtgtttaaaactattttaattttattacaagtattactagagtggtggttctactctaagatttcaaaagtgcatttaaaatcatacatgttcccgcctgcaaatatattgttattttggtggagaaaaaaatagtatattctacataaaaaattaaagatattaactaagagaaatgtcctactttattatcttaatgttcagacatcatgagatttattatttttttgaaaaatatattgaaccattgaggaacctttatgatgtatcacagaaatcttcatagattctaactagatggaaaaagagctctatttatttgtgttcctaggcttaatgagaattctgggcttagaacatcaacgattaatacccagaattctttgttttgagaatattatggagaatgctctaaaaatctagggtaaagatctaaattcaaattttaaatatatatttatatttaagaaataggaaaggcaaagttgaactcacaatttgacatttatttttagtgttatttatttcataacttataaaatatttaatatata

SEQ ID NO: 21881 - DNA, 3915 bp, Homo sapiens
  misc_feature 1..3915: note = ENST00000552618
  source 1..3915: mol_type = unassigned DNA
gccagacgcccgggagaggccagggcagcagcggcggcggcggcgcgatggtggtgaccacctctgcccgaggcggcggcggggaccgcacaccctcccggcggcggggctgcgggctagcgccggccggggccgcggcgctgctggccggggcaagctgcctgtgctacggccgctccctgcagggcgagttcgtgcacgacgacgtgtgggcgatcgtgaacaaccccgacgtgcggcccggcgccccgctccgctggggcatcttcaccaacgacttctggggcaagggcatggccgagaacaccagccacaagtcctaccggccgctctgcgtcctcaccttcaagctaaacatatttttgactggtatgaacccattctactttcatgcagtaaatataattttacactgcttagtgactcttgtgctgatgtacacctgtgataaaactgtcttcaagaatcgtggacttgcttttgtaacggcattgctttttgctgtacatcctattcatactgaggcggtggctgggatcgttggcagagcggacgtgttagcgtgtctgctgtttctattggcctttctctcgtacaacaggagtctggatcagggctgtgttgggggaagtttcccttccacggtgtctcccttcttcttgctgctcagtttgtttctggggacctgtgcgatgctggtgaaagagacaggcatcacggtgtttggagtgtgcttggtttatgacctcttttccctttccaacaagcaagacaagtcgagcaatggggccctctgtccacgcagcccacagcagcccgggagcccccagccctcctcactgccaggccatcctcaccgggagaatgggaagcagcagcggttccctcacaaaggagcttggggtggctgccactctccactgccaccagaacccaagagcagtggattcccagtgtccccacgagctgtgtggtccatgatgaggtatctgagagcaagcagcaatagaaatttcctgcttaccatgagaccatttttaaaaagggccattttggtcctaagttatgtgcttgtcattttgtacttccgtctgtggataatgggaggatctatgcccctcttttcagagcaggataatccagcttcattttcgccttacattcttacgagattcctcacctattcctacctcttggccttcaatgtgtggcttctgcttgcacccgtgaccctgtgctatgactggcaggtcggcagtattcctctggtagagaccatatgggacatgcggaacttagccaccatctttctggcggttgtgatggccttattgagcctgcactgcttagcagcctttaagagactggagcacaaggaggttttagtcggcttgttgttcctggtgttcccgttcattccagccagcaacctcttcttcagggtgggttttgtggtggcggagagagtcctttacatgcctagcatgggctactgcatcctttttgtgcatggactgagcaagctctgcacttggctgaatcgatgtggggccaccaccctgattgtgtccactgtgttgctgctgttgcttttctcttggaaaactgtgaaacagaatgaaatttggctgtcaagagagtccctattcaggttgtatccacgccatgcaagtgcgctcaacaaccttggaacactgacgagagacacagcagaggcaaagatgtactatcagagggctctccagctccatccacagcataaccgggctcttttcaatctggggaatctcctcaagtcccaggagaaaaaggaagaagctatcaccttactgaaggattccatcaaatatggtccagagtttgcagatgcatattcaagcttagcttcgttattggctgagcaggagcggtttaaagaagctgaagaaatataccaaactggaataaagaactgtccagacagctcagatttacacaacaactatggggttttcttagttgatactggcttaccagaaaaggcagtggcccattaccagcaggccatcaaacttagccccagtcatcacgtggccatggtgaacttgggaagactctacaggtcactgggagagaacagcatggctgaagaatggtacaagcgcgccctgcaggtggcacacaaagctgagatattgtcacctttgggagcactgtattacaacactggccgatacgaagaggctttgcagatttaccaggaagctgcagcacttcagccttctcagagggagctccgcttggcactggctcaggttttggccgtgatgggtcagacaaaagaagctgaaaagatgaccaatcacattgtgtcagaggagaccggatgccttgaatgctatcgcctcttgtcagccatctatagcaagcaggagaaccacgacaaggcacttgatgctatagacaaggctctccagctgaaaccaaaggacccaaaagtcatttctgaactttttttcacaaaaggaaaccaattaagagagcagaaccttctcgacaaagcttttgagagctatagagtggctgtgcaactaaacccagaccaagcacaggcctggatgaacatgggtggcatccaacacatcaagggaaaatatgtgtctgcaagagcttattatgagagagccttacagctggttccagacagcaaactgctgaaggaaaatcttgccaaattggatcgcctagaaaaacgattacaagaagttcgagaaaaggatcaaacatagcaccaccgtctgacccaacctcataggataatgtggtgcctctgaaaggggagtgatggaagccttgctttcacatcagcaggggcacaactaatgagattttctctcattccgagttcagggtgacacattttgggacatctgctggtagcccagtgctgaaggacttgcttttccatgaagaagacgaaaacagcaaacaagggcaagaaggtctgagagggaaggagaatgacatttacacattttacagatttttgtttggtttaactccagatttctcttgatatatctctgtgcttttgagacctggagatctaattctgtttagacattttttgtcccagaaatacagaagcttgaaatgctatgaaggcagagcttctattctttatgggatgaaatatttcaaaagaggataaatcctctgtggtaagccatttggaaaatcctaccaagaattggcttatttaattttccagaaccaggaatgagtatctaatagcttttgtagaaccttccagaatatgtggggaaaaagggctattgctaagtgagctttatctaatatcctcctaagagttttactagtgcttttttgaggaattacagggaagctcctggaattgtacatggatatctttatccctagggggaaatcaaggagctgggcacccctaattctttatggaagtgtttaaaactattttaattttattacaagtattactagagtggtggttctactctaagatttcaaaagtgcatttaaaatcatacatgttcccgcctgcaaatatattgttattttggtggagaaaaaaatagtatattctacataaaaaattaaagatattaactaagagaaatgtcctactttattatcttaatgttcagacatcatgagatttattatttttttgaaaaatatattgaaccattgaggaacctttatgatgtatcacagaaatcttcatagattctaactagatggaaaaagagctctatttatttgtgttcctaggcttaatgagaattctgggcttagaacatcaacgattaatacccagaattctttgttttgagaatattatggagaatgctctaaaaatctagggtaaagatctaaattcaaattttaaatata

SEQ ID NO: 21882 - DNA, 1858 bp, Homo sapiens
  misc_feature 1..1858: note = ENST00000552925
  source 1..1858: mol_type = unassigned DNA
actttgaagaaacctatcagagtagagggccttcattctgcttctggccttactctcacttgccttgggatctttatcaagtctgttgaatatctttgcactttagtgtctatatctgtaaagtggaaaatttttgtgtgtggttttttaaatatctcttaaatcctgataaacagctaaacagtatcaaaaggcagctaaattgtataaaaaaatacctgcaaaaaccatacaaatgcttaccagaaaaggcagtggcccattaccagcaggccatcaaacttagccccagtcatcacgtggccatggtgaacttgggaagactctacaggtcactgggagagaacagcatggctgaagaatgcgccctgcaggtggcacacaaagctgagatattgtcacctttgggagcactgtattacaacactggccgatacgaagaggctttgcagatttaccaggaagctgcagcacttcagccttctcagagggagctccgcttggcactggctcaggttttggccgtgatgggtcagacaaaagaagctgaaaagatgaccaatcacattgtgtcagaggagaccggatgccttgaatgctatcgcctcttgtcagccatctatagcaagcaggagaaccacgacaaggcacttgatgctatagacaaggctctccagctgaaaccaaaggacccaaaagtcatttctgaactttttttcacaaaaggaaaccaattaagagagcagaaccttctcgacaaagcttttgagagctatagagtggctgtgcaactaaacccagaccaagcacaggcctggatgaacatgggtggcatccaacacatcaagggaaaatatgtgtctgcaagagcttattatgagagagccttacagctggttccagacagcaaactgctgaaggaaaatcttgccaaattggatcgcctagaaaaacgattacaagaagttcgagaaaaggatcaaacatagcaccaccgtctgacccaacctcataggataatgtggtgcctctgaaaggggagtgatggaagccttgctttcacatcagcaggggcacaactaatgagattttctctcattccgagttcagggtgacacattttgggacatctgctggtagcccagtgctgaaggacttgcttttccatgaagaagacgaaaacagcaaacaagggcaagaaggtctgagagggaaggagaatgacatttacacattttacagatttttgtttggtttaactccagatttctcttgatatatctctgtgcttttgagacctggagatctaattctgtttagacattttttgtcccagaaatacagaagcttgaaatgctatgaaggcagagcttctattctttatgggatgaaatatttcaaaagaggataaatcctctgtggtaagccatttggaaaatcctaccaagaattggcttatttaattttccagaaccaggaatgagtatctaatagcttttgtagaaccttccagaatatgtggggaaaaagggctattgctaagtgagctttatctaatatcctcctaagagttttactagtgcttttttgaggaattacagggaagctcctggaattgtacatggatatctttatccctagggggaaatcaaggagctgggcacccctaattctttatggaagtgtttaaaactattttaattttattacaagtattactagagtggtggttctactctaagatttcaaaagtgcatttaaaatcatacatgttcccgcctgcaaatatattgttattttggtggagaaaaaaatagtatattctacataaaaaattaaagatattaactaagagaaa

SEQ ID NO: 21883 - DNA, 3254 bp, Homo sapiens
  misc_feature 1..3254: note = ENST00000319685
  source 1..3254: mol_type = unassigned DNA
gtgctagtatagggagggaccgatggtgggcagggccctagaactcccaagagtatatgccctttgtcttttgctaccaggatgggtagggaaggaccatcaggtgggggtagggctgggcatatctgagctcagaccctccttgggcgggtcttgctgtggctgctgtgggggctgggagtgagattcctaggtcactggaattgtgtatgtaggaggattacggctgcctctgctgagtcatgcaggttgtcagggaagccggggaaagccggcagtcacaggcctcacccagctcccacacaaaccgaagggctggtctcactcccaccatgcccccctcaacaacccccagaccgtaagcgatatgaggctgtctgcctcccagctgcataagaaaagggcttggttcttccctagcctgtggagtctgcacatcagatttgcaccctcccccgagttctggccaggaggcttctcaccccgttcaaactgttacaaagttcagctagagatttccttctctctgtgtagttttatcccctgcttctctcccattggatccctgtggttccaggcaggaacggcctgccaggggagcccgcgagctcccagggcctttctgctgcttcctctaccccagtatttcacttggctctccaaattgactcagctccagattcctcacctattcctacctcttggccttcaatgtgtggcttctgcttgcacccgtgaccctgtgctatgactggcaggtcggcagtattcctctggtagagaccatatgggacatgcggaacttagccaccatctttctggcggttgtgatggccttattgagcctgcactgcttagcagcctttaagagactggagcacaaggaggttttagtcggcttgttgttcctggtgttcccgttcattccagccagcaacctcttcttcagggtgggttttgtggtggcggagagagtcctttacatgcctagcatgggctactgcatcctttttgtgcatggactgagcaagctctgcacttggctgaatcgatgtggggccaccaccctgattgtgtccactgtgttgctgctgttgcttttctcttggaaaactgtgaaacagaatgaaatttggctgtcaagagagtccctattcaggtctggagttcaaactctgccccacaatgccaaggttcactacaactatgccaatttcctgaaggaccaaggtcggaacaaggaagcgatctaccactacagaacagctctcaagttgtatccacgccatgcaagtgcgctcaacaaccttggaacactgacgagagacacagcagaggcaaagatgtactatcagagggctctccagctccatccacagcataaccgggctcttttcaatctggggaatctcctcaagtcccaggagaaaaaggaagaagctatcaccttactgaaggattccatcaaatatggtccagagtttgcagatgcatattcaagcttagcttcgttattggctgagcaggagcggtttaaagaagctgaagaaatataccaaactggaataaagaactgtccagacagctcagatttacacaacaactatggggttttcttagttgatactggcttaccagaaaaggcagtggcccattaccagcaggccatcaaacttagccccagtcatcacgtggccatggtgaacttgggaagactctacaggtcactgggagagaacagcatggctgaagaatggtacaagcgcgccctgcaggtggcacacaaagctgagatattgtcacctttgggagcactgtattacaacactggccgatacgaagaggctttgcagatttaccaggaagctgcagcacttcagccttctcagagggagctccgcttggcactggctcaggttttggccgtgatgggtcagacaaaagaagctgaaaagatgaccaatcacattgtgtcagaggagaccggatgccttgaatgctatcgcctcttgtcagccatctatagcaagcaggagaaccacgacaaggcacttgatgctatagacaaggctctccagctgaaaccaaaggacccaaaagtcatttctgaactttttttcacaaaaggaaaccaattaagagagcagaaccttctcgacaaagcttttgagagctatagagtggctgtgcaactaaacccagaccaagcacaggcctggatgaacatgggtggcatccaacacatcaagggaaaatatgtgtctgcaagagcttattatgagagagccttacagctggttccagacagcaaactgctgaaggaaaatcttgccaaattggatcgcctagaaaaacgattacaagaagttcgagaaaaggatcaaacatagcaccaccgtctgacccaacctcataggataatgtggtgcctctgaaaggggagtgatggaagccttgctttcacatcagcaggggcacaactaatgagattttctctcattccgagttcagggtgacacattttgggacatctgctggtagcccagtgctgaaggacttgcttttccatgaagaagacgaaaacagcaaacaagggcaagaaggtctgagagggaaggagaatgacatttacacattttacagatttttgtttggtttaactccagatttctcttgatatatctctgtgcttttgagacctggagatctaattctgtttagacattttttgtcccagaaatacagaagcttgaaatgctatgaaggcagagcttctattctttatgggatgaaatatttcaaaagaggataaatcctctgtggtaagccatttggaaaatcctaccaagaattggcttatttaattttccagaaccaggaatgagtatctaatagcttttgtagaaccttccagaatatgtggggaaaaagggctattgctaagtgagctttatctaatatcctcctaagagttttactagtgcttttttgaggaattacagggaagctcctggaattgtacatggatatctttatccctagggggaaatcaaggagctgggcacccctaattctttatggaagtgtttaaaactattttaattttattacaagtattactagagtggtggttctactctaagatttcaaaagtgcatttaaaatcatacatgttcccgcctgcaaatatattgttattttggtggagaaaaaaatagtatattctacataaaaaattaaagatattaactaag

SEQ ID NO: 21884 - DNA, 2758 bp, Homo sapiens
  misc_feature 1..2758: note = ENST00000539277
  source 1..2758: mol_type = unassigned DNA
gtaggggaggatgccagacgcccgggagaggccagggcagcagcggcggcggcggcgcgatggtggtgaccacctctgcccgaggcggcggcggggaccgcacaccctcccggcggcggggctgcgggctagcgccggccggggccgcggcgctgctggccggggcaagctgcctgtgctacggccgctccctgcagggcgagttcgtgcacgacgacgtgtgggcgatcgtgaacaaccccgacgtgcggcccggcgccccgctccgctggggcatcttcaccaacgacttctggggcaagggcatggccgagaacaccagccacaagtcctaccggccgctctgcgtcctcaccttcaagctaaacatatttttgactggtatgaacccattctactttcatgcagtaaatataattttacactgcttagtgactcttgtgctgatgtacacctgtgataaaactgtcttcaagaatcgtggacttgcttttgtaacggcattgctttttgctgtacatcctattcatactgaggcggtggctgggatcgttggcagagcggacgtgttagcgtgtctgctgtttctattggcctttctctcgtacaacaggagtctggatcagggctgtgttgggggaagtttcccttccacggtgtctcccttcttcttgctgctcagtttgtttctggggacctgtgcgatgctggtgaaagagacaggcatcacggtgtttggagtgtgcttggtttatgacctcttttccctttccaacaagcaagacaagtcgagcaatggggccctctgtccacgcagcccacagcagcccgggagcccccagccctcctcactgccaggccatcctcaccgggagaatgggaagcagcagcggttccctcacaaaggagcttggggtggctgccactctccactgccaccagaacccaagagcagtggattcccagtgtccccacgagctgtgtggtccatgatgagattcctcacctattcctacctcttggccttcaatgtgtggcttctgcttgcacccgtgaccctgtgctatgactggcaggtcggcagtattcctctggtagagaccatatgggacatgcggaacttagccaccatctttctggcggttgtgatggccttattgagcctgcactgcttagcagcctttaagagactggagcacaaggaggttttagtcggcttgttgttcctggtgttcccgttcattccagccagcaacctcttcttcagggtgggttttgtggtggcggagagagtcctttacatgcctagcatgggctactgcatcctttttgtgcatggactgagcaagctctgcacttggctgaatcgatgtggggccaccaccctgattgtgtccactgtgttgctgctgttgcttttctcttggaaaactgtgaaacagaatgaaatttggctgtcaagagagtccctattcaggtctggagttcaaactctgccccacaatgccaaggttcactacaactatgccaatttcctgaaggaccaaggtcggaacaaggaagcgatctaccactacagaacagctctcaagttgtatccacgccatgcaagtgcgctcaacaaccttggaacactgacgagagacacagcagaggcaaagatgtactatcagagggctctccagctccatccacagcataaccgggctcttttcaatctggggaatctcctcaagtcccaggagaaaaaggaagaagctatcaccttactgaaggattccatcaaatatggtccagagtttgcagatgcatattcaagcttagcttcgttattggctgagcaggagcggtttaaagaagctgaagaaatataccaaactggaataaagaactgtccagacagctcagatttacacaacaactatggggttttcttagttgatactggcttaccagaaaaggcagtggcccattaccagcaggccatcaaacttagccccagtcatcacgtggccatggtgaacttgggaagactctacaggtcactgggagagaacagcatggctgaagaatggtacaagcgcgccctgcaggtggcacacaaagctgagatattgtcacctttgggagcactgtattacaacactggccgatacgaagaggctttgcagatttaccaggaagctgcagcacttcagccttctcagagggagctccgcttggcactggctcaggttttggccgtgatgggtcagacaaaagaagctgaaaagatgaccaatcacattgtgtcagaggagaccggatgccttgaatgctatcgcctcttgtcagccatctatagcaagcaggagaaccacgacaaggcacttgatgctatagacaaggctctccagctgaaaccaaaggacccaaaagtcatttctgaactttttttcacaaaaggaaaccaattaagagagcagaaccttctcgacaaagcttttgagagctatagagtggctgtgcaactaaacccagaccaagcacaggcctggatgaacatgggtggcatccaacacatcaagggaaaatatgtgtctgcaagagcttattatgagagagccttacagctggttccagacagcaaactgctgaaggaaaatcttgccaaattggatcgcctagaaaaacgattacaagaagttcgagaaaaggatcaaacatagcaccaccgtctgacccaacctcataggataatgtggtgcctctgaaaggg

SEQ ID NO: 21885 - DNA, 5547 bp, Homo sapiens
  misc_feature 1..5547: note = ENST00000553189
  source 1..5547: mol_type = unassigned DNA
aatttctcggaggctgttgggcagctttgcagatgagaagtgtatcagccccttaagggtttcgttcagatgagacgaggcgggagccttgagctgacagggctgcgtgggttcaggagagggagcagaaaactctcccgagccccccagcccccgccttgcacccttggctgctcccagaggctctccaatctgccagacttctctggatctagactttagaaggtgcagagagaggctaaacatatttttgactggtatgaacccattctactttcatgcagtaaatataattttacactgcttagtgactcttgtgctgatgtacacctgtgataaaactgtcttcaagaatcgtggacttgcttttgtaacggcattgctttttgctgtacatcctattcatactgaggcggtggctgggatcgttggcagagcggacgtgttagcgtgtctgctgtttctattggcctttctctcgtacaacaggagtctggatcagggctgtgttgggggaagtttcccttccacggtgtctcccttcttcttgctgctcagtttgtttctggggacctgtgcgatgctggtgaaagagacaggcatcacggtgtttggagtgtgcttggtttatgacctcttttccctttccaacaagcaagacaagtcgagcaatggggccctctgtccacgcagcccacagcagcccgggagcccccagccctcctcactgccaggccatcctcaccgggagaatgggaagcagcagcggttccctcacaaaggagcttggggtggctgccactctccactgccaccagaacccaagagcagtggattcccagtgtccccacgagctgtgtggtccatgatgaggtatctgagagcaagcagcaatagaaatttcctgcttaccatgagaccatttttaaaaagggccattttggtcctaagttatgtgcttgtcattttgtacttccgtctgtggataatgggaggatctatgcccctcttttcagagcaggataatccagcttcattttcgccttacattcttacgagattcctcacctattcctacctcttggccttcaatgtgtggcttctgcttgcacccgtgaccctgtgctatgactggcaggtcggcagtattcctctggtagagaccatatgggacatgcggaacttagccaccatctttctggcggttgtgatggccttattgagcctgcactgcttagcagcctttaagagactggagcacaaggaggttttagtcggcttgttgttcctggtgttcccgttcattccagccagcaacctcttcttcagggtgggttttgtggtggcggagagagtcctttacatgcctagcatgggctactgcatcctttttgtgcatggactgagcaagctctgcacttggctgaatcgatgtggggccaccaccctgattgtgtccactgtgttgctgctgttgcttttctcttggaaaactgtgaaacagaatgaaatttggctgtcaagagagtccctattcaggtctggagttcaaactctgccccacaatgccaaggttcactacaactatgccaatttcctgaaggaccaaggtcggaacaaggaagcgatctaccactacagaacagctctcaagttgtatccacgccatgcaagtgcgctcaacaaccttggaacactgacgagagacacagcagaggcaaagatgtactatcagagggctctccagctccatccacagcataaccgggctcttttcaatctggggaatctcctcaagtcccaggagaaaaaggaagaagctatcaccttactgaaggattccatcaaatatggtccagagtttgcagatgcatattcaagcttagcttcgttattggctgagcaggtaattgtttcacacagtagtttttttcaatgttattgttacatgtataaattaatgttacacagatttttgtactaatgatttaatttgtaaacccatattggacaaccaatctctatgtcagtttcttttggacagaaattacaagcctaattttctcactccaatattctctgtgtatcacaggtcgcttttagacaaagatggtccgttattggccattgatatattctctctcactttggtacagaatctatcaagaacaatacatgatatttgatgtttttattaccacttacttgtaatatttttctgaggaattgcaagtggtctaagatcgctgaactcaacatggagcaatttgataatcctacaaattctgttttaacatctgttagaatattacagaggctcgtgagagaggctcctaagagaatagtttttatggcataaaacagagatgagttttcaatcccctccttcttttcagtcgtgtctaaatgatttgataccagttttcagagtcttagatgcatgacccctgctatggagaaacagatataagttgtcttctctctaaattgatgatatagttttgttgacacacatagtgcccttgatagacagtagattctgctaccataaaattaccagattatctttaaaactcaaactcaacatctctgcaacatgcccggcagcattcagttggcttaagggtaataagtgatttgatactgtatgtcagttttgtagggagcgatttgcatcagaaatttttggaggctccagcaagaagcaaaattaggtcattctatgaatatttaagtgacaaagaatataaacctagttgttttgccctttctccctgtaggataggcgggctttagattaaaaacctctgtctgtgttggatgattttaacgcatgctttagtataaagtgtgagctaaaatggtgatggatgtgtctgtgctatacactggcagtcctcagctgcccttggcttgtgttgaaacagacacagaggctggcttcatcagtgttgcttcatctcacctcaccctggacccttccttttcataagcccctccccctgcctctgacaggctggttgttttgcagttactcagatgtgctaagtgtgcttctctctcacagcctttgcactaactgttcctgcagcacttctcttccagatagttatcttagagtttccaagatatttcatatcatgctggtttctgaccaaatgttactatatcagagaggtcttctgagatgaccctttgtaaataggaaccttccgcagcccatcatgttctctactaccatgtcctgccttactttccctatagtatttatcaccatctaaaacacatttatttgtttatggactttctgccaccgttagaatatttgactctatgagaacagctatgtgttttattcatctaagctcattttaaaaatgatcaagattttaatgatgttgaactttattttagttccttctgtagtatctttgcattcagccttactattaacaaattttgtagcagatggaagtttaaacaggataacgtatatactttttccttacttgtgtgtaagaagtgtcagatggcttatttaaaattgattacttgataaatttaatcttttgtgaactgcagtggcaaattgctatcaagttattgcattttacatagttgaagttgtgaacaattgttaagaacaacaaatgatgactaggatcattatcttttcttacacacaaaggtcccatcttttagcacttttctgttctagatgtgaatgtaaaatgatgtgagatataagaatggaactgaaagattgaaaagttctttcttctgcccctttgggcatgaaaacaatgaagcagctgttgagcataactcaggactgccttcccctctctgactttcaacatcctatcttcatgtttttaactatttagtcataaaagagtgcatcagatgtgcaagcaagacacaaactgttagagaaaaacccacctagcttaacattttttggtagcaaatgaattcatttcttggttgcacaactttatttaacagcatcctggcatttcaaacacccagagtgtatgaaatcagtattgacaaaccttgggcaacatgtaacacacagtgaagccatccccttagtcaagcgacttgtcctccattgccaccatccgtccacatgcacagcccacgcggactgtggttgtgggtcagtgtcatgccaaaaagctctttcctacactcagctgaaatcagccattttgcaggcagtttttcagaagctggatgaaaggattcattctgtatttacatcagcctgacatattctgtatttatatcagcctgacatttctgattttctaggactttttagtttttttcctgccgtacagtgtattgactaccatttccagctctttcagttggcaaacttgataatagttttagttaaataactagtttgtgttttcgattttaaaaaatgttgtgaagatcagtattagttaggaagccctgcagcatatctgtagaaccttctttccaggttgacctttatcttatgccagactctttgggtaaacttattcaagcattcgttaatttgttgaattatattatcctctagctcacctttctcagtcttgtctacagagatgtttcgagacacattttcagacacctgccaaaatccttcccctgatgtaaggctgcaaatctataatatcaaaaaaggaaactaggtttatttggtataccttgctcttattataagcatgctgctgtctgttgacatcatttcccatcctcagtgccaataaaaccatgaatgtaggatttgtcggaaactaatattgtgttccttactctgttgtaacctgaggggagaaatttaatctgttcgcgcaaagtaggggatttgacaaatttgaaaaatagattaatgagttgaaaagacattatatggtagaacatattaaggccataatggagcccaagttttacattgatagataataggaagtaacggtaaatatctgaggagagctttctaaaacatgtgaggaagaaaaccttgtggaaaacacatggtgtattttggaaaaggcttttctatgcattctggtgtgagtagttgagagccttgtttgcagaagaaagtgagggaatggatagaatatcgtggaaaaagaaagatttccatggtacatagggactgtcagcatgtaaaggttgaatggaaaagaaaaatagaaaattaagaactccaggtcagaacccctaagaaaatgagaagatttatggccactgatagacgtggataagccagacagaagcaatattttaggaaagaaataagatgagtgtcaacattgtttccagttaaacaagtaatataaatatataaaggaaactgtgaaaactcagagaaaataacgtatacatcctttattcataatataatacctggagacaacaaatattatcattctttaatatgcatctcttttaaatatatttatgtgttccatactaatatttatacactgtttgtatcctgtttttttcacttgccattaaattatacatact

SEQ ID NO: 21886 - DNA, 593 bp, Homo sapiens
  misc_feature 1..593: note = ENST00000550354
  source 1..593: mol_type = unassigned DNA
ttcagggtgggttttgtggtggcggagagagtcctttacatgcctagcatgggctactgcatcctttttgtgcatggactgagcaagctctgcacttggctgaatcgatgtggggccaccaccctgattgtgtccactgtgttgctgctgttgcttttctcttggaaaactgtgaaacagaatgaaatttggctgtcaagagagtccctattcaggtctggagttcaaactctgccccacaatgccaaggttcactacaactatgccaatttcctgaaggaccaaggtcggaacaaggaagcgatctaccactacagaacagctctcaataataataaagcttgggattatctatgctggagattcagaaaaacactgacagatctgccatagacctccagagctctccgactgttcggttaccctggagaaggtttctaacattctaccttgtgtgatgggagtagaaagtccagagaccacccaacaagtcagcccttcctacacaaaaactcccaagaaatgcctcagctaataagccccgaaagagaaatagtgattctccctgaataaagtcaagatattgatgtgta

SEQ ID NO: 21887 - DNA, 464 bp, Homo sapiens
  misc_feature 1..464: note = ENST00000546582
  source 1..464: mol_type = unassigned DNA
acctgctgagagctgttgccatgaagagaaatccaacaggagctgtgcctgtagataggcgagaccggctactgccagagttggaggtgggagaggctgttaaaacttaaatgaaagcagacacagcagtgaaggccagagactggagcacaaggaggttttagtcggcttgttgttcctggtgttcccgttcattccagccagcaacctcttcttcagggtgggttttgtggtggcggagagagtcctttacatgcctagcatgggctactgcatcctttttgtgcatggactgagcaagctctgcacttggctgaatcgatgtggggccaccaccctgattgtgtccactgtgttgctgctgttgcttttctcttggaaaactgtgaaacagaatgaaatttggctgtcaagagagtccctattcaggtctggagttcaaactctgccccacaatgccaagg

SEQ ID NO: 21888 - DNA, 3483 bp, Homo sapiens
  misc_feature 1..3483: note = ENST00000376234
  source 1..3483: mol_type = unassigned DNA
gcgggaggcgcggcgcggggggggtcgggtgcgcggcgggcggcccctccccctgccaggtccgggcgggtgcctggagccgccagagtttccgcacccgggagggagatgcggccggggctcaggctccttgcagattcctaaccagcataatgctggagccgggagccaccaacctgcagttttcagaatggccgtgttggacactgatttggatcacattcttccatcttctgttcttcctccattctgggctaagttagtagtgggatcggttgccattgtgtgttttgcacgcagctatgatggagactttgtctttgatgactcagaagctattgttaacaataaggacctccaagcagaaacgcccctgggggacctgtggcatcatgacttctggggcagtagactgagcagcaacaccagccacaagtcctaccggcctctcaccgtcctgactttcaggattaactactacctctcgggaggcttccaccccgtgggctttcacgtggtcaacatcctcctgcacagtggcatctctgtcctcatggtggacgtcttctcggttctgtttggcggcctgcagtacaccagtaaaggccggaggctgcacctcgcccccagggcgtccctgctggccgcgctgctgtttgctgtccatcctgtgcacaccgagtgtgttgctggtgttgtcggccgtgcagacctcctgtgtgccctgttcttcttgttatctttccttggctactgtaaagcatttagagaaagtaacaaggagggagcgcattcttccaccttctgggtgctgctgagtatctttctgggagcagtggccatgctgtgcaaagagcaagggatcactgtgctgggtttaaatgcggtatttgacatcttggtgataggcaaattcaatgttctggaaattgtccagaaggtactacataaggacaagtcattagagaatctcggcatgctcaggaacgggggcctcctcttcagaatgaccctgctcacctctggaggggctgggatgctctacgtgcgctggaggatcatgggcacgggcccgccggccttcaccgaggtggacaacccggcctcctttgctgacagcatgctggtgagggccgtaaactacaattactactattcattgaatgcctggctgctgctgtgtccctggtggctgtgttttgattggtcaatgggctgcatccccctcattaagtccatcagcgactggagggtaattgcacttgcagcactctggttctgcctaattggcctgatatgccaagccctgtgctctgaagacggccacaagagaaggatccttactctgggcctgggatttctcgttatcccatttctccccgcgagtaacctgttcttccgagtgggcttcgtggtcgcagagcgtgtcctctacctccccagcgttgggtactgtgtgctgctgacttttggattcggagccctgagcaaacataccaagaaaaagaaactcattgccgctgtcgtgctgggaatcttattcatcaacacgctgagatgtgtgctgcgcagcggcgagtggcggagtgaggaacagcttttcagaagtgctctgtctgtgtgtcccctcaatgctaaggttcactacaacattggcaaaaacctggctgataaaggcaaccagacagctgccatcagatactaccgggaagctgtaagattaaatcccaagtatgttcatgccatgaataatcttggaaatatcttaaaagaaaggaatgagctacaggaagctgaggagctgctgtctttggctgttcaaatacagccagactttgccgctgcgtggatgaatctaggcatagtgcagaatagcctgaaacggtttgaagcagcagagcaaagttaccggacagcaattaaacacagaaggaaatacccagactgttactacaacctcgggcgtctgtatgcagatctcaatcgccacgtggatgccttgaatgcgtggagaaatgccaccgtgctgaaaccagagcacagcctggcctggaacaacatgattatactcctcgacaatacaggtaatttagcccaagctgaagcagttggaagagaggcactggaattaatacctaatgatcactctctcatgttctcgttggcaaacgtgctggggaaatcccagaaatacaaggaatctgaagctttattcctcaaggcaattaaagcaaatccaaatgctgcaagttaccatggtaatttggctgtgctttatcatcgttggggacatctagacttggccaagaaacactatgaaatctccttgcagcttgaccccacggcatcaggaactaaggagaattacggtctgctgagaagaaagctagaactaatgcaaaagaaagctgtctgatcctgtttccttcatgttttgagtttgagtgtgtgtgtgcatgaggcatatcattaatagtatgtggttacatttaaccatttaaaagtcttagacatgttattttactgatttttttctatgaaaacaaagacatgcaaaaagattatagcaccagcaatatactcttgaatgcgtgatatgatttttcattgaaattgtattttttcagacaactcaaatgtaattctaaaattccaaaaatgtcttttttaattaaacagaaaaagagaaaaaattatcttgagcaacttttagtagaattgagcttacatttgggatctgagccttgtcgtgtatggactagcactattaaacttcaattatgaccaagaaaggatacactggcccctacaatttgtataaatattgaacatgtctatatattagcatttttatttaatgacaaagcaaattaagtttttttatctcttttttttaaaacaacatactgtgaactttgtaaggaaatatttatttgtatttttatgttttgaatagggcaaataatcgaatgaggaatggaagttttaacatagtatatctatatgcttttccccataggaagaaattgactcttgcagtttttggatgctctgacttgtgcaatttcaatacacaggagattatgtaatgtaatattttacataagcggttactatcaattgaaagttcaagccatgctttaggcaagagcaggcagcctcacatctttatttttgttacatccaaggtgaagagggcaacacatctgtgtaagctgctttttagtgtgtttatctgaaggccgttttccattttgcttaatgtaactacagacattatccagaaaatgcaaaattttctatcaaatggagccacattcggggaattcgtggtatttttaagaattgagttgttcctgctgttttttatttgatccaaacaatgttttgttttgttcttctctgtatgctgttgacctaatgatttatgcaatctctgtaatttcttatgcagtaaaattactacacaaactagcatgaaaa

SEQ ID NO: 21889 - DNA, 3602 bp, Homo sapiens
  misc_feature 1..3602: note = ENST00000342624
  source 1..3602: mol_type = unassigned DNA; mol_type = unassigned DNA
agagtttccgcacccgggagggagatgcggccggggctcaggctccttgcagttgtaatttagattcgagaagtggtttatcctttgactggaaaagaaaagtagctgcagtattcccccagcacttgctgagagcatgccgtatgccaggctgtgaggctcgagagacaagcagtggaagagttgcggcctgtttcatctctggattgtaaatctgagcctccttctggcccctggaaggggacagcatcaccatggaatgattcctaaccagcataatgctggagccgggagccaccaacctgcagttttcagaatggccgtgttggacactgatttggatcacattcttccatcttctgttcttcctccattctgggctaagttagtagtgggatcggttgccattgtgtgttttgcacgcagctatgatggagactttgtctttgatgactcagaagctattgttaacaataaggacctccaagcagaaacgcccctgggggacctgtggcatcatgacttctggggcagtagactgagcagcaacaccagccacaagtcctaccggcctctcaccgtcctgactttcaggattaactactacctctcgggaggcttccaccccgtgggctttcacgtggtcaacatcctcctgcacagtggcatctctgtcctcatggtggacgtcttctcggttctgtttggcggcctgcagtacaccagtaaaggccggaggctgcacctcgcccccagggcgtccctgctggccgcgctgctgtttgctgtccatcctgtgcacaccgagtgtgttgctggtgttgtcggccgtgcagacctcctgtgtgccctgttcttcttgttatctttccttggctactgtaaagcatttagagaaagtaacaaggagggagcgcattcttccaccttctgggtgctgctgagtatctttctgggagcagtggccatgctgtgcaaagagcaagggatcactgtgctgggtttaaatgcggtatttgacatcttggtgataggcaaattcaatgttctggaaattgtccagaaggtactacataaggacaagtcattagagaatctcggcatgctcaggaacgggggcctcctcttcagaatgaccctgctcacctctggaggggctgggatgctctacgtgcgctggaggatcatgggcacgggcccgccggccttcaccgaggtggacaacccggcctcctttgctgacagcatgctggtgagggccgtaaactacaattactactattcattgaatgcctggctgctgctgtgtccctggtggctgtgttttgattggtcaatgggctgcatccccctcattaagtccatcagcgactggagggtaattgcacttgcagcactctggttctgcctaattggcctgatatgccaagccctgtgctctgaagacggccacaagagaaggatccttactctgggcctgggatttctcgttatcccatttctccccgcgagtaacctgttcttccgagtgggcttcgtggtcgcagagcgtgtcctctacctccccagcgttgggtactgtgtgctgctgacttttggattcggagccctgagcaaacataccaagaaaaagaaactcattgccgctgtcgtgctgggaatcttattcatcaacacgctgagatgtgtgctgcgcagcggcgagtggcggagtgaggaacagcttttcagaagtgctctgtctgtgtgtcccctcaatgctaaggttcactacaacattggcaaaaacctggctgataaaggcaaccagacagctgccatcagatactaccgggaagctgtaagattaaatcccaagtatgttcatgccatgaataatcttggaaatatcttaaaagaaaggaatgagctacaggaagctgaggagctgctgtctttggctgttcaaatacagccagactttgccgctgcgtggatgaatctaggcatagtgcagaatagcctgaaacggtttgaagcagcagagcaaagttaccggacagcaattaaacacagaaggaaatacccagactgttactacaacctcgggcgtctgtatgcagatctcaatcgccacgtggatgccttgaatgcgtggagaaatgccaccgtgctgaaaccagagcacagcctggcctggaacaacatgattatactcctcgacaatacaggtaatttagcccaagctgaagcagttggaagagaggcactggaattaatacctaatgatcactctctcatgttctcgttggcaaacgtgctggggaaatcccagaaatacaaggaatctgaagctttattcctcaaggcaattaaagcaaatccaaatgctgcaagttaccatggtaatttggctgtgctttatcatcgttggggacatctagacttggccaagaaacactatgaaatctccttgcagcttgaccccacggcatcaggaactaaggagaattacggtctgctgagaagaaagctagaactaatgcaaaagaaagctgtctgatcctgtttccttcatgttttgagtttgagtgtgtgtgtgcatgaggcatatcattaatagtatgtggttacatttaaccatttaaaagtcttagacatgttattttactgatttttttctatgaaaacaaagacatgcaaaaagattatagcaccagcaatatactcttgaatgcgtgatatgatttttcattgaaattgtattttttcagacaactcaaatgtaattctaaaattccaaaaatgtcttttttaattaaacagaaaaagagaaaaaattatcttgagcaacttttagtagaattgagcttacatttgggatctgagccttgtcgtgtatggactagcactattaaacttcaattatgaccaagaaaggatacactggcccctacaatttgtataaatattgaacatgtctatatattagcatttttatttaatgacaaagcaaattaagtttttttatctcttttttttaaaacaacatactgtgaactttgtaaggaaatatttatttgtatttttatgttttgaatagggcaaataatcgaatgaggaatggaagttttaacatagtatatctatatgcttttccccataggaagaaattgactcttgcagtttttggatgctctgacttgtgcaatttcaatacacaggagattatgtaatgtaatattttacataagcggttactatcaattgaaagttcaagccatgctttaggcaagagcaggcagcctcacatctttatttttgttacatccaaggtgaagagggcaacacatctgtgtaagctgctttttagtgtgtttatctgaaggccgttttccattttgcttaatgtaactacagacattatccagaaaatgcaaaattttctatcaaatggagccacattcggggaattcgtggtatttttaagaattgagttgttcctgctgttttttatttgatccaaacaatgttttgttttgttcttctctgtatgctgttgacctaatgatttatgcaatctctgtaatttcttatgcagtaaaattactacacaaactagc

SEQ ID NO: 21890 - DNA, 2101 bp, Homo sapiens
  misc_feature 1..2101: note = ENST00000328767
  source 1..2101: mol_type = unassigned DNA; mol_type = unassigned DNA
gagatgcggccggggctcaggctccttgcagattcctaaccagcataatgctggagccgggagccaccaacctgcagttttcagaatggccgtgttggacactgatttggatcacattcttccatcttctgttcttcctccattctgggctaagttagtagtgggatcggttgccattgtgtgttttgcacgcagctatgatggagactttgtctttgatgactcagaagctattgttaacaataaggttgctggtgttgtcggccgtgcagacctcctgtgtgccctgttcttcttgttatctttccttggctactgtaaagcatttagagaaagtaacaaggagggagcgcattcttccaccttctgggtgctgctgagtatctttctgggagcagtggccatgctgtgcaaagagcaagggatcactgtgctgggtttaaatgcggtatttgacatcttggtgataggcaaattcaatgttctggaaattgtccagaaggtactacataaggacaagtcattagagaatctcggcatgctcaggaacgggggcctcctcttcagaatgaccctgctcacctctggaggggctgggatgctctacgtgcgctggaggatcatgggcacgggcccgccggccttcaccgaggtggacaacccggcctcctttgctgacagcatgctggtgagggccgtaaactacaattactactattcattgaatgcctggctgctgctgtgtccctggtggctgtgttttgattggtcaatgggctgcatccccctcattaagtccatcagcgactggagggtaattgcacttgcagcactctggttctgcctaattggcctgatatgccaagccctgtgctctgaagacggccacaagagaaggatccttactctgggcctgggatttctcgttatcccatttctccccgcgagtaacctgttcttccgagtgggcttcgtggtcgcagagcgtgtcctctacctccccagcgttgggtactgtgtgctgctgacttttggattcggagccctgagcaaacataccaagaaaaagaaactcattgccgctgtcgtgctgggaatcttattcatcaacacgctgagatgtgtgctgcgcagcggcgagtggcggagtgaggaacagcttttcagaagtgctctgtctgtgtgtcccctcaatgctaaggttcactacaacattggcaaaaacctggctgataaaggcaaccagacagctgccatcagatactaccgggaagctgtaagattaaatcccaagtatgttcatgccatgaataatcttggaaatatcttaaaagaaaggaatgagctacaggaagctgaggagctgctgtctttggctgttcaaatacagccagactttgccgctgcgtggatgaatctaggcatagtgcagaatagcctgaaacggtttgaagcagcagagcaaagttaccggacagcaattaaacacagaaggaaatacccagactgttactacaacctcgggcgtctgtatgcagatctcaatcgccacgtggatgccttgaatgcgtggagaaatgccaccgtgctgaaaccagagcacagcctggcctggaacaacatgattatactcctcgacaatacaggtaatttagcccaagctgaagcagttggaagagaggcactggaattaatacctaatgatcactctctcatgttctcgttggcaaacgtgctggggaaatcccagaaatacaaggaatctgaagctttattcctcaaggcaattaaagcaaatccaaatgctgcaagttaccatggtaatttggctgtgctttatcatcgttggggacatctagacttggccaagaaacactatgaaatctccttgcagcttgaccccacggcatcaggaactaaggagaattacggtctgctgagaagaaagctagaactaatgcaaaagaaagctgtctgatcctgtttccttcatgttttgagtttgagtgtgtgtgtgcatgaggcatatcattaatagtatgtggttacatttaaccatttaaaagtcttagacatgttattttactgatttttttctatg

SEQ ID NO: 21891 - DNA, 2733 bp, Homo sapiens
  misc_feature 1..2733: note = ENST00000489713
  source 1..2733: mol_type = unassigned DNA
ctggcaaaggcctgctctcatcaatgtgtggtttccaaagtcaccctgtccatctccattccagccagctggaaggggaaaccaagtgggaatgtgtgcccaagttttacaaccaaacatccaaaatggtacgtgtcgcttctcccacattccataaggctagaactcagccccgcaacctagtttaactgcaggggaggctgggagatgtcatctagttgtaacccagcgagaaaactactggacaactagatttctgcacaagagatctccagagctccattagagattatcatgtgtgttcatcccatttctaaagatgccaaagtgcactggcacttaaggttcacttacatggctgggtttttgaggttgatggctgcctttatcttccagtatgattactgcccaggaaaacactctgttgcatgaactaaaggactgttttatagtgaccaaaaaaagtggggagggggtatctctcgagggcttttcctaggaatcccaaatttctagctatcctgaatcttgtagaactcctacacgcagactgtgaaatcattactatcaggggcttactaaataataaatatgatctattaccttgagctaatttcatagaaacgtacggctgttatgtgtttttttaaagagctgcagaggtcttccgtgattctctagtctatgtgttccttgtctagattgagtaatgaaattgtgaagtgtaattgctgcctaacacagccaagctctcccgtggctgattgtcttgctttgctttcttagggtttaaatgcggtatttgacatcttggtgataggcaaattcaatgttctggaaattgtccagaaggtactacataaggacaagtcattagaggtgagtctgtacttttatctccagcccagacatggaaaatgtcaagtaccagctgatttaaaatgccattctcaaatattccttgtgattttgaattctacaataaccagccttttaaagcacagtgttgaagcagttcaggcagaattgctgcacatctgtacctggctcagccacacttttatgtgaaaatcagccacctctggggctttgcgatgtccttgcagaatctcggcatgctcaggaacgggggcctcctcttcagaatgaccctgctcacctctggaggggctgggatgctctacgtgcgctggaggatcatgggcacgggcccgccggccttcaccgaggtggacaacccggcctcctttgctgacagcatgctggtgagggccgtaaactacaattactactattcattgaatgcctggctgctgctgtgtccctggtggctgtgttttgattggtcaatgggctgcatccccctcattaagtccatcagcgactggagggtaattgcacttgcagcactctggttctgcctaattggcctgatatgccaagccctgtgctctgaagacggccacaagagaaggatccttactctgggcctgggatttctcgttatcccatttctccccgcgagtaacctgttcttccgagtgggcttcgtggtcgcagagcgtgtcctctacctccccagcgttgggtactgtgtgctgctgacttttggattcggagccctgagcaaacataccaagaaaaagaaactcattgccgctgtcgtgctgggaatcttattcatcaacacgctgagatgtgtgctgcgcagcggcgagtggcggagtgaggaacagcttttcagaagtgctctgtctgtgtgtcccctcaatgctaaggttcactacaacattggcaaaaacctggctgataaaggcaaccagacagctgccatcagatactaccgggaagctgtaagattaaatcccaagtatgttcatgccatgaataatcttggaaatatcttaaaagaaaggaatgagctacaggaagctgaggagctgctgtctttggctgttcaaatacagccagactttgccgctgcgtggatgaatctaggcatagtgcagaatagcctgaaacggtttgaagcagcagagcaaagttaccggacagcaattaaacacagaaggaaatacccagactgttactacaacctcgggcgtctggtaagcgcggggtgccctgtgcctgtggaaggaaagatgggttatttttcttatttataataaaatgacatagtgacacccacctagcccatacattttataaagttctttcacatgtttctatctcatttgaaggtagctatttgatttccttttgagtaattttttaaagctctcattagagagcagtacagtgtgaattagtcaagtttaagaggtcacccacgcaaaaggttaaacccaggaataaattaacatgttaaagtcccgtccgccctgtaaaacagcactccaatgggtaacttcctgataaacatcagtttctctgtttttaaaacaagaattgagtaagaacagagattaaagtaacaaatccgtagtatgatttctgagctcccttgttctccttcttcaagggagcagagctcttcatctgcagggagcatttcccccaaaaaaggcagctttggagggcacgggatttatttgaaagggctttgacattatttggtggaaatagaaaataacgtgttctgtagtagctttatatttttggttattgacaggatgtttacgaagatctgattgctcttgattttcttgacaaaaataaaatgagacacac

SEQ ID NO: 21892 - DNA, 1278 bp, Homo sapiens
  misc_feature 1..1278: note = ENST00000462211
  source 1..1278: mol_type = unassigned DNA; mol_type = unassigned DNA
gtaacaaggagggagcgcattcttccaccttctgggtgctgctgagtatctttctgggagcagtggccatgctgtgcaaagagcaagggatcactgtgctgggtttaaatgcggtatttgacatcttggtgataggcaaattcaatgttctggaaattgtccagaaggtactacataaggacaagtcattagagaatctcggcatgctcaggaacgggggcctcctcttcagaatgaccctgctcacctctggaggggctgggatgctctacgtgcgctggaggatcatgggcacgggcccgccggccttcaccgaggtggacaacccggcctcctttgctgacagcatgctggtgagggccgtaaactacaattactactattcattgaatgcctggctgctgctgtgtccctggtggctgtgttttgattggtcaatgggctgcatccccctcattaagtccatcagcgactggagggtaattgcacttgcagcactctggttctgcctaattggcctgatatgccaagccctgtgctctgaagacggccacaagagaaggatccttactctgggcctgggatttctcgttatcccatttctccccgcgagtaacctgttcttccgagtgggcttcgtggtcgcagagcgtgtcctctacctccccagcgttgggtactgtgtgctgctgacttttggattcggagccctgagcaaacataccaagaaaaagaaactcattgccgctgtcgtgctgggaatcttattcatcaacacgctgagatgtgtgctgcgcagcggcgagtggcggagtgaggaacagcttttcagaagtgctctgtctgtgtgtcccctcaatgctaaggttcactacaacattggcaaaaacctggctgataaaggcaaccagacagctgccatcagatactaccgggaagctgtaagattaaatcccaagtatgttcatgccatgaataatcttggaaatatcttaaaagaaaggaatgagctacaggaagctgaggagctgctgtctttggctgttcaaatacagccagactttgccgctgcgtggatgaatctaggcatagtgcagaatagcctgaaacggtttgaagcagcagagcaaagttaccggacagcaattaaacacagaaggaaatacccagactgttactacaacctcgggcgtctggtaagcgcggggtgccctgtgcctgtggaaggaaagatgggttatttttcttatttataataaaatgacatagtgacaccca

SEQ ID NO: 21893 - DNA, 798 bp, Homo sapiens
  misc_feature 1..798: note = ENST00000478272
  source 1..798: mol_type = unassigned DNA; mol_type = unassigned DNA
gcacttgcagcactctggttctgcctaattggcctgatatgccaagccctgtgctctgaagacggccacaagagaaggatccttactctgggcctgggatttctcgttatcccatttctccccgcgagtaacctgttcttccgagtgggcttcgtggtcgcagagcgtgtcctctacctccccagcgttgggtactgtgtgctgctgacttttggattcggagccctgagcaaacataccaagaaaaaggtatcaactgagagtggtgccagctgatgaacagaatgaccggatgcatctcactggtgacaattaccatgtctttctgttcttaagaaactcattgccgctgtcgtgctgggaatcttattcatcaacacgctgagatgtgtgctgcgcagcggcgagtggcggagtgaggaacagcttttcagaagtgctctgtctgtgtgtcccctcaatgctaaggttcactacaacattggcaaaaacctggctgataaaggcaaccagacagctgccatcagatactaccgggaagctgtaagattaaatcccaagtatgttcatgccatgaataatcttggaaatatcttaaaagaaaggaatgagctacaggaagctgaggagctgctgtctttggctgttcaaatacagccagactttgccgctgcgtggatgaatctaggcatagtgcagaatagcctgaaacggtttgaagcagcagagcaaagttaccggacagcaattaaacacagaaggaaatacccagactgttactacaacctcgggcgtctg

SEQ ID NO: 21894 - DNA, 333 bp, Homo sapiens
  misc_feature 1..333: note = ENST00000496511
  source 1..333: mol_type = unassigned DNA; mol_type = unassigned DNA
tccatcagcgactggagggtaattgcacttgcagcactctggttctgcctaattggcctgatatgccaagccctgtgctctgaagacggccacaagagaaggggacattgggaatgatcaggtggttccagaagtgtttcaatgctcagcttcgtatctccctgactgaaatttatggtggtgatgtagcaaccaaaaaatggatccttactctgggcctgggatttctcgttatcccatttctccccgcgagtaacctgttcttccgagtgggcttcgtggtcgcagagcgtgtcctctacctccccagcgttgggtactgtgtgctgctga

SEQ ID NO: 21895 - DNA, 584 bp, Homo sapiens
  misc_feature 1..584: note = ENST00000440120
  source 1..584: mol_type = unassigned DNA; mol_type = unassigned DNA
agagtttccgcacccgggagggagatgcggccggggctcaggctccttgcagattcctaaccagcataatgctggagccgggagccaccaacctgcagttttcagaatggccgtgttggacactgatttggatcacattcttccatcttctgttcttcctccattctgggctaagttagtagtgggatcggttgccattgtgtgttttgcacgcagctatgatggagactttgtctttgatgactcagaagctattgttaacaataagcacaccctgctgtggaggctccacttaatcaaatatttagaacctcgttggtgttcatttcctgttcaaagggaggaaaagatcctctgccgaagcccttcacagctgaccgggtacttctgtaagagtgtagaagaaggacctccaagcagaaacgcccctgggggacctgtggcatcatgacttctggggcagtagactgagcagcaacaccagccacaagtcctaccggcctctcaccgtcctgactttcaggattaactactacctctcgggaggcttccaccccgtgggctttcacgtggtcaacatcctc

SEQ ID NO: 21896 - DNA, 809 bp, Homo sapiens
  misc_feature 1..809: note = ENST00000480433
  source 1..809: mol_type = unassigned DNA; mol_type = unassigned DNA
ctcaagccatccaccggcctcggcctcccaaagtgctgggattacaggcgtgagccattgcaaccagccttgatttgttgttttttaagtagcaggagtaatttctttagctgaaatgtaagcatagaggttggggtctgtgtgctaacctgtgttgtgtttgcagttgtaatttagattcgagaagtggtttatcctttgactggaaaagaaaagtagctgcagtattcccccagcacttgctgagagcatgccgtatgccaggctgtgaggctcgagagacaagcagtggaagagttgcggcctgtttcatctctggattgtaaatctgagcctccttctggcccctggaaggggacagcatcaccatggaatgattcctaaccagcataatgctggagccgggagccaccaacctgcagttttcagaatggccgtgttggacactgatttggatcacattcttccatcttctgttcttcctccattctgggctaagttagtagtgggatcggttgccattgtgtgttttgcacgcagctatgatggagactttgtctttgatgactcagaagctattgttaacaataaggtttgtatctcaactcttttctggtaaacttaactgcccaactgtgtctcagtaatcatctaagtatgtgttgcattgttctctgtggaatgtaggttaagcattggcctgggccccgatggtgctctcgatttttctctcttttcaacatcgcctccatgatttagtgcctttcttattgctggcaccaaggttctgaacccctgcctcagctcag

SEQ ID NO: 21897 - DNA, 639 bp, Homo sapiens
  misc_feature 1..639: note = ENST00000423847
  source 1..639: mol_type = unassigned DNA; mol_type = unassigned DNA
gcgggaggcgcggcgcggggggggtcgggtgcgcggcgggcggcccctccccctgccaggtccgggcgggtgcctggagccgccagagtttccgcacccgggagggagatgcggccggggctcaggctccttgcagttgtaatttagattcgagaagtggtttatcctttgactggaaaagaaaagtagctgcagtattcccccagcacttgctgagagcatgccgtatgccaggctgtgaggctcgagagacaagcagtggaagagttgcggcctgtttcatctctggattgtaaatctgagcctccttctggcccctggaaggggacagcatcaccatggaatggtgtgtcccgttgcctgttggatctgtctccatcttcactcagacagaaggctatagaaagatgcctgtgacttcagattcctaaccagcataatgctggagccgggagccaccaacctgcagttttcagaatggccgtgttggacactgatttggatcacattcttccatcttctgttcttcctccattctgggctaagttagtagtgggatcggttgccattgtgtgttttgcacgcagctatgatggagactttgtctttgatgactcagaagctattgttaacaataag

SEQ ID NO: 21898 - DNA, 580 bp, Homo sapiens
  misc_feature 1..580: note = ENST00000475272
  source 1..580: mol_type = unassigned DNA; mol_type = unassigned DNA
aacccggcttcctcctctcccgccgggtccgtctgtccctgcgcctccttcgccgccgactagcgccccctggcctgacgtcaccggcgcgtccgccaatgagctgaggagggacttggctgtggcctgaaagtgacgggagcagcagccaatgttgtaatttagattcgagaagtggtttatcctttgactggaaaagaaaagtagctgcagtattcccccagcacttgctgagagcatgccgtatgccaggctgtgaggctcgagagacaagcagtggaagagttgcggcctgtttcatctctggattgtaaatctgagcctccttctggcccctggaaggggacagcatcaccatggaatgattcctaaccagcataatgctggagccgggagccaccaacctgcagttttcagaatggccgtgttggacactgatttggatcacattcttccatcttctgttcttcctccattctgggctaagttagtagtgggatcggttgccattgtgtgttttgcacgcagctatgatggagactttgtctttgatgactcagaagctattgttaacaataag

SEQ ID NO: 21899 - DNA, 823 bp, Homo sapiens
  misc_feature 1..823: note = ENST00000481475
  source 1..823: mol_type = unassigned DNA; mol_type = unassigned DNA
gtagccaaacctcttcttagccacctcactgtctcaaacatgacctggggcagtgtgtccatctcgtgggaagctcaggagtctgcctttgatagctttcttatagaagttagtaattccgatcacccccatgagaccatggtgctgtctgtgcctggggtgtctcgcagctctgtcatcaccaacctcaaagcttcttctaattacactgcccaccttcatgggctgattggcgggcagcgtgctcagaccctgatggtccaagcaaccacagaaccaaagccacagttgggcacgctaatctttagcaatattactccaaaaagcttcaacatgtcatggaccactcaagctgggctttttgcaaagattgttatcaatgtgagtgacgctcactcactgcatgagtcccagcaattcacagtctcaggagatgcaaagcaagctcacatcacaggcttggtggagaacactggctatgacgtcagtgtggcaggaaccaccttggctggggatcccaccagacccctcactgcctttgtcattacagaggccctgccccttctggaaaacctaaccatttccgacattaatccctacgggttcacagtttcctggatggcatcggagaatgcctttgacagctttctagtaacggtggtggattctgggaagctgctggacccccaggaattcacactttcaggaacccagaggaagctggagcttagaggcctcataactggcattggctatgaggttatggtctctggcttcacccaagggcatcaaaccaagcccttgagggctgagattgttacag

SEQ ID NO: 21900 - DNA, 651 bp, Homo sapiens
  misc_feature 1..651: note = ENST00000460345
  source 1..651: mol_type = unassigned DNA; mol_type = unassigned DNA
cttggtctccccacggggaaggaaaagattttaagaggagggctttgtaagtggaaaaacagttcccactggccctaaacctagtatttaatgatccacgttccaggcaggaaaatatttttgaagaggcatattttttaggcaatttttcctagatgtttgttaggtttctatacattgagagctttttacaaactatagcaagcagggaaacagaggaaccatcctctctgtcaggacctcgattctccaagagacttgactgctactgaggttcagtcggaaactgccctccttacctggcgacccccccgggcatcagtcaccggttacctgctggtctatgaatcagtggatggcacagtcaaggaagtcattgtgggtccagataccacctcctacagcctggcagacctgagcccatccacccactacacagccaagatccaggcactcaatgggcccctgaggagcaatatgatccagaccatcttcaccacaattggactcctgtaccccttccccaaggactgctcccaagcaatgctgaatggagacacgacctctggcctctacaccatttatctgaatggtgataaggctgaggcgctggaagtcttctgtgacatgacctctgatgggggtggatgg

SEQ ID NO: 21901 - DNA, 6281 bp, Homo sapiens
  misc_feature 1..6281: note = ENST00000423613
  source 1..6281: mol_type = unassigned DNA; mol_type = unassigned DNA
gtctgctggagttcattttccccaaaaacggacccaccatgggcagacgcaccattagcacagtccccaaaggagatgcccaggactgtgggatggtcttgtgaaggtcgatgcacagatattgcagaggaatgctttaacttctagaaaataattctttcaagaagatcagggacaactgatttgaagtctactctgtgcttctaaatccccaattctgctgaaagtgagataccctagagccctagagccccagcagcacccagccaaacccacctccaccatgggggccatgactcagctgttggcaggtgtctttcttgctttccttgccctcgctaccgaaggtggggtcctcaagaaagtcatccggcacaagcgacagagtggggtgaacgccaccctgccagaagagaaccagccagtggtgtttaaccacgtttacaacatcaagctgccagtgggatcccagtgttcggtggatctggagtcagccagtggggagaaagacctggcaccgccttcagagcccagcgaaagctttcaggagcacacagtggatggggaaaaccagattgtcttcacacatcgcatcaacatcccccgccgggcctgtggctgtgccgcagcccctgatgttaaggagctgctgagcagactggaggagctggagaacctggtgtcttccctgagggagcaatgtactgcaggagcaggctgctgtctccagcctgccacaggccgcttggacaccaggcccttctgtagcggtcggggcaacttcagcactgaaggatgtggctgtgtctgcgaacctggctggaaaggccccaactgctctgagcccgaatgtccaggcaactgtcaccttcgaggccggtgcattgatgggcagtgcatctgtgacgacggcttcacgggcgaggactgcagccagctggcttgccccagcgactgcaatgaccagggcaagtgcgtaaatggagtctgcatctgtttcgaaggctacgccggggctgactgcagccgtgaaatctgcccagtgccctgcagtgaggagcacggcacatgtgtagatggcttgtgtgtgtgccacgatggctttgcaggcgatgactgcaacaagcctctgtgtctcaacaattgctacaaccgtggacgatgcgtggagaatgagtgcgtgtgtgatgagggtttcacgggcgaagactgcagtgagctcatctgccccaatgactgcttcgaccggggccgctgcatcaatggcacctgctactgcgaagaaggcttcacaggtgaagactgcgggaaacccacctgcccacatgcctgccacacccagggccggtgtgaggaggggcagtgtgtatgtgatgagggctttgccggtgtggactgcagcgagaagaggtgtcctgctgactgtcacaatcgtggccgctgtgtagacgggcggtgtgagtgtgatgatggtttcactggagctgactgtggggagctcaagtgtcccaatggctgcagtggccatggccgctgtgtcaatgggcagtgtgtgtgtgatgagggctatactggggaggactgcagccagctacggtgccccaatgactgtcacagtcggggccgctgtgtcgagggcaaatgtgtatgtgagcaaggcttcaagggctatgactgcagtgacatgagctgccctaatgactgtcaccagcacggccgctgtgtgaatggcatgtgtgtttgtgatgacggctacacaggggaagactgccgggatcgccaatgccccagggactgcagcaacaggggcctctgtgtggacggacagtgcgtctgtgaggacggcttcaccggccctgactgtgcagaactctcctgtccaaatgactgccatggccagggtcgctgtgtgaatgggcagtgcgtgtgccatgaaggatttatgggcaaagactgcaaggagcaaagatgtcccagtgactgtcatggccagggccgctgcgtggacggccagtgcatctgccacgagggcttcacaggcctggactgtggccagcactcctgccccagtgactgcaacaacttaggacaatgcgtctcgggccgctgcatctgcaacgagggctacagcggagaagactgctcagaggtgtctcctcccaaagacctcgttgtgacagaagtgacggaagagacggtcaacctggcctgggacaatgagatgcgggtcacagagtaccttgtcgtgtacacgcccacccacgagggtggtctggaaatgcagttccgtgtgcctggggaccagacgtccaccatcatccaggagctggagcctggtgtggagtactttatccgtgtatttgccatcctggagaacaagaagagcattcctgtcagcgccagggtggccacgtacttacctgcacctgaaggcctgaaattcaagtccatcaaggagacatctgtggaagtggagtgggatcctctagacattgcttttgaaacctgggagatcatcttccggaatatgaataaagaagatgagggagagatcaccaaaagcctgaggaggccagagacctcttaccggcaaactggtctagctcctgggcaagagtatgagatatctctgcacatagtgaaaaacaatacccggggccctggcctgaagagggtgaccaccacacgcttggatgcccccagccagatcgaggtgaaagatgtcacagacaccactgccttgatcacctggttcaagcccctggctgagatcgatggcattgagctgacctacggcatcaaagacgtgccaggagaccgtaccaccatcgatctcacagaggacgagaaccagtactccatcgggaacctgaagcctgacactgagtacgaggtgtccctcatctcccgcagaggtgacatgtcaagcaacccagccaaagagaccttcacaacaggcctcgatgctcccaggaatcttcgacgtgtttcccagacagataacagcatcaccctggaatggaggaatggcaaggcagctattgacagttacagaattaagtatgcccccatctctggaggggaccacgctgaggttgatgttccaaagagccaacaagccacaaccaaaaccacactcacaggtctgaggccgggaactgaatatgggattggagtttctgctgtgaaggaagacaaggagagcaatccagcgaccatcaacgcagccacagagttggacacgcccaaggaccttcaggtttctgaaactgcagagaccagcctgaccctgctctggaagacaccgttggccaaatttgaccgctaccgcctcaattacagtctccccacaggccagtgggtgggagtgcagcttccaagaaacaccacttcctatgtcctgagaggcctggaaccaggacaggagtacaatgtcctcctgacagccgagaaaggcagacacaagagcaagcccgcacgtgtgaaggcatccactgaacaagcccctgagctggaaaacctcaccgtgactgaggttggctgggatggcctcagactcaactggaccgcagctgaccaggcctatgagcactttatcattcaggtgcaggaggccaacaaggtggaggcagctcggaacctcaccgtgcctggcagccttcgggctgtggacataccgggcctcaaggctgctacgccttatacagtctccatctatggggtgatccagggctatagaacaccagtgctctctgctgaggcctccacaggggaaactcccaatttgggagaggtcgtggtggccgaggtgggctgggatgccctcaaactcaactggactgctccagaaggggcctatgagtactttttcattcaggtgcaggaggctgacacagtagaggcagcccagaacctcaccgtcccaggaggactgaggtccacagacctgcctgggctcaaagcagccactcattataccatcaccatccgcggggtcactcaggacttcagcacaacccctctctctgttgaagtcttgacagaggaggttccagatatgggaaacctcacagtgaccgaggttagctgggatgctctcagactgaactggaccacgccagatggaacctatgaccagtttactattcaggtccaggaggctgaccaggtggaagaggctcacaatctcacggttcctggcagcctgcgttccatggaaatcccaggcctcagggctggcactccttacacagtcaccctgcacggcgaggtcaggggccacagcactcgaccccttgctgtagaggtcgtcacagaggatctcccacagctgggagatttagccgtgtctgaggttggctgggatggcctcagactcaactggaccgcagctgacaatgcctatgagcactttgtcattcaggtgcaggaggtcaacaaagtggaggcagcccagaacctcacgttgcctggcagcctcagggctgtggacatcccgggcctcgaggctgccacgccttatagagtctccatctatggggtgatccggggctatagaacaccagtactctctgctgaggcctccacagccatgggctccccaaaggaagtcattttctcagacatcactgaaaattcggctactgtcagctggagggcacccacagcccaagtggagagcttccggattacctatgtgcccattacaggaggtacaccctccatggtaactgtggacggaaccaagactcagaccaggctggtgaaactcatacctggcgtggagtaccttgtcagcatcatcgccatgaagggctttgaggaaagtgaacctgtctcagggtcattcaccacagctctggatggcccatctggcctggtgacagccaacatcactgactcagaagccttggccaggtggcagccagccattgccactgtggacagttatgtcatctcctacacaggcgagaaagtgccagaaattacacgcacggtgtccgggaacacagtggagtatgctctgaccgacctcgagcctgccacggaatacacactgagaatctttgcagagaaagggccccagaagagctcaaccatcactgccaagttcacaacagacctcgattctccaagagacttgactgctactgaggttcagtcggaaactgccctccttacctggcgacccccccgggcatcagtcaccggttacctgctggtctatgaatcagtggatggcacagtcaaggaagtcattgtgggtccagataccacctcctacagcctggcagacctgagcccatccacccactacacagccaagatccaggcactcaatgggcccctgaggagcaatatgatccagaccatcttcaccacaattggactcctgtaccccttccccaaggactgctcccaagcaatgctgaatggagacacgacctctggcctctacaccatttatctgaatggtgataaggctgaggcgctggaagtcttctgtgacatgacctctgatgggggtggatggattgtgttcctgagacgcaaaaacggacgcgagaacttctaccaaaactggaaggcatatgctgctggatttggggaccgcagagaagaattctggcttgggctggacaacctgaacaaaatcacagcccaggggcagtacgagctccgggtggacctgcgggaccatggggagacagcctttgctgtctatgacaagttcagcgtgggagatgccaagactcgctacaagctgaaggtggaggggtacagtgggacagcaggtgactccatggcctaccacaatggcagatccttctccacctttgacaaggacacagattcagccatcaccaactgtgctctgtcctacaaaggggctttctggtacaggaactgtcaccgtgtcaacctgatggggagatatggggacaataaccacagtcagggcgttaactggttccactggaagggccacgaacactcaatccagtttgctgagatgaagctgagaccaagcaacttcagaaatcttgaaggcaggcgcaaacgggcataaattccagggaccactgggtgagagaggaataaggcccagagcgaggaaaggattttaccaaagcatcaatacaaccagcccaaccatcggtccacacctgggcatttggtgagagtcaaagctgaccatggatccctggggccaacggcaacagcatgggcctcacctcctctgtgatttctttctttgcaccaaagacatcagtctccaa

SEQ ID NO: 21902 - DNA, 7641 bp, Homo sapiens
  misc_feature 1..7641: note = ENST00000350763
  source 1..7641: mol_type = unassigned DNA; mol_type = unassigned DNA
aattcgccaactgaaaaagtgggaaaggatgtctggaggcgaggcgtcccattacagaggaaggagctcgctatataagccagccaaagttggctgcaccggccacagcctgcctactgtcacccgcctctcccgcgcgcagatacacgcccccgcctccgtgggcacaaaggcagcgctgctggggaactcgggggaacgcgcacgtgggaaccgccgcagctccacactccaggtacttcttccaaggacctaggtctctcgcccatcggaaagaaaataattctttcaagaagatcagggacaactgatttgaagtctactctgtgcttctaaatccccaattctgctgaaagtgagataccctagagccctagagccccagcagcacccagccaaacccacctccaccatgggggccatgactcagctgttggcaggtgtctttcttgctttccttgccctcgctaccgaaggtggggtcctcaagaaagtcatccggcacaagcgacagagtggggtgaacgccaccctgccagaagagaaccagccagtggtgtttaaccacgtttacaacatcaagctgccagtgggatcccagtgttcggtggatctggagtcagccagtggggagaaagacctggcaccgccttcagagcccagcgaaagctttcaggagcacacagtggatggggaaaaccagattgtcttcacacatcgcatcaacatcccccgccgggcctgtggctgtgccgcagcccctgatgttaaggagctgctgagcagactggaggagctggagaacctggtgtcttccctgagggagcaatgtactgcaggagcaggctgctgtctccagcctgccacaggccgcttggacaccaggcccttctgtagcggtcggggcaacttcagcactgaaggatgtggctgtgtctgcgaacctggctggaaaggccccaactgctctgagcccgaatgtccaggcaactgtcaccttcgaggccggtgcattgatgggcagtgcatctgtgacgacggcttcacgggcgaggactgcagccagctggcttgccccagcgactgcaatgaccagggcaagtgcgtaaatggagtctgcatctgtttcgaaggctacgccggggctgactgcagccgtgaaatctgcccagtgccctgcagtgaggagcacggcacatgtgtagatggcttgtgtgtgtgccacgatggctttgcaggcgatgactgcaacaagcctctgtgtctcaacaattgctacaaccgtggacgatgcgtggagaatgagtgcgtgtgtgatgagggtttcacgggcgaagactgcagtgagctcatctgccccaatgactgcttcgaccggggccgctgcatcaatggcacctgctactgcgaagaaggcttcacaggtgaagactgcgggaaacccacctgcccacatgcctgccacacccagggccggtgtgaggaggggcagtgtgtatgtgatgagggctttgccggtgtggactgcagcgagaagaggtgtcctgctgactgtcacaatcgtggccgctgtgtagacgggcggtgtgagtgtgatgatggtttcactggagctgactgtggggagctcaagtgtcccaatggctgcagtggccatggccgctgtgtcaatgggcagtgtgtgtgtgatgagggctatactggggaggactgcagccagctacggtgccccaatgactgtcacagtcggggccgctgtgtcgagggcaaatgtgtatgtgagcaaggcttcaagggctatgactgcagtgacatgagctgccctaatgactgtcaccagcacggccgctgtgtgaatggcatgtgtgtttgtgatgacggctacacaggggaagactgccgggatcgccaatgccccagggactgcagcaacaggggcctctgtgtggacggacagtgcgtctgtgaggacggcttcaccggccctgactgtgcagaactctcctgtccaaatgactgccatggccagggtcgctgtgtgaatgggcagtgcgtgtgccatgaaggatttatgggcaaagactgcaaggagcaaagatgtcccagtgactgtcatggccagggccgctgcgtggacggccagtgcatctgccacgagggcttcacaggcctggactgtggccagcactcctgccccagtgactgcaacaacttaggacaatgcgtctcgggccgctgcatctgcaacgagggctacagcggagaagactgctcagaggtgtctcctcccaaagacctcgttgtgacagaagtgacggaagagacggtcaacctggcctgggacaatgagatgcgggtcacagagtaccttgtcgtgtacacgcccacccacgagggtggtctggaaatgcagttccgtgtgcctggggaccagacgtccaccatcatccaggagctggagcctggtgtggagtactttatccgtgtatttgccatcctggagaacaagaagagcattcctgtcagcgccagggtggccacgtacttacctgcacctgaaggcctgaaattcaagtccatcaaggagacatctgtggaagtggagtgggatcctctagacattgcttttgaaacctgggagatcatcttccggaatatgaataaagaagatgagggagagatcaccaaaagcctgaggaggccagagacctcttaccggcaaactggtctagctcctgggcaagagtatgagatatctctgcacatagtgaaaaacaatacccggggccctggcctgaagagggtgaccaccacacgcttggatgcccccagccagatcgaggtgaaagatgtcacagacaccactgccttgatcacctggttcaagcccctggctgagatcgatggcattgagctgacctacggcatcaaagacgtgccaggagaccgtaccaccatcgatctcacagaggacgagaaccagtactccatcgggaacctgaagcctgacactgagtacgaggtgtccctcatctcccgcagaggtgacatgtcaagcaacccagccaaagagaccttcacaacaggcctcgatgctcccaggaatcttcgacgtgtttcccagacagataacagcatcaccctggaatggaggaatggcaaggcagctattgacagttacagaattaagtatgcccccatctctggaggggaccacgctgaggttgatgttccaaagagccaacaagccacaaccaaaaccacactcacaggtctgaggccgggaactgaatatgggattggagtttctgctgtgaaggaagacaaggagagcaatccagcgaccatcaacgcagccacagagttggacacgcccaaggaccttcaggtttctgaaactgcagagaccagcctgaccctgctctggaagacaccgttggccaaatttgaccgctaccgcctcaattacagtctccccacaggccagtgggtgggagtgcagcttccaagaaacaccacttcctatgtcctgagaggcctggaaccaggacaggagtacaatgtcctcctgacagccgagaaaggcagacacaagagcaagcccgcacgtgtgaaggcatccactgaacaagcccctgagctggaaaacctcaccgtgactgaggttggctgggatggcctcagactcaactggaccgcagctgaccaggcctatgagcactttatcattcaggtgcaggaggccaacaaggtggaggcagctcggaacctcaccgtgcctggcagccttcgggctgtggacataccgggcctcaaggctgctacgccttatacagtctccatctatggggtgatccagggctatagaacaccagtgctctctgctgaggcctccacaggggaaactcccaatttgggagaggtcgtggtggccgaggtgggctgggatgccctcaaactcaactggactgctccagaaggggcctatgagtactttttcattcaggtgcaggaggctgacacagtagaggcagcccagaacctcaccgtcccaggaggactgaggtccacagacctgcctgggctcaaagcagccactcattataccatcaccatccgcggggtcactcaggacttcagcacaacccctctctctgttgaagtcttgacagaggaggttccagatatgggaaacctcacagtgaccgaggttagctgggatgctctcagactgaactggaccacgccagatggaacctatgaccagtttactattcaggtccaggaggctgaccaggtggaagaggctcacaatctcacggttcctggcagcctgcgttccatggaaatcccaggcctcagggctggcactccttacacagtcaccctgcacggcgaggtcaggggccacagcactcgaccccttgctgtagaggtcgtcacagaggatctcccacagctgggagatttagccgtgtctgaggttggctgggatggcctcagactcaactggaccgcagctgacaatgcctatgagcactttgtcattcaggtgcaggaggtcaacaaagtggaggcagcccagaacctcacgttgcctggcagcctcagggctgtggacatcccgggcctcgaggctgccacgccttatagagtctccatctatggggtgatccggggctatagaacaccagtactctctgctgaggcctccacagccaaagaacctgaaattggaaacttaaatgtttctgacataactcccgagagcttcaatctctcctggatggctaccgatgggatcttcgagacctttaccattgaaattattgattccaataggttgctggagactgtggaatataatatctctggtgctgaacgaactgcccatatctcagggctaccccctagtactgattttattgtctacctctctggacttgctcccagcatccggaccaaaaccatcagtgccacagccacgacagaggccctgccccttctggaaaacctaaccatttccgacattaatccctacgggttcacagtttcctggatggcatcggagaatgcctttgacagctttctagtaacggtggtggattctgggaagctgctggacccccaggaattcacactttcaggaacccagaggaagctggagcttagaggcctcataactggcattggctatgaggttatggtctctggcttcacccaagggcatcaaaccaagcccttgagggctgagattgttacagaagccgaaccggaagttgacaaccttctggtttcagatgccaccccagacggtttccgtctgtcctggacagctgatgaaggggtcttcgacaattttgttctcaaaatcagagataccaaaaagcagtctgagccactggaaataaccctacttgcccccgaacgtaccagggacataacaggtctcagagaggctactgaatacgaaattgaactctatggaataagcaaaggaaggcgatcccagacagtcagtgctatagcaacaacagccatgggctccccaaaggaagtcattttctcagacatcactgaaaattcggctactgtcagctggagggcacccacagcccaagtggagagcttccggattacctatgtgcccattacaggaggtacaccctccatggtaactgtggacggaaccaagactcagaccaggctggtgaaactcatacctggcgtggagtaccttgtcagcatcatcgccatgaagggctttgaggaaagtgaacctgtctcagggtcattcaccacagctctggatggcccatctggcctggtgacagccaacatcactgactcagaagccttggccaggtggcagccagccattgccactgtggacagttatgtcatctcctacacaggcgagaaagtgccagaaattacacgcacggtgtccgggaacacagtggagtatgctctgaccgacctcgagcctgccacggaatacacactgagaatctttgcagagaaagggccccagaagagctcaaccatcactgccaagttcacaacagacctcgattctccaagagacttgactgctactgaggttcagtcggaaactgccctccttacctggcgacccccccgggcatcagtcaccggttacctgctggtctatgaatcagtggatggcacagtcaaggaagtcattgtgggtccagataccacctcctacagcctggcagacctgagcccatccacccactacacagccaagatccaggcactcaatgggcccctgaggagcaatatgatccagaccatcttcaccacaattggactcctgtaccccttccccaaggactgctcccaagcaatgctgaatggagacacgacctctggcctctacaccatttatctgaatggtgataaggctgaggcgctggaagtcttctgtgacatgacctctgatgggggtggatggattgtgttcctgagacgcaaaaacggacgcgagaacttctaccaaaactggaaggcatatgctgctggatttggggaccgcagagaagaattctggcttgggctggacaacctgaacaaaatcacagcccaggggcagtacgagctccgggtggacctgcgggaccatggggagacagcctttgctgtctatgacaagttcagcgtgggagatgccaagactcgctacaagctgaaggtggaggggtacagtgggacagcaggtgactccatggcctaccacaatggcagatccttctccacctttgacaaggacacagattcagccatcaccaactgtgctctgtcctacaaaggggctttctggtacaggaactgtcaccgtgtcaacctgatggggagatatggggacaataaccacagtcagggcgttaactggttccactggaagggccacgaacactcaatccagtttgctgagatgaagctgagaccaagcaacttcagaaatcttgaaggcaggcgcaaacgggcataaattccagggaccactgggtgagagaggaataaggcccagagcgaggaaaggattttaccaaagcatcaatacaaccagcccaaccatcggtccacacctgggcatttggtgagagtcaaagctgaccatggatccctggggccaacggcaacagcatgggcctcacctcctctgtgatttctttctttgcaccaaagacatcagtctccaacatgtttctgttttgttgtttgattcagcaaaaatctcccagtgacaacatcgcaatagttttttacttctcttaggtggctctgggaatgggagaggggtaggatgtacaggggtagtttgttttagaaccagccgtattttacatgaagctgtataattaattgtcattatttttgttagcaaagattaaatgtgtcattggaagccatccctttttttacatttcatacaacagaaaccagaaaagcaatactgtttccattttaaggatatgattaatattattaatataataatgatgatgatgatgatgaaaactaaggatttttcaagagatctttctttccaaaacatttctggacagtacctgattgtattttttttttaaataaaagcacaagtacttttga

SEQ ID NO: 21903 - DNA, 7508 bp, Homo sapiens
  misc_feature 1..7508: note = ENST00000535648
  source 1..7508: mol_type = unassigned DNA; mol_type = unassigned DNA
aattcgccaactgaaaaagtgggaaaggatgtctggaggcgaggcgtcccattacagaggaaggagctcgctatataagccagccaaagttggctgcaccggccacagcctgcctactgtcacccgcctctcccgcgcgcagatacacgcccccgcctccgtgggcacaaaggcagcgctgctggggaactcgggggaacgcgcacgtgggaaccgccgcagctccacactccaggtacttcttccaaggacctaggtctctcgcccatcggaaagaaaataattctttcaagaagatcagggacaactgatttgaagtctactctgtgcttctaaatccccaattctgctgaaagtgagataccctagagccctagagccccagcagcacccagccaaacccacctccaccatgggggccatgactcagctgttggcaggtgtctttcttgctttccttgccctcgctaccgaaggtggggtcctcaagaaagtcatccggcacaagcgacagagtggggtgaacgccaccctgccagaagagaaccagccagtggtgtttaaccacgtttacaacatcaagctgccagtgggatcccagtgttcggtggatctggagtcagccagtggggagaaagacctggcaccgccttcagagcccagcgaaagctttcaggagcacacagtggatggggaaaaccagattgtcttcacacatcgcatcaacatcccccgccgggcctgtggctgtgccgcagcccctgatgttaaggagctgctgagcagactggaggagctggagaacctggtgtcttccctgagggagcaatgtactgcaggagcaggctgctgtctccagcctgccacaggccgcttggacaccaggcccttctgtagcggtcggggcaacttcagcactgaaggatgtggctgtgtctgcgaacctggctggaaaggccccaactgctctgagcccgaatgtccaggcaactgtcaccttcgaggccggtgcattgatgggcagtgcatctgtgacgacggcttcacgggcgaggactgcagccagctggcttgccccagcgactgcaatgaccagggcaagtgcgtaaatggagtctgcatctgtttcgaaggctacgccggggctgactgcagccgtgaaatctgcccagtgccctgcagtgaggagcacggcacatgtgtagatggcttgtgtgtgtgccacgatggctttgcaggcgatgactgcaacaagcctctgtgtctcaacaattgctacaaccgtggacgatgcgtggagaatgagtgcgtgtgtgatgagggtttcacgggcgaagactgcagtgagctcatctgccccaatgactgcttcgaccggggccgctgcatcaatggcacctgctactgcgaagaaggcttcacaggtgaagactgcgggaaacccacctgcccacatgcctgccacacccagggccggtgtgaggaggggcagtgtgtatgtgatgagggctttgccggtgtggactgcagcgagaagaggtgtcctgctgactgtcacaatcgtggccgctgtgtagacgggcggtgtgagtgtgatgatggtttcactggagctgactgtggggagctcaagtgtcccaatggctgcagtggccatggccgctgtgtcaatgggcagtgtgtgtgtgatgagggctatactggggaggactgcagccagctacggtgccccaatgactgtcacagtcggggccgctgtgtcgagggcaaatgtgtatgtgagcaaggcttcaagggctatgactgcagtgacatgagctgccctaatgactgtcaccagcacggccgctgtgtgaatggcatgtgtgtttgtgatgacggctacacaggggaagactgccgggatcgccaatgccccagggactgcagcaacaggggcctctgtgtggacggacagtgcgtctgtgaggacggcttcaccggccctgactgtgcagaactctcctgtccaaatgactgccatggccagggtcgctgtgtgaatgggcagtgcgtgtgccatgaaggatttatgggcaaagactgcaaggagcaaagatgtcccagtgactgtcatggccagggccgctgcgtggacggccagtgcatctgccacgagggcttcacaggcctggactgtggccagcactcctgccccagtgactgcaacaacttaggacaatgcgtctcgggccgctgcatctgcaacgagggctacagcggagaagactgctcagaggtgtctcctcccaaagacctcgttgtgacagaagtgacggaagagacggtcaacctggcctgggacaatgagatgcgggtcacagagtaccttgtcgtgtacacgcccacccacgagggtggtctggaaatgcagttccgtgtgcctggggaccagacgtccaccatcatccaggagctggagcctggtgtggagtactttatccgtgtatttgccatcctggagaacaagaagagcattcctgtcagcgccagggtggccacgtacttacctgcacctgaaggcctgaaattcaagtccatcaaggagacatctgtggaagtggagtgggatcctctagacattgcttttgaaacctgggagatcatcttccggaatatgaataaagaagatgagggagagatcaccaaaagcctgaggaggccagagacctcttaccggcaaactggtctagctcctgggcaagagtatgagatatctctgcacatagtgaaaaacaatacccggggccctggcctgaagagggtgaccaccacacgcttggatgcccccagccagatcgaggtgaaagatgtcacagacaccactgccttgatcacctggttcaagcccctggctgagatcgatggcattgagctgacctacggcatcaaagacgtgccaggagaccgtaccaccatcgatctcacagaggacgagaaccagtactccatcgggaacctgaagcctgacactgagtacgaggtgtccctcatctcccgcagaggtgacatgtcaagcaacccagccaaagagaccttcacaacaggcctcgatgctcccaggaatcttcgacgtgtttcccagacagataacagcatcaccctggaatggaggaatggcaaggcagctattgacagttacagaattaagtatgcccccatctctggaggggaccacgctgaggttgatgttccaaagagccaacaagccacaaccaaaaccacactcacaggtctgaggccgggaactgaatatgggattggagtttctgctgtgaaggaagacaaggagagcaatccagcgaccatcaacgcagccacagagttggacacgcccaaggaccttcaggtttctgaaactgcagagaccagcctgaccctgctctggaagacaccgttggccaaatttgaccgctaccgcctcaattacagtctccccacaggccagtgggtgggagtgcagcttccaagaaacaccacttcctatgtcctgagaggcctggaaccaggacaggagtacaatgtcctcctgacagccgagaaaggcagacacaagagcaagcccgcacgtgtgaaggcatccactgccaaagaacctgaaattggaaacttaaatgtttctgacataactcccgagagcttcaatctctcctggatggctaccgatgggatcttcgagacctttaccattgaaattattgattccaataggttgctggagactgtggaatataatatctctggtgctgaacgaactgcccatatctcagggctaccccctagtactgattttattgtctacctctctggacttgctcccagcatccggaccaaaaccatcagtgccacagccacgacagaaccaaagccacagttgggcacgctaatctttagcaatattactccaaaaagcttcaacatgtcatggaccactcaagctgggctttttgcaaagattgttatcaatgtgagtgacgctcactcactgcatgagtcccagcaattcacagtctcaggagatgcaaagcaagctcacatcacaggcttggtggagaacactggctatgacgtcagtgtggcaggaaccaccttggctggggatcccaccagacccctcactgcctttgtcattacagaagccgaaccggaagttgacaaccttctggtttcagatgccaccccagacggtttccgtctgtcctggacagctgatgaaggggtcttcgacaattttgttctcaaaatcagagataccaaaaagcagtctgagccactggaaataaccctacttgcccccgaacgtaccagggacataacaggtctcagagaggctactgaatacgaaattgaactctatggaataagcaaaggaaggcgatcccagacagtcagtgctatagcaacaacagccatgggctccccaaaggaagtcattttctcagacatcactgaaaattcggctactgtcagctggagggcacccacagcccaagtggagagcttccggattacctatgtgcccattacaggaggtacaccctccatggtaactgtggacggaaccaagactcagaccaggctggtgaaactcatacctggcgtggagtaccttgtcagcatcatcgccatgaagggctttgaggaaagtgaacctgtctcagggtcattcaccacagctctggatggcccatctggcctggtgacagccaacatcactgactcagaagccttggccaggtggcagccagccattgccactgtggacagttatgtcatctcctacacaggcgagaaagtgccagaaattacacgcacggtgtccgggaacacagtggagtatgctctgaccgacctcgagcctgccacggaatacacactgagaatctttgcagagaaagggccccagaagagctcaaccatcactgccaagttcacaacagacctcgattctccaagagacttgactgctactgaggttcagtcggaaactgccctccttacctggcgacccccccgggcatcagtcaccggttacctgctggtctatgaatcagtggatggcacagtcaaggaagtcattgtgggtccagataccacctcctacagcctggcagacctgagcccatccacccactacacagccaagatccaggcactcaatgggcccctgaggagcaatatgatccagaccatcttcaccacaattggactcctgtaccccttccccaaggactgctcccaagcaatgctgaatggagacacgacctctggcctctacaccatttatctgaatggtgataaggctgaggcgctggaagtcttctgtgacatgacctctgatgggggtggatggattgtgttcctgagacgcaaaaacggacgcgagaacttctaccaaaactggaaggcatatgctgctggatttggggaccgcagagaagaattctggcttgggctggacaacctgaacaaaatcacagcccaggggcagtacgagctccgggtggacctgcgggaccatggggagacagcctttgctgtctatgacaagttcagcgtgggagatgccaagactcgctacaagctgaaggtggaggggtacagtgggacagcaggtgactccatggcctaccacaatggcagatccttctccacctttgacaaggacacagattcagccatcaccaactgtgctctgtcctacaaaggggctttctggtacaggaactgtcaccgtgtcaacctgatggggagatatggggacaataaccacagtcagggcgttaactggttccactggaagggccacgaacactcaatccagtttgctgagatgaagctgagaccaagcaacttcagaaatcttgaaggcaggcgcaaacgggcataaattccagggaccactgggtgagagaggaataaggcccagagcgaggaaaggattttaccaaagcatcaatacaaccagcccaaccatcggtccacacctgggcatttggtgagagtcaaagctgaccatggatccctggggccaacggcaacagcatgggcctcacctcctctgtgatttctttctttgcaccaaagacatcagtctccaacatgtttctgttttgttgtttgattcagcaaaaatctcccagtgacaacatcgcaatagttttttacttctcttaggtggctctgggaatgggagaggggtaggatgtacaggggtagtttgttttagaaccagccgtattttacatgaagctgtataattaattgtcattatttttgttagcaaagattaaatgtgtcattggaagccatccctttttttacatttcatacaacagaaaccagaaaagcaatactgtttccattttaaggatatgattaatattattaatataataatgatgatgatgatgatgaaaactaaggatttttcaagagatctttctttccaaaacatttctggacagtacctgattgtattttttttttaaataaaagcacaagtacttttgagtttgttattttgctttgaattgttgagtctgaatttcaccaaagccaatcatttgaacaaagcggggaatgttgggataggaaaggtaagtagggatagtggtcaagtgggaggggtggaaaggagactaaagactgggagagagggaagcactttttttaaataaagttgaacacacttgggaaaagcttacaggccaggcctgtaatcccaacactttgggaggccaaggtgggaggatagcttaaccccaggagtttgagaccagcctgagcaacatagtgagaacttgtctctacagaaaaaaaaaaaaaaaaaaatttaattaggcaagcgtggtagtgcgcacctgtcgtcccagctactcaggaggctgaggtaggaaaatcactggagcccaggagttagaggttacagtgagctatgatcacactactgcactccagcctgggcaacagagggagaccctgtctctaaataaaaaaagaaaagaaaaaaaaagcttacaacttgagattcagcatcttgctcagtatttccaagactaatagattatggtttaaaagatgcttttatactcattttctaatgcaactcctagaaactctatgatatagttgaggtaagtattgttaccacacatgggctaagatccccagaggcagactgcctgagttcaattcttggctccaccattcccaagttccctaacctctctatgcctcagtttcctcttctgtaaagtagggacactcatacttctcatttcagaacatttttgtgaagaataaattatgttatccatttgaggcccttagaatggtacccggtgtatattaagtgctagtacatgttagctatcatcattatcactttatatgagatggactggggttcatagaaacccaatgacttgattgtggctactactcaataaataatagaatttggattt

SEQ ID NO: 21904 - DNA, 734 bp, Homo sapiens
  misc_feature 1..734: note = ENST00000534839
  source 1..734: mol_type = unassigned DNA; mol_type = unassigned DNA
ggaaggagctcgctatataagccagccaaagttggctgcaccggccacagcctgcctactgtcacccgcctctcccgcgcgcagatacacgcccccgcctccgtgggcacaaaggcagcgctgctggggaactcgggggaacgcgcacgtgggaaccgccgcagctccacactccaggtacttcttccaaggacctaggtctctcgcccatcggaaagatttctatagacacctagctgtgctttcttacaagaaaacatatccactggaccaaagcgcagcccccttcatgctgaagccacttcagtttgaaacgtaaaaaaaaataattctttcaagaagatcagggacaactgatttgaagtctactctgtgcttctaaatccccaattctgctgaaagtgagataccctagagccctagagccccagcagcacccagccaaacccacctccaccatgggggccatgactcagctgttggcaggtgtctttcttgctttccttgccctcgctaccgaaggtggggtcctcaagaaagtcatccggcacaagcgacagagtggggtgaacgccaccctgccagaagagaaccagccagtggtgtttaaccacgtttacaacatcaagctgccagtgggatcccagtgttcggtggatctggagtcagccagtggggagaaagacctggcaccgccttcagagcccagcgaaagctttcaggagcacacagtg

SEQ ID NO: 21905 - DNA, 69 bp, Homo sapiens
  misc_feature 1..69: note = ENST00000635336
  source 1..69: mol_type = unassigned DNA; mol_type = unassigned DNA
gcctccacagaagccgaaccggaagttgacaaccttctggtttcagatgccaccccagacggtttccgt

SEQ ID NO: 21906 - DNA, 386 bp, Homo sapiens
  misc_feature 1..386: note = ENST00000473855
  source 1..386: mol_type = unassigned DNA; mol_type = unassigned DNA
ccgcctcaattacagtctccccacaggccagtgggtgggagtgcagcttccaagaaacaccacttcctatgtcctgagaggcctggaaccaggacaggagtacaatgtcctcctgacagccgagaaaggcagacacaagagcaagcccgcacgtgtgaaggcatccactgaagccgaaccggaagttgacaaccttctggtttcagatgccaccccagacggtttccgtctgtcctggacagctgatgaaggggtcttcgacaattttgttctcaaaatcagagataccaaaaagcagtctgagccactggaaataaccctacttgcccccgaacgtaccagggacataacaggtctcagagaggctactgaatacgaaattgaac

SEQ ID NO: 21907 - DNA, 696 bp, Homo sapiens
  misc_feature 1..696: note = ENST00000476680
  source 1..696: mol_type = unassigned DNA; mol_type = unassigned DNA
acctcacagtgaccgaggttagctgggatgctctcagactgaactggaccacgccagatggaacctatgaccagtttactattcaggtccaggaggctgaccaggtggaagaggctcacaatctcacggttcctggcagcctgcgttccatggaaatcccaggcctcagggctggcactccttacacagtcaccctgcacggcgaggtcaggggccacagcactcgaccccttgctgtagaggtcgtcacagccatgggctccccaaaggaagtcattttctcagacatcactgaaaattcggctactgtcagctggagggcacccacagcccaagtggagagcttccggattacctatgtgcccattacaggaggtacaccctccatggtaactgtggacggaaccaagactcagaccaggctggtgaaactcatacctggcgtggagtaccttgtcagcatcatcgccatgaagggctttgaggaaagtgaacctgtctcagggtcattcaccacagctctggatggcccatctggcctggtgacagccaacatcactgactcagaagccttggccaggtggcagccagccattgccactgtggacagttatgtcatctcctacacaggcgagaaagtgccagaaattacacgcacggtgtccgggaacacagtggagtatgctctgaccgacc

SEQ ID NO: 21908 - DNA, 566 bp, Homo sapiens
  misc_feature 1..566: note = ENST00000498724
  source 1..566: mol_type = unassigned DNA; mol_type = unassigned DNA
gacacaagagcaagcccgcacgtgtgaaggcatccactgccatgggctccccaaaggaagtcattttctcagacatcactgaaaattcggctactgtcagctggagggcacccacagcccaagtggagagcttccggattacctatgtgcccattacaggaggtacaccctccatggtaactgtggacggaaccaagactcagaccaggctggtgaaactcatacctggcgtggagtaccttgtcagcatcatcgccatgaagggctttgaggaaagtgaacctgtctcagggtcattcaccacagctctggatggcccatctggcctggtgacagccaacatcactgactcagaagccttggccaggtggcagccagccattgccactgtggacagttatgtcatctcctacacaggcgagaaagtgccagaaattacacgcacggtgtccgggaacacagtggagtatgctctgaccgacctcgagcctgccacggaatacacactgagaatctttgcagagaaagggccccagaagagctcaaccatcactgccaagttcaca

SEQ ID NO: 21909 - DNA, 1844 bp, Homo sapiens
  misc_feature 1..1844: note = ENST00000544972
  source 1..1844: mol_type = unassigned DNA; mol_type = unassigned DNA
ccctgagctggaaaacctcaccgtgactgaggttggctgggatggcctcagactcaactggaccgcagctgaccaggcctatgagcactttatcattcaggtgcaggaggccaacaaggtggaggcagctcggaacctcaccgtgcctggcagccttcgggctgtggacataccgggcctcaaggctgctacgccttatacagtctccatctatggggtgatccagggctatagaacaccagtgctctctgctgaggcctccacagccaaagaacctgaaattggaaacttaaatgtttctgacataactcccgagagcttcaatctctcctggatggctaccgatgggatcttcgagacctttaccattgaaattattgattccaataggttgctggagactgtggaatataatatctctggtgctgaacgaactgcccatatctcagggctaccccctagtactgattttattgtctacctctctggacttgctcccagcatccggaccaaaaccatcagtgccacagccacgacagaagccgaaccggaagttgacaaccttctggtttcagatgccaccccagacggtttccgtctgtcctggacagctgatgaaggggtcttcgacaattttgttctcaaaatcagagataccaaaaagcagtctgagccactggaaataaccctacttgcccccgaacgtaccagggacataacaggtctcagagaggctactgaatacgaaattgaactctatggaataagcaaaggaaggcgatcccagacagtcagtgctatagcaacaacagccatgggctccccaaaggaagtcattttctcagacatcactgaaaattcggctactgtcagctggagggcacccacagcccaagtggagagcttccggattacctatgtgcccattacaggaggtacaccctccatggtaactgtggacggaaccaagactcagaccaggctggtgaaactcatacctggcgtggagtaccttgtcagcatcatcgccatgaagggctttgaggaaagtgaacctgtctcagggtcattcaccacagctctggatggcccatctggcctggtgacagccaacatcactgactcagaagccttggccaggtggcagccagccattgccactgtggacagttatgtcatctcctacacaggcgagaaagtgccagaaattacacgcacggtgtccgggaacacagtggagtatgctctgaccgacctcgagcctgccacggaatacacactgagaatctttgcagagaaagggccccagaagagctcaaccatcactgccaagttcacaacagacctcgattctccaagagacttgactgctactgaggttcagtcggaaactgccctccttacctggcgacccccccgggcatcagtcaccggttacctgctggtctatgaatcagtggatggcacagtcaaggaagtcattgtgggtccagataccacctcctacagcctggcagacctgagcccatccacccactacacagccaagatccaggcactcaatgggcccctgaggagcaatatgatccagaccatcttcaccacaattggactcctgtaccccttccccaaggactgctcccaagcaatgctgaatggagacacgacctctggcctctacaccatttatctgaatggtgataaggctgaggcgctggaagtcttctgtgacatgacctctgatgggggtggatggattgtgttcctgagacgcaaaaacggacgcgagaacttctaccaaaactggaaggcatatgctgctggatttggggaccgcagagaag

SEQ ID NO: 21910 - DNA, 5517 bp, Homo sapiens
  misc_feature 1..5517: note = ENST00000542877
  source 1..5517: mol_type = unassigned DNA; mol_type = unassigned DNA
atgggggccatgactcagctgttggcaggtgtctttcttgctttccttgccctcgctaccgaaggtggggtcctcaagaaagtcatccggcacaagcgacagagtggggtgaacgccaccctgccagaagagaaccagccagtggtgtttaaccacgtttacaacatcaagctgccagtgggatcccagtgttcggtggatctggagtcagccagtggggagaaagacctggcaccgccttcagagcccagcgaaagctttcaggagcacacagtggatggggaaaaccagattgtcttcacacatcgcatcaacatcccccgccgggcctgtggctgtgccgcagcccctgatgttaaggagctgctgagcagactggaggagctggagaacctggtgtcttccctgagggagcaatgtactgcaggagcaggctgctgtctccagcctgccacaggccgcttggacaccaggcccttctgtagcggtcggggcaacttcagcactgaaggatgtggctgtgtctgcgaacctggctggaaaggccccaactgctctgagcccgaatgtccaggcaactgtcaccttcgaggccggtgcattgatgggcagtgcatctgtgacgacggcttcacgggcgaggactgcagccagctggcttgccccagcgactgcaatgaccagggcaagtgcgtaaatggagtctgcatctgtttcgaaggctacgccggggctgactgcagccgtgaaatctgcccagtgccctgcagtgaggagcacggcacatgtgtagatggcttgtgtgtgtgccacgatggctttgcaggcgatgactgcaacaagcctctgtgtctcaacaattgctacaaccgtggacgatgcgtggagaatgagtgcgtgtgtgatgagggtttcacgggcgaagactgcagtgagctcatctgccccaatgactgcttcgaccggggccgctgcatcaatggcacctgctactgcgaagaaggcttcacaggtgaagactgcgggaaacccacctgcccacatgcctgccacacccagggccggtgtgaggaggggcagtgtgtatgtgatgagggctttgccggtgtggactgcagcgagaagaggtgtcctgctgactgtcacaatcgtggccgctgtgtagacgggcggtgtgagtgtgatgatggtttcactggagctgactgtggggagctcaagtgtcccaatggctgcagtggccatggccgctgtgtcaatgggcagtgtgtgtgtgatgagggctatactggggaggactgcagccagctacggtgccccaatgactgtcacagtcggggccgctgtgtcgagggcaaatgtgtatgtgagcaaggcttcaagggctatgactgcagtgacatgagctgccctaatgactgtcaccagcacggccgctgtgtgaatggcatgtgtgtttgtgatgacggctacacaggggaagactgccgggatcgccaatgccccagggactgcagcaacaggggcctctgtgtggacggacagtgcgtctgtgaggacggcttcaccggccctgactgtgcagaactctcctgtccaaatgactgccatggccagggtcgctgtgtgaatgggcagtgcgtgtgccatgaaggatttatgggcaaagactgcaaggagcaaagatgtcccagtgactgtcatggccagggccgctgcgtggacggccagtgcatctgccacgagggcttcacaggcctggactgtggccagcactcctgccccagtgactgcaacaacttaggacaatgcgtctcgggccgctgcatctgcaacgagggctacagcggagaagactgctcagaggtgtctcctcccaaagacctcgttgtgacagaagtgacggaagagacggtcaacctggcctgggacaatgagatgcgggtcacagagtaccttgtcgtgtacacgcccacccacgagggtggtctggaaatgcagttccgtgtgcctggggaccagacgtccaccatcatccaggagctggagcctggtgtggagtactttatccgtgtatttgccatcctggagaacaagaagagcattcctgtcagcgccagggtggccacgtacttacctgcacctgaaggcctgaaattcaagtccatcaaggagacatctgtggaagtggagtgggatcctctagacattgcttttgaaacctgggagatcatcttccggaatatgaataaagaagatgagggagagatcaccaaaagcctgaggaggccagagacctcttaccggcaaactggtctagctcctgggcaagagtatgagatatctctgcacatagtgaaaaacaatacccggggccctggcctgaagagggtgaccaccacacgcttggatgcccccagccagatcgaggtgaaagatgtcacagacaccactgccttgatcacctggttcaagcccctggctgagatcgatggcattgagctgacctacggcatcaaagacgtgccaggagaccgtaccaccatcgatctcacagaggacgagaaccagtactccatcgggaacctgaagcctgacactgagtacgaggtgtccctcatctcccgcagaggtgacatgtcaagcaacccagccaaagagaccttcacaacaggcctcgatgctcccaggaatcttcgacgtgtttcccagacagataacagcatcaccctggaatggaggaatggcaaggcagctattgacagttacagaattaagtatgcccccatctctggaggggaccacgctgaggttgatgttccaaagagccaacaagccacaaccaaaaccacactcacaggtctgaggccgggaactgaatatgggattggagtttctgctgtgaaggaagacaaggagagcaatccagcgaccatcaacgcagccacagagttggacacgcccaaggaccttcaggtttctgaaactgcagagaccagcctgaccctgctctggaagacaccgttggccaaatttgaccgctaccgcctcaattacagtctccccacaggccagtgggtgggagtgcagcttccaagaaacaccacttcctatgtcctgagaggcctggaaccaggacaggagtacaatgtcctcctgacagccgagaaaggcagacacaagagcaagcccgcacgtgtgaaggcatccactgccaaagaacctgaaattggaaacttaaatgtttctgacataactcccgagagcttcaatctctcctggatggctaccgatgggatcttcgagacctttaccattgaaattattgattccaataggttgctggagactgtggaatataatatctctggtgctgaacgaactgcccatatctcagggctaccccctagtactgattttattgtctacctctctggacttgctcccagcatccggaccaaaaccatcagtgccacagccacgacagaaccaaagccacagttgggcacgctaatctttagcaatattactccaaaaagcttcaacatgtcatggaccactcaagctgggctttttgcaaagattgttatcaatgtgagtgacgctcactcactgcatgagtcccagcaattcacagtctcaggagatgcaaagcaagctcacatcacaggcttggtggagaacactggctatgacgtcagtgtggcaggaaccaccttggctggggatcccaccagacccctcactgcctttgtcattacagaagccgaaccggaagttgacaaccttctggtttcagatgccaccccagacggtttccgtctgtcctggacagctgatgaaggggtcttcgacaattttgttctcaaaatcagagataccaaaaagcagtctgagccactggaaataaccctacttgcccccgaacgtaccagggacataacaggtctcagagaggctactgaatacgaaattgaactctatggaataagcaaaggaaggcgatcccagacagtcagtgctatagcaacaacagccatgggctccccaaaggaagtcattttctcagacatcactgaaaattcggctactgtcagctggagggcacccacagcccaagtggagagcttccggattacctatgtgcccattacaggaggtacaccctccatggtaactgtggacggaaccaagactcagaccaggctggtgaaactcatacctggcgtggagtaccttgtcagcatcatcgccatgaagggctttgaggaaagtgaacctgtctcagggtcattcaccacagctctggatggcccatctggcctggtgacagccaacatcactgactcagaagccttggccaggtggcagccagccattgccactgtggacagttatgtcatctcctacacaggcgagaaagtgccagaaattacacgcacggtgtccgggaacacagtggagtatgctctgaccgacctcgagcctgccacggaatacacactgagaatctttgcagagaaagggccccagaagagctcaaccatcactgccaagttcacaacagacctcgattctccaagagacttgactgctactgaggttcagtcggaaactgccctccttacctggcgacccccccgggcatcagtcaccggttacctgctggtctatgaatcagtggatggcacagtcaaggaagtcattgtgggtccagataccacctcctacagcctggcagacctgagcccatccacccactacacagccaagatccaggcactcaatgggcccctgaggagcaatatgatccagaccatcttcaccacaattggactcctgtaccccttccccaaggactgctcccaagcaatgctgaatggagacacgacctctggcctctacaccatttatctgaatggtgataaggctgaggcgctggaagtcttctgtgacatgacctctgatgggggtggatggattgtgttcctgagacgcaaaaacggacgcgagaacttctaccaaaactggaaggcatatgctgctggatttggggaccgcagagaagaattctggcttgggctggacaacctgaacaaaatcacagcccaggggcagtacgagctccgggtggacctgcgggaccatggggagacagcctttgctgtctatgacaagttcagcgtgggagatgccaagactcgctacaagctgaaggtggaggggtacagtgggacagcaggtgactccatggcctaccacaatggcagatccttctccacctttgacaaggacacagattcagccatcaccaactgtgctctgtcctacaaaggggctttctggtacaggaactgtcaccgtgtcaacctgatggggagatatggggacaataaccacagtcagggcgttaactggttccactggaagggccacgaacactcaatccagtttgctgagatgaagctgagaccaagcaacttcagaaatcttgaaggcaggcgcaaacgggcataa

SEQ ID NO: 21911 - DNA, 4946 bp, Homo sapiens
  misc_feature 1..4946: note = ENST00000537320
  source 1..4946: mol_type = unassigned DNA
caagaagatcagggacaactgatttgaagtctactctgtgcttctaaatccccaattctgctgaaagtgagataccctagagccctagagccccagcagcacccagccaaacccacctccaccatgggggccatgactcagctgttggcaggtgtctttcttgctttccttgccctcgctaccgaaggtggggtcctcaagaaagtcatccggcacaagcgacagagtggggtgaacgccaccctgccagaagagaaccagccagtggtgtttaaccacgtttacaacatcaagctgccagtgggatcccagtgttcggtggatctggagtcagccagtggggagaaagacctggcaccgccttcagagcccagcgaaagctttcaggagcacacagtggatggggaaaaccagattgtcttcacacatcgcatcaacatcccccgccgggcctgtggctgtgccgcagcccctgatgttaaggagctgctgagcagactggaggagctggagaacctggtgtcttccctgagggagcaatgtactgcaggagcaggctgctgtctccagcctgccacaggccgcttggacaccaggcccttctgtagcggtcggggcaacttcagcactgaaggatgtggctgtgtctgcgaacctggctggaaaggccccaactgctctgagcccgaatgtccaggcaactgtcaccttcgaggccggtgcattgatgggcagtgcatctgtgacgacggcttcacgggcgaggactgcagccagctggcttgccccagcgactgcaatgaccagggcaagtgcgtaaatggagtctgcatctgtttcgaaggctacgccggggctgactgcagccgtgaaatctgcccagtgccctgcagtgaggagcacggcacatgtgtagatggcttgtgtgtgtgccacgatggctttgcaggcgatgactgcaacaagcctctgtgtctcaacaattgctacaaccgtggacgatgcgtggagaatgagtgcgtgtgtgatgagggtttcacgggcgaagactgcagtgagctcatctgccccaatgactgcttcgaccggggccgctgcatcaatggcacctgctactgcgaagaaggcttcacaggtgaagactgcgggaaacccacctgcccacatgcctgccacacccagggccggtgtgaggaggggcagtgtgtatgtgatgagggctttgccggtgtggactgcagcgagaagaggtgtcctgctgactgtcacaatcgtggccgctgtgtagacgggcggtgtgagtgtgatgatggtttcactggagctgactgtggggagctcaagtgtcccaatggctgcagtggccatggccgctgtgtcaatgggcagtgtgtgtgtgatgagggctatactggggaggactgcagccagctacggtgccccaatgactgtcacagtcggggccgctgtgtcgagggcaaatgtgtatgtgagcaaggcttcaagggctatgactgcagtgacatgagctgccctaatgactgtcaccagcacggccgctgtgtgaatggcatgtgtgtttgtgatgacggctacacaggggaagactgccgggatcgccaatgccccagggactgcagcaacaggggcctctgtgtggacggacagtgcgtctgtgaggacggcttcaccggccctgactgtgcagaactctcctgtccaaatgactgccatggccagggtcgctgtgtgaatgggcagtgcgtgtgccatgaaggatttatgggcaaagactgcaaggagcaaagatgtcccagtgactgtcatggccagggccgctgcgtggacggccagtgcatctgccacgagggcttcacaggcctggactgtggccagcactcctgccccagtgactgcaacaacttaggacaatgcgtctcgggccgctgcatctgcaacgagggctacagcggagaagactgctcagaggtgtctcctcccaaagacctcgttgtgacagaagtgacggaagagacggtcaacctggcctgggacaatgagatgcgggtcacagagtaccttgtcgtgtacacgcccacccacgagggtggtctggaaatgcagttccgtgtgcctggggaccagacgtccaccatcatccaggagctggagcctggtgtggagtactttatccgtgtatttgccatcctggagaacaagaagagcattcctgtcagcgccagggtggccacgtacttacctgcacctgaaggcctgaaattcaagtccatcaaggagacatctgtggaagtggagtgggatcctctagacattgcttttgaaacctgggagatcatcttccggaatatgaataaagaagatgagggagagatcaccaaaagcctgaggaggccagagacctcttaccggcaaactggtctagctcctgggcaagagtatgagatatctctgcacatagtgaaaaacaatacccggggccctggcctgaagagggtgaccaccacacgcttggatgcccccagccagatcgaggtgaaagatgtcacagacaccactgccttgatcacctggttcaagcccctggctgagatcgatggcattgagctgacctacggcatcaaagacgtgccaggagaccgtaccaccatcgatctcacagaggacgagaaccagtactccatcgggaacctgaagcctgacactgagtacgaggtgtccctcatctcccgcagaggtgacatgtcaagcaacccagccaaagagaccttcacaacaggcctcgatgctcccaggaatcttcgacgtgtttcccagacagataacagcatcaccctggaatggaggaatggcaaggcagctattgacagttacagaattaagtatgcccccatctctggaggggaccacgctgaggttgatgttccaaagagccaacaagccacaaccaaaaccacactcacaggtctgaggccgggaactgaatatgggattggagtttctgctgtgaaggaagacaaggagagcaatccagcgaccatcaacgcagccacagagttggacacgcccaaggaccttcaggtttctgaaactgcagagaccagcctgaccctgctctggaagacaccgttggccaaatttgaccgctaccgcctcaattacagtctccccacaggccagtgggtgggagtgcagcttccaagaaacaccacttcctatgtcctgagaggcctggaaccaggacaggagtacaatgtcctcctgacagccgagaaaggcagacacaagagcaagcccgcacgtgtgaaggcatccactgccatgggctccccaaaggaagtcattttctcagacatcactgaaaattcggctactgtcagctggagggcacccacagcccaagtggagagcttccggattacctatgtgcccattacaggaggtacaccctccatggtaactgtggacggaaccaagactcagaccaggctggtgaaactcatacctggcgtggagtaccttgtcagcatcatcgccatgaagggctttgaggaaagtgaacctgtctcagggtcattcaccacagctctggatggcccatctggcctggtgacagccaacatcactgactcagaagccttggccaggtggcagccagccattgccactgtggacagttatgtcatctcctacacaggcgagaaagtgccagaaattacacgcacggtgtccgggaacacagtggagtatgctctgaccgacctcgagcctgccacggaatacacactgagaatctttgcagagaaagggccccagaagagctcaaccatcactgccaagttcacaacagacctcgattctccaagagacttgactgctactgaggttcagtcggaaactgccctccttacctggcgacccccccgggcatcagtcaccggttacctgctggtctatgaatcagtggatggcacagtcaaggaagtcattgtgggtccagataccacctcctacagcctggcagacctgagcccatccacccactacacagccaagatccaggcactcaatgggcccctgaggagcaatatgatccagaccatcttcaccacaattggactcctgtaccccttccccaaggactgctcccaagcaatgctgaatggagacacgacctctggcctctacaccatttatctgaatggtgataaggctgaggcgctggaagtcttctgtgacatgacctctgatgggggtggatggattgtgttcctgagacgcaaaaacggacgcgagaacttctaccaaaactggaaggcatatgctgctggatttggggaccgcagagaagaattctggcttgggctggacaacctgaacaaaatcacagcccaggggcagtacgagctccgggtggacctgcgggaccatggggagacagcctttgctgtctatgacaagttcagcgtgggagatgccaagactcgctacaagctgaaggtggaggggtacagtgggacagcaggtgactccatggcctaccacaatggcagatccttctccacctttgacaaggacacagattcagccatcaccaactgtgctctgtcctacaaaggggctttctggtacaggaactgtcaccgtgtcaacctgatggggagatatggggacaataaccacagtcagggcgttaactggttccactggaagggccacgaacactcaatccagtttgctgagatgaagctgagaccaagcaacttcagaaatcttgaaggcaggcgcaaacgggcataaattccagggaccactgggtgagagaggaataaggcccagagcgaggaaaggattttaccaaagcatcaatacaaccagcccaaccatcggtccacacctgggcatttggtgagagtcaaagctgacca

SEQ ID NO: 21912 - DNA, 6786 bp, Homo sapiens
  misc_feature 1..6786: note = ENST00000341037
  source 1..6786: mol_type = unassigned DNA
ttctttcaagaagatcagggacaactgatttgaagtctactctgtgcttctaaatccccaattctgctgaaagtgagataccctagagccctagagccccagcagcacccagccaaacccacctccaccatgggggccatgactcagctgttggcaggtgtctttcttgctttccttgccctcgctaccgaaggtggggtcctcaagaaagtcatccggcacaagcgacagagtggggtgaacgccaccctgccagaagagaaccagccagtggtgtttaaccacgtttacaacatcaagctgccagtgggatcccagtgttcggtggatctggagtcagccagtggggagaaagacctggcaccgccttcagagcccagcgaaagctttcaggagcacacagtggatggggaaaaccagattgtcttcacacatcgcatcaacatcccccgccgggcctgtggctgtgccgcagcccctgatgttaaggagctgctgagcagactggaggagctggagaacctggtgtcttccctgagggagcaatgtactgcaggagcaggctgctgtctccagcctgccacaggccgcttggacaccaggcccttctgtagcggtcggggcaacttcagcactgaaggatgtggctgtgtctgcgaacctggctggaaaggccccaactgctctgagcccgaatgtccaggcaactgtcaccttcgaggccggtgcattgatgggcagtgcatctgtgacgacggcttcacgggcgaggactgcagccagctggcttgccccagcgactgcaatgaccagggcaagtgcgtaaatggagtctgcatctgtttcgaaggctacgccggggctgactgcagccgtgaaatctgcccagtgccctgcagtgaggagcacggcacatgtgtagatggcttgtgtgtgtgccacgatggctttgcaggcgatgactgcaacaagcctctgtgtctcaacaattgctacaaccgtggacgatgcgtggagaatgagtgcgtgtgtgatgagggtttcacgggcgaagactgcagtgagctcatctgccccaatgactgcttcgaccggggccgctgcatcaatggcacctgctactgcgaagaaggcttcacaggtgaagactgcgggaaacccacctgcccacatgcctgccacacccagggccggtgtgaggaggggcagtgtgtatgtgatgagggctttgccggtgtggactgcagcgagaagaggtgtcctgctgactgtcacaatcgtggccgctgtgtagacgggcggtgtgagtgtgatgatggtttcactggagctgactgtggggagctcaagtgtcccaatggctgcagtggccatggccgctgtgtcaatgggcagtgtgtgtgtgatgagggctatactggggaggactgcagccagctacggtgccccaatgactgtcacagtcggggccgctgtgtcgagggcaaatgtgtatgtgagcaaggcttcaagggctatgactgcagtgacatgagctgccctaatgactgtcaccagcacggccgctgtgtgaatggcatgtgtgtttgtgatgacggctacacaggggaagactgccgggatcgccaatgccccagggactgcagcaacaggggcctctgtgtggacggacagtgcgtctgtgaggacggcttcaccggccctgactgtgcagaactctcctgtccaaatgactgccatggccagggtcgctgtgtgaatgggcagtgcgtgtgccatgaaggatttatgggcaaagactgcaaggagcaaagatgtcccagtgactgtcatggccagggccgctgcgtggacggccagtgcatctgccacgagggcttcacaggcctggactgtggccagcactcctgccccagtgactgcaacaacttaggacaatgcgtctcgggccgctgcatctgcaacgagggctacagcggagaagactgctcagaggtgtctcctcccaaagacctcgttgtgacagaagtgacggaagagacggtcaacctggcctgggacaatgagatgcgggtcacagagtaccttgtcgtgtacacgcccacccacgagggtggtctggaaatgcagttccgtgtgcctggggaccagacgtccaccatcatccaggagctggagcctggtgtggagtactttatccgtgtatttgccatcctggagaacaagaagagcattcctgtcagcgccagggtggccacgtacttacctgcacctgaaggcctgaaattcaagtccatcaaggagacatctgtggaagtggagtgggatcctctagacattgcttttgaaacctgggagatcatcttccggaatatgaataaagaagatgagggagagatcaccaaaagcctgaggaggccagagacctcttaccggcaaactggtctagctcctgggcaagagtatgagatatctctgcacatagtgaaaaacaatacccggggccctggcctgaagagggtgaccaccacacgcttggatgcccccagccagatcgaggtgaaagatgtcacagacaccactgccttgatcacctggttcaagcccctggctgagatcgatggcattgagctgacctacggcatcaaagacgtgccaggagaccgtaccaccatcgatctcacagaggacgagaaccagtactccatcgggaacctgaagcctgacactgagtacgaggtgtccctcatctcccgcagaggtgacatgtcaagcaacccagccaaagagaccttcacaacaggcctcgatgctcccaggaatcttcgacgtgtttcccagacagataacagcatcaccctggaatggaggaatggcaaggcagctattgacagttacagaattaagtatgcccccatctctggaggggaccacgctgaggttgatgttccaaagagccaacaagccacaaccaaaaccacactcacaggtctgaggccgggaactgaatatgggattggagtttctgctgtgaaggaagacaaggagagcaatccagcgaccatcaacgcagccacagagttggacacgcccaaggaccttcaggtttctgaaactgcagagaccagcctgaccctgctctggaagacaccgttggccaaatttgaccgctaccgcctcaattacagtctccccacaggccagtgggtgggagtgcagcttccaagaaacaccacttcctatgtcctgagaggcctggaaccaggacaggagtacaatgtcctcctgacagccgagaaaggcagacacaagagcaagcccgcacgtgtgaaggcatccactgaacaagcccctgagctggaaaacctcaccgtgactgaggttggctgggatggcctcagactcaactggaccgcagctgaccaggcctatgagcactttatcattcaggtgcaggaggccaacaaggtggaggcagctcggaacctcaccgtgcctggcagccttcgggctgtggacataccgggcctcaaggctgctacgccttatacagtctccatctatggggtgatccagggctatagaacaccagtgctctctgctgaggcctccacaggggaaactcccaatttgggagaggtcgtggtggccgaggtgggctgggatgccctcaaactcaactggactgctccagaaggggcctatgagtactttttcattcaggtgcaggaggctgacacagtagaggcagcccagaacctcaccgtcccaggaggactgaggtccacagacctgcctgggctcaaagcagccactcattataccatcaccatccgcggggtcactcaggacttcagcacaacccctctctctgttgaagtcttgacagaggatctcccacagctgggagatttagccgtgtctgaggttggctgggatggcctcagactcaactggaccgcagctgacaatgcctatgagcactttgtcattcaggtgcaggaggtcaacaaagtggaggcagcccagaacctcacgttgcctggcagcctcagggctgtggacatcccgggcctcgaggctgccacgccttatagagtctccatctatggggtgatccggggctatagaacaccagtactctctgctgaggcctccacagccaaagaacctgaaattggaaacttaaatgtttctgacataactcccgagagcttcaatctctcctggatggctaccgatgggatcttcgagacctttaccattgaaattattgattccaataggttgctggagactgtggaatataatatctctggtgctgaacgaactgcccatatctcagggctaccccctagtactgattttattgtctacctctctggacttgctcccagcatccggaccaaaaccatcagtgccacagccacgacagaagccgaaccggaagttgacaaccttctggtttcagatgccaccccagacggtttccgtctgtcctggacagctgatgaaggggtcttcgacaattttgttctcaaaatcagagataccaaaaagcagtctgagccactggaaataaccctacttgcccccgaacgtaccagggacataacaggtctcagagaggctactgaatacgaaattgaactctatggaataagcaaaggaaggcgatcccagacagtcagtgctatagcaacaacagccatgggctccccaaaggaagtcattttctcagacatcactgaaaattcggctactgtcagctggagggcacccacagcccaagtggagagcttccggattacctatgtgcccattacaggaggtacaccctccatggtaactgtggacggaaccaagactcagaccaggctggtgaaactcatacctggcgtggagtaccttgtcagcatcatcgccatgaagggctttgaggaaagtgaacctgtctcagggtcattcaccacagctctggatggcccatctggcctggtgacagccaacatcactgactcagaagccttggccaggtggcagccagccattgccactgtggacagttatgtcatctcctacacaggcgagaaagtgccagaaattacacgcacggtgtccgggaacacagtggagtatgctctgaccgacctcgagcctgccacggaatacacactgagaatctttgcagagaaagggccccagaagagctcaaccatcactgccaagttcacaacagacctcgattctccaagagacttgactgctactgaggttcagtcggaaactgccctccttacctggcgacccccccgggcatcagtcaccggttacctgctggtctatgaatcagtggatggcacagtcaaggaagtcattgtgggtccagataccacctcctacagcctggcagacctgagcccatccacccactacacagccaagatccaggcactcaatgggcccctgaggagcaatatgatccagaccatcttcaccacaattggactcctgtaccccttccccaaggactgctcccaagcaatgctgaatggagacacgacctctggcctctacaccatttatctgaatggtgataaggctgaggcgctggaagtcttctgtgacatgacctctgatgggggtggatggattgtgttcctgagacgcaaaaacggacgcgagaacttctaccaaaactggaaggcatatgctgctggatttggggaccgcagagaagaattctggcttgggctggacaacctgaacaaaatcacagcccaggggcagtacgagctccgggtggacctgcgggaccatggggagacagcctttgctgtctatgacaagttcagcgtgggagatgccaagactcgctacaagctgaaggtggaggggtacagtgggacagcaggtgactccatggcctaccacaatggcagatccttctccacctttgacaaggacacagattcagccatcaccaactgtgctctgtcctacaaaggggctttctggtacaggaactgtcaccgtgtcaacctgatggggagatatggggacaataaccacagtcagggcgttaactggttccactggaagggccacgaacactcaatccagtttgctgagatgaagctgagaccaagcaacttcagaaatcttgaaggcaggcgcaaacgggcataaattccagggaccactgggtgagagaggaataaggcccagagcgaggaaaggattttaccaaagcatcaatacaaccagcccaaccatcggtccacacctgggcatttggtgagagtcaaagctgaccatggatccctggggccaacggcaacagcatgggcctcacctcctctgtgatttctttctttgcaccaaagacatcagtctccaacatgtttctgttttgttgtttgattcagcaaaaatctcccagtgacaacatcgcaatagttttttacttctcttaggtggctctgggaatgggagaggggtaggatgtacaggggtagtttgttttagaaccagccgtattttacatgaagctgtataattaattgtcattatttttgttagcaaagattaaatgtgtcattggaagccatccctttttttacatttcatacaacagaaaccagaaaagcaatactgtttccattttaaggatatgattaatattattaatataataatgatgatgatgatgatgaaaactaaggatttttcaagagatctttctttccaaaacatttctggacagtacctgattgtatttttttt

SEQ ID NO: 21913 - DNA, 1424 bp, Homo sapiens
  misc_feature 1..1424: note = ENST00000243347
  source 1..1424: mol_type = unassigned DNA; mol_type = unassigned DNA
agtcacatttcagccactgctctgagaatttgtgagcagcccctaacaggctgttacttcactacaactgacgatatgatcatcttaatttacttatttctcttgctatgggaagacactcaaggatggggattcaaggatggaatttttcataactccatatggcttgaacgagcagccggtgtgtaccacagagaagcacggtctggcaaatacaagctcacctacgcagaagctaaggcggtgtgtgaatttgaaggcggccatctcgcaacttacaagcagctagaggcagccagaaaaattggatttcatgtctgtgctgctggatggatggctaagggcagagttggataccccattgtgaagccagggcccaactgtggatttggaaaaactggcattattgattatggaatccgtctcaataggagtgaaagatgggatgcctattgctacaacccacacgcaaaggagtgtggtggcgtctttacagatccaaagcaaatttttaaatctccaggcttcccaaatgagtacgaagataaccaaatctgctactggcacattagactcaagtatggtcagcgtattcacctgagttttttagattttgaccttgaagatgacccaggttgcttggctgattatgttgaaatatatgacagttacgatgatgtccatggctttgtgggaagatactgtggagatgagcttccagatgacatcatcagtacaggaaatgtcatgaccttgaagtttctaagtgatgcttcagtgacagctggaggtttccaaatcaaatatgttgcaatggatcctgtatccaaatccagtcaaggaaaaaatacaagtactacttctactggaaataaaaactttttagctggaagatttagccacttataaaaaaaaaaaaaaggatgatcaaaacacacagtgtttatgttggaatcttttggaactcctttgatctcactgttattattaacatttatttattatttttctaaatgtgaaagcaatacataatttagggaaaattggaaaatataggaaactttaaacgagaaaatgaaacctctcataatcccactgcatagaaataacaagcgttaacattttcatatttttttctttcagtcatttttctatttgtggtatatgtatatatgtacctatatgtatttgcatttgaaattttggaatcctgctctatgtacagttttgtattatactttttaaatcttgaactttataaacattttctgaaatcattgattattctacaaaaacatgattttaaacagctgtaaaatattctatgatatgaatgttttatgcattatttaagcctgtctctattgttggaatttcaggtcattttcataaatattgttgcaataaatatccttgaacacaca

SEQ ID NO: 21914 - DNA, 501 bp, Homo sapiens
  misc_feature 1..501: note = ENST00000460812
  source 1..501: mol_type = unassigned DNA; mol_type = unassigned DNA
aaaactggcattattgattatggaatccgtctcaataggagtgaaagatgggatgcctattgctacaacccacacgcaaaggagtgtggtggcgtctttacagatccaaagcaaatttttaaatctccaggcttcccaaatgagtacgaagataaccaaatctgctactggcacattagactcaagtatggtcagcgtattcacctgagttttttagattttgaccttgaagatgacccaggttgcttggctgattatgttgaaatatatgacagttacgatgatgtccatggctttgtgggaagatactgtggagatgagcttccagatgacatcatcagtacaggtaaggttttaaattgaggaccaaaactatgatttgtttctttacagtgtccctgaaagtaaagggacactgttaaatagtaaatagtagttattattcactttttaaagttgaaagaaccaacaccagatgcagcttgctaggttgtaaaatgc

SEQ ID NO: 21915 - DNA, 3944 bp, Homo sapiens
  misc_feature 1..3944: note = ENST00000291232
  source 1..3944: mol_type = unassigned DNA; mol_type = unassigned DNA
cagctcagcctcagtccccgcagcttgtgcggcggcgtcggcaccatgaggcgagggccccggagcctgcggggcagggacgcgccagcccccacgccctgcgtcccggccgagtgcttcgacctgctggtccgccactgcgtggcctgcgggctcctgcgcacgccgcggccgaaaccggccggggccagcagccctgcgcccaggacggcgctgcagccgcaggagtcggtgggcgcgggggccggcgaggcggcgctgcccctgcccgggctgctctttggcgcccccgcgctgctgggcctggcactggtcctggcgctggtcctggtgggtctggtgagctggaggcggcgacagcggcggcttcgcggcgcgtcctccgcagaggcccccgacggagacaaggacgccccagagcccctggacaaggtcatcattctgtctccgggaatctctgatgccacagctcctgcctggcctcctcctggggaagacccaggaaccaccccacctggccacagtgtccctgtgccagccacagagctgggctccactgaactggtgaccaccaagacggccggccctgagcaacaatagcagggagccggcaggaggtggcccctgccctccctctggacccccagccaggggcttggaaatcaaattcagctcttcactccagcatgcacatgccctctttctgggaccaggctaactctgcagaagcacagacactacagaccacagcattcagcccccatggagtttggtgtgcttgcctttggcttcagacctcaccatctttgacagcccttgaaggtggtagcccagctcctgttcctgtgccttcaaaaggctggggcactatgagtaaaagaccgcttttaaaatggggaaggcaccattaagccaaaatgaatctgaaaaaagaccaagtgggaggatgcctaatttgtagttgggtggttttttgtgtttgtttgattttttttttttttttttttttttttttttgagacgagtcttgctctgtcgccaggctggagtacagtggcgcgatctcgcctcactgtaacctccgactccttggttcaagtgattctcctgcctcagcctcccgaatagctgggattacaggcacgcaccaccacagccagctaatttttgtatttttagtagagacgggatttcaccatgttggccaggatggtctcgatctcctgacctcgtgatccgccctgctcggcctcccaaagtgctgggattacaggcatgagccaccatgcccggccttgttttgtgttttggttttttttgagacagggtcttgctgtatcacgcaggctggagtgcaacgatgggtccccagctaattgcagcctgggctcaagcaatctttctgcttcagcctcctgagtaggtgggactacaggtgctccaccttgcccagctaattttttttttttttttttttttgagacagagtctcgctctgtcgcctaggctggagtgcagtgacgcaatttcggctcacttcaagctccgcctcctgggttcacaccattctcctgcctgagcctcctgagtagctgggactataggcgcccgccatcacgcccggctaattttttttgtatttttagtagagacggggtgtcaccgtattagccaggatggtctcgatctcctgacctcgtgatccgcccgcctcagcctcccaaagtgctaggattacaggcgtgagccaccgtggctggcctttttttttttttaaagacagggtctcggtatgttgcccaggccagtctcaaactcctggcctcaggcagtcctccccgaagggctgggattataggcaggaggcgccgggcctggcctctatttctttaatacctgccctcagagccgtcctgcttttaaactgatgcaaatggcagcagtgaataatcaattcatgggttcgcttgctttgggatttagtacaagattattttaagaaataacaaaggagaaaagattgagctggattttgctgattctcaggtatctgtaccccagggtcaaccctgagattggcccaatctgccagaacctaagatgccattttgaccccagtggcagcttccagagccacaagcctgcatttgggaggaggtgcgcagcctccagggctggactccaaactcgagctgaaggaacatgctggcaggtagctctctcagggtccacctggggttccagctgctccaagacacagcacatttagccataaacatggaagggctgggacctacaggaggctcctttgtgtagaggccagggcaggcgtgtgaccttgaaccaggtggacatgaggtcccttgaactcccttctctctctggcttgttcccctgaagcactggccccccagtgctgggcttatttggccatcctgtgccagccccctggtcacccaccgtcacagtggaagctgctccctcctcttacaatggtgttccttgctctggggtctggggacaagaccatctctttccactcctggacgacactgtgcactcagtcagccgcctcctacctgccctcctgcacagggtcagaacctcctgacctggacttcgccctgggcagcttccttggaacttgttgcagcttagcatctttggaagggagcactggactaggagtcagaaggtggagttctgggtgctgttttcccactcttgggccctgggcatgttctgttctgtgcatcagatgttttctgcctgcctccccctgagctgccaccagagccacctgtagacccctgcttctcctgcccctcctgtcccttgccaggcctctggactcagtgcttcctgtcccaaggacctgttgtgtgcccagcttggaagacagtggccactcacatccaggtctctgcctggctatttgctccatgaacccatctcagatgcccctgcccccagggagccaggtgacagggtgaggtcaagtgacaagcagtaggtgtgggagaggtttggtggggtcaggcccacatgggcccagccatccactccccttccatctggagttgggggagtctgagctgctcctggccaccccatctgccccaccccatcttttcctggccaccccagctcccaccccatcttctcctggccaccccatctcccaccccatcttctcttgacaccccatctcccaccccatcttctcctggccaccccatctcccaccccatcttctcctggccaccccatcttctcctggccaccccatctcccccaccccatcttctcctggacacccccatctcccaccccatcttttgctacagccagggttagctcagcaggtgaaaaccccgagggtgggtgaaacccctctggggctcagacatgcaaaccttgggcatctctctgtcccagctggccccgccagccggtaggaagtttcccctgagttctcagttttttcttctgaaaaatgaggggttgtatgcaaggttctcctcctggcctgtggtccccagagaagggcaggaaggaaccttagataattctcatatgcatttaacagacgaggaaactgagacccagagccgtcacatcaatacctcatttgatcttcataagagcacctggaggaggggggtggggtgtttgtgtttgtttaaatttttttttgtgaaaaaaatgaagataggcattttgtagacaatctggaagttctggaccggaatccatgatgtagtcagggaagaaatgacccgtgtccagtaaccccaggcctcgagtgtgtggtgtatttttctacataattgtaatcattctatacatacaaattcatgtcttgaccatcatattaatatttggtaagtttctctctctttagagactccacaataaagttttcaacatggtaaggttttcca

SEQ ID NO: 21916 - DNA, 3276 bp, Homo sapiens
  misc_feature 1..3276: note = ENST00000248484
  source 1..3276: mol_type = unassigned DNA; mol_type = unassigned DNA
gcagttcagcgagatgaaagggataaagcagaacccgctggcactaggaaaagcttccaacacacagtccacaacacagcttgggaaccaaaaaagctacagatccagccactcagcccaagcatgggagaactaccagcattgcctcattgcaaaaaagaggaggaaaacaacgtgatccatgtttaacaaaagagtctgtggactaggaggtgggagggtaactacctgctgaaagtgaactttctttgatatccatgcatatatataaactcagccctgcctttgatgttcagcaactgattcactgatcagattacaggcatttcatctccctgctcgtctgcctttgatctgcatggttaattttattttcctggatttgaagtttcgtctgggcttgtgctgacatacatttttgggaaggtagaagcatttggcacagaagtgctgccaggagaaactaagttgctgaacggaactctccaacaataaatacatttgataagaaagatggctttaaaagtgctactagaacaagagaaaacgtttttcactcttttagtattactaggctatttgtcatgtaaagtgacttgtgaatcaggagactgtagacagcaagaattcagggatcggtctggaaactgtgttccctgcaaccagtgtgggccaggcatggagttgtctaaggaatgtggcttcggctatggggaggatgcacagtgtgtgacgtgccggctgcacaggttcaaggaggactggggcttccagaaatgcaagccctgtctggactgcgcagtggtgaaccgctttcagaaggcaaattgttcagccaccagtgatgccatctgcggggactgcttgccaggattttataggaagacgaaacttgtcggctttcaagacatggagtgtgtgccttgtggagaccctcctcctccttacgaaccgcactgtgccagcaaggtcaacctcgtgaagatcgcgtccacggcctccagcccacgggacacggcgctggctgccgttatctgcagcgctctggccaccgtcctgctggccctgctcatcctctgtgtcatctattgtaagagacagtttatggagaagaaacccagctggtctctgcggtcacaggacattcagtacaacggctctgagctgtcgtgttttgacagacctcagctccacgaatatgcccacagagcctgctgccagtgccgccgtgactcagtgcagacctgcgggccggtgcgcttgctcccatccatgtgctgtgaggaggcctgcagccccaacccggcgactcttggttgtggggtgcattctgcagccagtcttcaggcaagaaacgcaggcccagccggggagatggtgccgactttcttcggatccctcacgcagtccatctgtggcgagttttcagatgcctggcctctgatgcagaatcccatgggtggtgacaacatctctttttgtgactcttatcctgaactcactggagaagacattcattctctcaatccagaacttgaaagctcaacgtctttggattcaaatagcagtcaagatttggttggtggggctgttccagtccagtctcattctgaaaactttacagcagctactgatttatctagatataacaacacactggtagaatcagcatcaactcaggatgcactaactatgagaagccagctagatcaggagagtggtgctgtcatccacccagccactcagacgtccctccaggaagcttaaagaacctgcttctttctgcagtagaagcgtgtgctggaacccaaagagtactcctttgttaggcttatggactgagcagtctggaccttgcatggcttctggggcaaaaataaatctgaaccaaactgacggcatttgaagcctttcagccagttgcttctgagccagaccagctgtaagctgaaacctcaatgaataacaagaaaagactccaggccgactcatgatactctgcatctttcctacatgagaagcttctctgccacaaaagtgacttcaaagacggatgggttgagctggcagcctatgagattgtggacatataacaagaaacagaaatgccctcatgcttattttcatggtgattgtggttttacaagactgaagacccagagtatactttttctttccagaaataatttcataccgcctatgaaatatcagataaattaccttagcttttatgtagaatgggttcaaaagtgagtgtttctatttgagaaggacactttttcatcatctaaactgattcgcataggtggttagaatggccctcatattgcctgcctaaatcttgggtttattagatgaagtttactgaatcagaggaatcagacagaggaggatagctctttccagaatccacacttctgacctcagcctcggtctcatgaacacccgctgatctcaggagaacacctgggctagggaatgtggtcgagaaagggcagcccattgcccagaattaacacatattgtagagacttgtatgcaaaggttggcatatttatatgaaaattagttgctatagaaacatttgttgcatctgtccctctgcctgagcttagaaggttatagaaaaagggtatttataaacataaatgaccttttacttgcattgtatcttatactaaaggctttagaaattacaacatatcaggttcccctactactgaagtagccttccgtgagaacacaccacatgttaggactagaagaaaatgcacaatttgtaggggtttggatgaagcagctgtaactgccctagtgtagtttgaccaggacattgtcgtgctccttccaattgtgtaagattagttagcacatcatctcctactttagccatccggtgttggatttaagaggacggtgcttctttctattaaagtgctccatcccctaccatctacacattagcattgtctctagagctaagacagaaattaaccccgttcagtcacaaagcagggaatggttcatttactcttaatctttatgccctggagaagacctacttgaacagggcatattttttagacttctgaacatcagtatgttcgagggtactatgatattttggtttggaattgccctgcccaagtcactgtcttttaacttttaaactgaatattaaaatgtatctgtctttcctagtatgtttttatcttctcatgtattatccatggttttctctgtttgtgacagattagtaaaatttaatgagccctc

SEQ ID NO: 21917 - DNA, 660 bp, Homo sapiens
  misc_feature 1..660: note = ENST00000464735
  source 1..660: mol_type = unassigned DNA; mol_type = unassigned DNA
cgttgccgggctacgggagagcgcggagccctgcgctgggaggtgcacggtgtgcacgctggactggacccccatgcaaccccgcgccctgcgccttaaccaggactgctccgcgcgcccctgagcctcgggctccggcccggacctgcagcctcccaggtggctgggaagtgattcttgtctgtattagagcactaccttcaagaaatggggttctgacctggatttgtgctaccacagtgacttgcatttcaacctcagaactctccaacaataaatacatttgataagaaagatggctttaaaagtgctactagaacaagagaaaacgtttttcactcttttagtattactaggctatttgtcatgtaaagtgacttgtgaatcaggagactgtagacagcaagaattcagggatcggtctggaaactgtgttccctgcaaccagtgtgggccaggcatggagttgtctaagtggcatctggaacaccagcgagacagaaccattcactcccctggaaagggggatgaagccagggagacaaatggtctagctcagcagatccaactcccatggagcccagcaagctaagatccactggcttgaaattctcactgccagcacagcagtgtgaagtccacctgggacactcaagcatg

SEQ ID NO: 21918 - DNA, 1625 bp, Homo sapiens
  misc_feature 1..1625: note = ENST00000382258
  source 1..1625: mol_type = unassigned DNA; mol_type = unassigned DNA
gttgccgggctacgggagagcgcggagccctgcgctgggaggtgcacggtgtgcacgctggactggacccccatgcaaccccgcgccctgcgccttaaccaggactgctccgcgcgcccctgagcctcgggctccggcccggacctgcagcctcccaggtggctgggaagaactctccaacaataaatacatttgataagaaagatggctttaaaagtgctactagaacaagagaaaacgtttttcactcttttagtattactaggctatttgtcatgtaaagtgacttgtgaatcaggagactgtagacagcaagaattcagggatcggtctggaaactgtgttccctgcaaccagtgtgggccaggcatggagttgtctaaggaatgtggcttcggctatggggaggatgcacagtgtgtgacgtgccggctgcacaggttcaaggaggactggggcttccagaaatgcaagccctgtctggactgcgcagtggtgaaccgctttcagaaggcaaattgttcagccaccagtgatgccatctgcggggactgcttgccaggattttataggaagacgaaacttgtcggctttcaagacatggagtgtgtgccttgtggagaccctcctcctccttacgaaccgcactgtgccagcaaggtcaacctcgtgaagatcgcgtccacggcctccagcccacgggacacggcgctggctgccgttatctgcagcgctctggccaccgtcctgctggccctgctcatcctctgtgtcatctattgtaagagacagtttatggagaagaaacccagctggtctctgcggtcacaggacattcagtacaacggctctgagctgtcgtgttttgacagacctcagctccacgaatatgcccacagagcctgctgccagtgccgccgtgactcagtgcagacctgcgggccggtgcgcttgctcccatccatgtgctgtgaggaggcctgcagccccaacccggcgactcttggttgtggggtgcattctgcagccagtcttcaggcaagaaacgcaggcccagccggggagatggtgccgactttcttcggatccctcacgcagtccatctgtggcgagttttcagatgcctggcctctgatgcagaatcccatgggtggtgacaacatctctttttgtgactcttatcctgaactcactggagaagacattcattctctcaatccagaacttgaaagctcaacgtctttggattcaaatagcagtcaagatttggttggtggggctgttccagtccagtctcattctgaaaactttacagcagctactgatttatctagatataacaacacactggtagaatcagcatcaactcaggatgcactaactatgagaagccagctagatcaggagagtggtgctgtcatccacccagccactcagacgtccctccaggtaaggcagcgactgggttccctgtgaacacagcactgacttacagtagatcagaactctgttcccagcataagatttgggggaacctgatgagttttttttttgcatctttaataatttcttgtatgttgtagagtatgttttaaaataaatttcaagtatttttttaaaaaact

SEQ ID NO: 21919 - DNA, 4151 bp, Homo sapiens
  misc_feature 1..4151: note = ENST00000382263
  source 1..4151: mol_type = unassigned DNA; mol_type = unassigned DNA
cgcggagccctgcgctgggaggtgcacggtgtgcacgctggactggacccccatgcaaccccgcgccctgcgccttaaccaggactgctccgcgcgcccctgagcctcgggctccggcccggacctgcagcctcccaggtggctgggaagaactctccaacaataaatacatttgataagaaagatggctttaaaagtgctactagaacaagagaaaacgtttttcactcttttagtattactaggctatttgtcatgtaaagtgacttgtgaatcaggagactgtagacagcaagaattcagggatcggtctggaaactgtgttccctgcaaccagtgtgggccaggcatggagttgtctaaggaatgtggcttcggctatggggaggatgcacagtgtgtgacgtgccggctgcacaggttcaaggaggactggggcttccagaaatgcaagccctgtctggactgcgcagtggtgaaccgctttcagaaggcaaattgttcagccaccagtgatgccatctgcggggactgcttgccaggattttataggaagacgaaacttgtcggctttcaagacatggagtgtgtgccttgtggagaccctcctcctccttacgaaccgcactgtgccagcaaggtcaacctcgtgaagatcgcgtccacggcctccagcccacgggacacggcgctggctgccgttatctgcagcgctctggccaccgtcctgctggccctgctcatcctctgtgtcatctattgtaagagacagtttatggagaagaaacccagctggtctctgcggtcacaggacattcagtacaacggctctgagctgtcgtgttttgacagacctcagctccacgaatatgcccacagagcctgctgccagtgccgccgtgactcagtgcagacctgcgggccggtgcgcttgctcccatccatgtgctgtgaggaggcctgcagccccaacccggcgactcttggttgtggggtgcattctgcagccagtcttcaggcaagaaacgcaggcccagccggggagatggtgccgactttcttcggatccctcacgcagtccatctgtggcgagttttcagatgcctggcctctgatgcagaatcccatgggtggtgacaacatctctttttgtgactcttatcctgaactcactggagaagacattcattctctcaatccagaacttgaaagctcaacgtctttggattcaaatagcagtcaagatttggttggtggggctgttccagtccagtctcattctgaaaactttacagcagctactgatttatctagatataacaacacactggtagaatcagcatcaactcaggatgcactaactatgagaagccagctagatcaggagagtggtgctgtcatccacccagccactcagacgtccctccaggaagcttaaagaacctgcttctttctgcagtagaagcgtgtgctggaacccaaagagtactcctttgttaggcttatggactgagcagtctggaccttgcatggcttctggggcaaaaataaatctgaaccaaactgacggcatttgaagcctttcagccagttgcttctgagccagaccagctgtaagctgaaacctcaatgaataacaagaaaagactccaggccgactcatgatactctgcatctttcctacatgagaagcttctctgccacaaaagtgacttcaaagacggatgggttgagctggcagcctatgagattgtggacatataacaagaaacagaaatgccctcatgcttattttcatggtgattgtggttttacaagactgaagacccagagtatactttttctttccagaaataatttcataccgcctatgaaatatcagataaattaccttagcttttatgtagaatgggttcaaaagtgagtgtttctatttgagaaggacactttttcatcatctaaactgattcgcataggtggttagaatggccctcatattgcctgcctaaatcttgggtttattagatgaagtttactgaatcagaggaatcagacagaggaggatagctctttccagaatccacacttctgacctcagcctcggtctcatgaacacccgctgatctcaggagaacacctgggctagggaatgtggtcgagaaagggcagcccattgcccagaattaacacatattgtagagacttgtatgcaaaggttggcatatttatatgaaaattagttgctatagaaacatttgttgcatctgtccctctgcctgagcttagaaggttatagaaaaagggtatttataaacataaatgaccttttacttgcattgtatcttatactaaaggctttagaaattacaacatatcaggttcccctactactgaagtagccttccgtgagaacacaccacatgttaggactagaagaaaatgcacaatttgtaggggtttggatgaagcagctgtaactgccctagtgtagtttgaccaggacattgtcgtgctccttccaattgtgtaagattagttagcacatcatctcctactttagccatccggtgttggatttaagaggacggtgcttctttctattaaagtgctccatcccctaccatctacacattagcattgtctctagagctaagacagaaattaaccccgttcagtcacaaagcagggaatggttcatttactcttaatctttatgccctggagaagacctacttgaacagggcatattttttagacttctgaacatcagtatgttcgagggtactatgatattttggtttggaattgccctgcccaagtcactgtcttttaacttttaaactgaatattaaaatgtatctgtctttcctagtatgtttttatcttctcatgtattatccatggttttctctgtttgtgacagattagtaaaatttaatgagccctctttcttgtggccgtttctccatagttttaggttttgatatgtgtttactagcttgcctgtgtctggtacatctcatgacctcaattccctcacctgaaataggaaatgagaatgtttcattgtagccccaagcggtcatgtcaacctagtgcctagtcataattaattgacttttcctgtattacttctttttttaagtataaaccaatgatcctttggtagtcaagaactcttaggaacattgccttttggacatgtaaaatatttaggatttgaccacacaatggctatgaaaatgcaagtagtttcctcgcgtgacctcaccatgattcacatacgtgccactgtttgaaatctggtctgtttgcatttctgttatgacagagagatgatgtttgcatttctgttatgacagagagatgatgaaagtaggcagggctgtgttcctttgtgtagcctgtatatattttccatatgtagagccctgattaacttcaaggacaaacactggctggagaaagccagactgatgggaatgagactttggccaaaaatcccaaaacatcattttcaatcagtagagaagtgcttagggttgaaaattgatttcatttgctactgaatttggtaaatcctgggtaacttttatcaagatgaagacattttaccctacctactctagaaatatacaacaatgttatattttacactccttggaaacatttgaggaaaaaaatgcaatttgcacttcactttgttggaatatcccatagcactcaataaactcagctgctagagtgccgatgtcaggagggctgtgtcgggtaatgcgtgtggctgaatgggcataaccactgtggcttcttgtgctgcagaagctcgttgacaagactgaggaggatttcaagagcaaccaagtaaagtcatgaattttctaattttgtgtatatggaatatatttttaaatagagatttttctactttagataatgtgttaatattgctattacctaggttaagcactattgtctgtgctagtaagaaaaagaaaggaaaaccatcattgctttatagtagcttatatcaatttagatttcatcattactattttgcatactggaatttataaatgtgtaaattatcattttcttagttttgtaataccttttttatttgtgaataaaattatcacctggtattctta

SEQ ID NO: 21920 - DNA, 4277 bp, Homo sapiens
  misc_feature 1..4277: note = ENST00000403372
  source 1..4277: mol_type = unassigned DNA; mol_type = unassigned DNA
gcagttcagcgagatgaaagggataaagcagaacccgctggcactaggaaaagcttccaacacacagtccacaacacagcttgggaaccaaaaaagctacagatccagccactcagcccaagcatgggagaactaccagcattgcctcattgcaaaaaagaggaggaaaacaacgtgatccatgtttaacaaaagagtctgtggactaggaggtgggagggtaactacctgctgaaagtgaactttctttgatatccatgcatatatataaactcagccctgcctttgatgttcagcaactgattcactgatcagattacaggcatttcatctccctgctcgtctgcctttgatctgcatggttaattttattttcctggatttgaagtttcgtctgggcttgtgctgacatacatttttgggaaggtagaagcatttggcacagaagtgctgccaggagaaactaagttgctgaacgggaatgtggcttcggctatggggaggatgcacagtgtgtgacgtgccggctgcacaggttcaaggaggactggggcttccagaaatgcaagccctgtctggactgcgcagtggtgaaccgctttcagaaggcaaattgttcagccaccagtgatgccatctgcggggactgcttgccaggattttataggaagacgaaacttgtcggctttcaagacatggagtgtgtgccttgtggagaccctcctcctccttacgaaccgcactgtgccagcaaggtcaacctcgtgaagatcgcgtccacggcctccagcccacgggacacggcgctggctgccgttatctgcagcgctctggccaccgtcctgctggccctgctcatcctctgtgtcatctattgtaagagacagtttatggagaagaaacccagctggtctctgcggtcacaggacattcagtacaacggctctgagctgtcgtgttttgacagacctcagctccacgaatatgcccacagagcctgctgccagtgccgccgtgactcagtgcagacctgcgggccggtgcgcttgctcccatccatgtgctgtgaggaggcctgcagccccaacccggcgactcttggttgtggggtgcattctgcagccagtcttcaggcaagaaacgcaggcccagccggggagatggtgccgactttcttcggatccctcacgcagtccatctgtggcgagttttcagatgcctggcctctgatgcagaatcccatgggtggtgacaacatctctttttgtgactcttatcctgaactcactggagaagacattcattctctcaatccagaacttgaaagctcaacgtctttggattcaaatagcagtcaagatttggttggtggggctgttccagtccagtctcattctgaaaactttacagcagctactgatttatctagatataacaacacactggtagaatcagcatcaactcaggatgcactaactatgagaagccagctagatcaggagagtggtgctgtcatccacccagccactcagacgtccctccaggaagcttaaagaacctgcttctttctgcagtagaagcgtgtgctggaacccaaagagtactcctttgttaggcttatggactgagcagtctggaccttgcatggcttctggggcaaaaataaatctgaaccaaactgacggcatttgaagcctttcagccagttgcttctgagccagaccagctgtaagctgaaacctcaatgaataacaagaaaagactccaggccgactcatgatactctgcatctttcctacatgagaagcttctctgccacaaaagtgacttcaaagacggatgggttgagctggcagcctatgagattgtggacatataacaagaaacagaaatgccctcatgcttattttcatggtgattgtggttttacaagactgaagacccagagtatactttttctttccagaaataatttcataccgcctatgaaatatcagataaattaccttagcttttatgtagaatgggttcaaaagtgagtgtttctatttgagaaggacactttttcatcatctaaactgattcgcataggtggttagaatggccctcatattgcctgcctaaatcttgggtttattagatgaagtttactgaatcagaggaatcagacagaggaggatagctctttccagaatccacacttctgacctcagcctcggtctcatgaacacccgctgatctcaggagaacacctgggctagggaatgtggtcgagaaagggcagcccattgcccagaattaacacatattgtagagacttgtatgcaaaggttggcatatttatatgaaaattagttgctatagaaacatttgttgcatctgtccctctgcctgagcttagaaggttatagaaaaagggtatttataaacataaatgaccttttacttgcattgtatcttatactaaaggctttagaaattacaacatatcaggttcccctactactgaagtagccttccgtgagaacacaccacatgttaggactagaagaaaatgcacaatttgtaggggtttggatgaagcagctgtaactgccctagtgtagtttgaccaggacattgtcgtgctccttccaattgtgtaagattagttagcacatcatctcctactttagccatccggtgttggatttaagaggacggtgcttctttctattaaagtgctccatcccctaccatctacacattagcattgtctctagagctaagacagaaattaaccccgttcagtcacaaagcagggaatggttcatttactcttaatctttatgccctggagaagacctacttgaacagggcatattttttagacttctgaacatcagtatgttcgagggtactatgatattttggtttggaattgccctgcccaagtcactgtcttttaacttttaaactgaatattaaaatgtatctgtctttcctagtatgtttttatcttctcatgtattatccatggttttctctgtttgtgacagattagtaaaatttaatgagccctctttcttgtggccgtttctccatagttttaggttttgatatgtgtttactagcttgcctgtgtctggtacatctcatgacctcaattccctcacctgaaataggaaatgagaatgtttcattgtagccccaagcggtcatgtcaacctagtgcctagtcataattaattgacttttcctgtattacttctttttttaagtataaaccaatgatcctttggtagtcaagaactcttaggaacattgccttttggacatgtaaaatatttaggatttgaccacacaatggctatgaaaatgcaagtagtttcctcgcgtgacctcaccatgattcacatacgtgccactgtttgaaatctggtctgtttgcatttctgttatgacagagagatgatgtttgcatttctgttatgacagagagatgatgaaagtaggcagggctgtgttcctttgtgtagcctgtatatattttccatatgtagagccctgattaacttcaaggacaaacactggctggagaaagccagactgatgggaatgagactttggccaaaaatcccaaaacatcattttcaatcagtagagaagtgcttagggttgaaaattgatttcatttgctactgaatttggtaaatcctgggtaacttttatcaagatgaagacattttaccctacctactctagaaatatacaacaatgttatattttacactccttggaaacatttgaggaaaaaaatgcaatttgcacttcactttgttggaatatcccatagcactcaataaactcagctgctagagtgccgatgtcaggagggctgtgtcgggtaatgcgtgtggctgaatgggcataaccactgtggcttcttgtgctgcagaagctcgttgacaagactgaggaggatttcaagagcaaccaagtaaagtcatgaattttctaattttgtgtatatggaatatatttttaaatagagatttttctactttagataatgtgttaatattgctattacctaggttaagcactattgtctgtgctagtaagaaaaagaaaggaaaaccatcattgctttatagtagcttatatcaatttagatttcatcattactattttgcatactggaatttataaatgtgtaaattatcattttcttagttttgtaataccttttttatttgtgaataaaattatcacctggtattcttatttatgtgttc

SEQ ID NO: 21921 - DNA, 1665 bp, Homo sapiens
  misc_feature 1..1665: note = ENST00000245817
  source 1..1665: mol_type = unassigned DNA; mol_type = unassigned DNA
aaaaagcggcgcgctgtgtcttcccgcagtctctcgtcatggaatacgcctctgacgcttcactggaccccgaagccccgtggcctcccgcgccccgcgctcgcgcctgccgcgtactgccttgggccctggtcgcggggctgctgctgctgctgctgctcgctgccgcctgcgccgtcttcctcgcctgcccctgggccgtgtccggggctcgcgcctcgcccggctccgcggccagcccgagactccgcgagggtcccgagctttcgcccgacgatcccgccggcctcttggacctgcggcagggcatgtttgcgcagctggtggcccaaaatgttctgctgatcgatgggcccctgagctggtacagtgacccaggcctggcaggcgtgtccctgacggggggcctgagctacaaagaggacacgaaggagctggtggtggccaaggctggagtctactatgtcttctttcaactagagctgcggcgcgtggtggccggcgagggctcaggctccgtttcacttgcgctgcacctgcagccactgcgctctgctgctggggccgccgccctggctttgaccgtggacctgccacccgcctcctccgaggctcggaactcggccttcggtttccagggccgcttgctgcacctgagtgccggccagcgcctgggcgtccatcttcacactgaggccagggcacgccatgcctggcagcttacccagggcgccacagtcttgggactcttccgggtgacccccgaaatcccagccggactcccttcaccgaggtcggaataacgtccagcctgggtgcagcccacctggacagagtccgaatcctactccatccttcatggagacccctggtgctgggtccctgctgctttctctacctcaaggggcttggcaggggtccctgctgctgacctccccttgaggaccctcctcacccactccttccccaagttggaccttgatatttattctgagcctgagctcagataatatattatatatattatatatatatatatatttctatttaaagaggatcctgagtttgtgaatggacttttttagaggagttgttttgggggggggggggtcttcgacattgccgaggctggtcttgaactcctggacttagacgatcctcctgcctcagcctcccaagcaactgggattcatcctttctattaattcattgtacttatttgcttatttgtgtgtattgagcatctgtaatgtgccagcattgtgcccaggctagggggctatagaaacatctagaaatagactgaaagaaaatctgagttatggtaatacgtgaggaatttaaagactcatccccagcctccacctcctgtgtgatacttgggggctagcttttttctttctttcttttttttgagatggtcttgttctgtcaaccaggctagaatgcagcggtgcaatcatgagtcaatgcagcctccagcctcgacctcccgaggctcaggtgatcctcccatctcagcctctcgagtagctgggaccacagttgtgtgccaccacacttggctaactttttaatttttttgcggagacggtattgctatgttgccaaggttgtttacatgccagtacaatttataataaacactcatttttcctccctctg

SEQ ID NO: 21922 - DNA, 2641 bp, Homo sapiens
  misc_feature 1..2641: note = ENST00000416152
  source 1..2641: mol_type = unassigned DNA; mol_type = unassigned DNA
ctgtcggcccaggacatcagccagcccctgcagaacagcttcatccacacagggcatggcgacagtgacccccgccactgctggggcttcccggacaggattgacgaactgtatctgggaaaccccatggacccccccgacctcctgagcgtggaactgagcacctcccggcccccccagcatctaggaggggtgaaaagggagcctccacctcgcccacctcagcctgccttcttcactcagaaaccaacctatgaccctgtgagcgaggaccaagaccccttgtccagcgacttcaagaggctgggcctgcggaagccaggcctgccccgagggctgtggctggcgaagccctcggcgcgggtgccgggcaccaaggccagccgaggcagcggggctgaggtcacgctcatcgacttcggtgaggagcccgtggtcccggccctacggccctgcgcgccctccctggcgcagctggccatggacgcctgctccctgctggacgagaccccgcctcagagccccacgcgggcactgccccggcccctgcaccccacgcctgtggtggactgggacgcacgcccgctgccccccccgcccgcctatgacgacgtggcccaggatgaggatgactttgagatctgctccatcaacagcaccctcgtgggcgcgggggtccctgccgggcccagccagggccagaccaactacgcctttgtgcctgagcaggcgcggccgccccctcccctggaggacaacctgttcctcccgccccagggtgggggcaagccgcccagctccgcacagaccgcagagatcttccaggcgctacagcaggagtgcatgaggcaactgcaggctccggccggctccccggccccctctcccagcccggggggtgacgacaagccccaggtgcctcctcgggtacccatcccccctcggcccacgcgcccacacgtccagctgtctccagcccccccgggcgaggaggagaccagccagtggcctggacctgcttcccctccccgggtgcctccgcgggagcccctgtcccctcaaggctcgaggacacccagccccctggtaccacctggcagctccccgctgccaccccggctctcaagctcacctgggaagaccatgcccaccacccagagctttgcctcagaccccaagtacgccaccccccaggtgatccaggcccctggcccgcgggctggtccctgcatcctgcccatcgtccgggatggcaagaaggtcagcagcacccactattacttgctgcccgagcgaccatcctacctggagcgctaccagcgcttcctgcgtgaggcccagagccccgaggagcctacccccctgcctgtgcctctgctgctgcccccacccagcaccccagcccccgccgcccccacggccaccgtgcggccgatgccccaggctgccttggaccccaaggccaacttctccaccaacaacagcaacccaggggcccggccaccacccccgagggccactgctcggctgccacagaggggctgccctggcgatgggccagaggcgggccggccagcagacaagatccagatgctgcaggccatggtgcatggggtgaccacagaggagtgccaggcggccctgcagtgccacggctggagcgtgcagagggctgcccagtatctgaaggtggagcagctcttcgggctgggtctgcggcccagaggggagtgccacaaagtgctggagatgttcgactggaacctggagcaggccggctgccaccttctgggctcctggggccctgcccaccacaagcgctgagatgcgtctggagagccagagggcctgcctgaaggaatcacctgagcctgtccgtccaccaggagtggggagatgcccccatccagtcctggaggacccgctgctcctgctgctcccggggatggagcaaggccaaggctgcgggaggctgggagccctgccctgcccatccctcctgcaccagcgctgtccctgcacactttggttcagtcccggtgcccctgccaagatgtggaaggggccgggtgaagacaggcttgagggctgccccagcaggctctgggtatgacctgcctctggccctggtcctgggcggggcctgtgggtggagtagtacccccaggccctgccctgggtgacagactgggaggaaaccaggctggacctgggcaggcgggatgtgttggccacagggagaggcggaccggcacccggtgggacctcctaggactgggccttcttccagggggcccctggcagcagctggggtgtcgggcagaatgtgacttgtggccttaccatggacttgaatgggacttggctggcctcaggatcttgtgcctggaaatagcctgaggtggctcaggaagcggagaaagggtgccagaccattctctggcggggaccagggcccaaggccccagggctggaaggagaccaaggggcagccgccctggagggacatcagtgcttcctcttccacccaattcccccacgcggttccatgttttcccaccagcctgttggcgaagttgctgctccggcattcagtacctgcttcttccagagaaataaagttagtttctattttatgtta

SEQ ID NO: 21923 - DNA, 4223 bp, Homo sapiens
  misc_feature 1..4223: note = ENST00000381916
  source 1..4223: mol_type = unassigned DNA; mol_type = unassigned DNA
ggagaggaggaacggagctgggacgggctgcaggagggaatggccgcaggccggcaggaggaggggcgcgaccacccggccgccggccgatggcggatgaggctatgggggctgagacgcagtagcggccctgcacttctggaggatgctcgaggcccggccccccaggacgcagggcagtgacgctgccggtgccgctgcggggcgggggctgcgggcgctgcttctctccctgaccgcagccgctgggatttggggctccatgggggagagatctgcttaccagcgcctggctgggggcgaggagggaccgcagaggctgggaggcggcagaatgcagccagaggagggcacaggctggctgctggagctgctgtccgaggtgcagctgcaacagtacttcctgcggctccgagatgacctcaacgtcacccgcctgtcccactttgagtacgtcaagaatgaggacctggagaagatcggcatgggtcggcctggccagcggcggctgtgggaggctgtgaagaggaggaaggccttgtgcaaacgcaagtcgtggatgagtaaggtgttcagtggaaagcgactggaggctgagttcccacctcatcactctcagagcaccttccggaagacctcgcccgcccctgggggcccagcaggggaggggcccctgcagagcctcacctgcctcattggggagaaggacctgcgcctcctggagaagctgggtgatggttcctttggcgtggtgcgcaggggcgagtgggacgcgccctcagggaagacggtgagtgtggctgtgaagtgcctgaagcccgatgtcctgagccagccagaagccatggacgacttcatccgggaggtcaatgccatgcactcgctcgaccaccgaaacctcatccgcctctacggggtggtgctcacgccgcccatgaagatggtgacagagctggcacctctgggatcgttgttggaccggctacgtaagcaccagggccacttcctcctggggactctgagccgctacgctgtgcaggtggctgagggcatgggctacctggagtccaagcgctttattcaccgtgacctggctgcccgcaatctgctgttggctacccgcgacctggtcaagatcggggactttgggctgatgcgagcactacctcagaatgacgaccattacgtcatgcaggaacatcgcaaggtgcccttcgcctggtgtgcccccgagagcctgaagacacgcaccttctcccatgccagcgacacctggatgttcggggtgacactgtgggaaatgttcacctacggccaggagccctggatcggcctcaacggcagtcagatcctgcataagatcgacaaggagggggagcggctgccccggcccgaggactgtccccaggacatctacaacgtcatggtccagtgctgggctcacaagccagaggacagacccacgtttgtggccctgcgggacttcctgctggaggcccagcccacagacatgcgggcccttcaggactttgaggaaccggacaagctgcacatccagatgaatgatgtcatcaccgtcatcgagggaagggccgagaactactggtggcgtggccagaacacacggacgctgtgtgtggggcccttccctcgcaacgtggtgacctccgtggccggcctgtcggcccaggacatcagccagcccctgcagaacagcttcatccacacagggcatggcgacagtgacccccgccactgctggggcttcccggacaggattgacgaactgtatctgggaaaccccatggacccccccgacctcctgagcgtggaactgagcacctcccggcccccccagcatctaggaggggtgaaaagggagcctccacctcgcccacctcagcctgccttcttcactcagaaaccaacctatgaccctgtgagcgaggaccaagaccccttgtccagcgacttcaagaggctgggcctgcggaagccaggcctgccccgagggctgtggctggcgaagccctcggcgcgggtgccgggcaccaaggccagccgaggcagcggggctgaggtcacgctcatcgacttcggtgaggagcccgtggtcccggccctacggccctgcgcgccctccctggcgcagctggccatggacgcctgctccctgctggacgagaccccgcctcagagccccacgcgggcactgccccggcccctgcaccccacgcctgtggtggactgggacgcacgcccgctgccccccccgcccgcctatgacgacgtggcccaggatgaggatgactttgagatctgctccatcaacagcaccctcgtgggcgcgggggtccctgccgggcccagccagggccagaccaactacgcctttgtgcctgagcaggcgcggccgccccctcccctggaggacaacctgttcctcccgccccagggtgggggcaagccgcccagctccgcacagaccgcagagatcttccaggcgctacagcaggagtgcatgaggcaactgcaggctccggccggctccccggccccctctcccagcccggggggtgacgacaagccccaggtgcctcctcgggtacccatcccccctcggcccacgcgcccacacgtccagctgtctccagcccccccgggcgaggaggagaccagccagtggcctggacctgcttcccctccccgggtgcctccgcgggagcccctgtcccctcaaggctcgaggacacccagccccctggtaccacctggcagctccccgctgccaccccggctctcaagctcacctgggaagaccatgcccaccacccagagctttgcctcagaccccaagtacgccaccccccaggtgatccaggcccctggcccgcgggctggtccctgcatcctgcccatcgtccgggatggcaagaaggtcagcagcacccactattacttgctgcccgagcgaccatcctacctggagcgctaccagcgcttcctgcgtgaggcccagagccccgaggagcctacccccctgcctgtgcctctgctgctgcccccacccagcaccccagcccccgccgcccccacggccaccgtgcggccgatgccccaggctgccttggaccccaaggccaacttctccaccaacaacagcaacccaggggcccggccaccacccccgagggccactgctcggctgccacagaggggctgccctggcgatgggccagaggcgggccggccagcagacaagatccagatggtggagcagctcttcgggctgggtctgcggcccagaggggagtgccacaaagtgctggagatgttcgactggaacctggagcaggccggctgccaccttctgggctcctggggccctgcccaccacaagcgctgagatgcgtctggagagccagagggcctgcctgaaggaatcacctgagcctgtccgtccaccaggagtggggagatgcccccatccagtcctggaggacccgctgctcctgctgctcccggggatggagcaaggccaaggctgcgggaggctgggagccctgccctgcccatccctcctgcaccagcgctgtccctgcacactttggttcagtcccggtgcccctgccaagatgtggaaggggccgggtgaagacaggcttgagggctgccccagcaggctctgggtatgacctgcctctggccctggtcctgggcggggcctgtgggtggagtagtacccccaggccctgccctgggtgacagactgggaggaaaccaggctggacctgggcaggcgggatgtgttggccacagggagaggcggaccggcacccggtgggacctcctaggactgggccttcttccagggggcccctggcagcagctggggtgtcgggcagaatgtgacttgtggccttaccatggacttgaatgggacttggctggcctcaggatcttgtgcctggaaatagcctgaggtggctcaggaagcggagaaagggtgccagaccattctctggcggggaccagggcccaaggccccagggctggaaggagaccaaggggcagccgccctggagggacatcagtgcttcctcttccacccaattcccccacgcggttccatgttttcccaccagcctgttggcgaagttgctgctccggcattcagtacctgcttcttccagagaaataaagttagtttctattttatgtta

SEQ ID NO: 21924 - DNA, 5270 bp, Homo sapiens
  misc_feature 1..5270: note = ENST00000333602
  source 1..5270: mol_type = unassigned DNA; mol_type = unassigned DNA
cccccaccccccaccccggggcggcgcaggcgcaggcgcaggcgggctcggggcgctcggcaggagggacggcgggcgggcgctcacctgcgggggccggcgcggggcgggcgcccggcgggccgacgttgacgcccggaggcgagggcggggaggcgggcgcgggactcgggggcggcccggggcgggaggggagggccggggcgggcgggcggtgtgagcgggcgccgagggcagcaccatctggaggggtgggagcgcgcggcctctggggggcaagcgagtgcgctgggccgagccggtcgggggcccccggcgggtcgcgcaggaggagcgcggcgggctgagccctgcgctgccggagcagcagccgcagcgcgtaggggttctcagctggggcccgcagcagctccgcgggctgaagctcggcgtggaggagcggggcggggtgggcccggcggtgcaggaggagggcggggtgggcccggggctgcaggagcgcggcggccgcggccacgagcccagccggggggtggtgtgggggccgccggacggcgcgggctgggggcgcccgccgtggtggacgggctcggcgggctggcctgtggcgcaggaggaggggctggggccccgcgggcagcaccaggagaagggcggaggcagccccgcagtgcaggagcgcggcgaggcccgggccggggtgcaggagcgcggggaggggagcccgcggaggctgctgcagcagcccgaaccggcgtccgagtccggggaaggcccccgcgagcgcagggaggggccggaaagttccggcgaactgggggagcggcagtgggagagcgtcgggcgggaggcggtggtcctgggagcggccccggcgccccgaagccgccccgagctggtggggagggcccggccggtggggccccgggggcctgcgggggaggggcgcctgggggtgcaagaggcgaattggctgcccggggtgcaggagggacaggtggtgcgggctgtccaggaaacctacctgaacgggaaggagccccaggagggagagggacccggcgaggggctcaggacccggaggcgccggcggaggaggaggtggtgactggcaggcccgggccccacggtacctccggggctgaaggggacgcaggatgtaggggcatggggagtcgggcgcagaagagtgcggggaaccgctgagctctgggagccactgcctgagggcaggccgcggccggcgggaacctcttctgccgtctcagcctgggcgtcgctgaagctgtgtctgcggggaggcagcggaaggcggcagaggctgggaggcggcagaatgcagccagaggagggcacaggctggctgctggagctgctgtccgaggtgcagctgcaacagtacttcctgcggctccgagatgacctcaacgtcacccgcctgtcccactttgagtacgtcaagaatgaggacctggagaagatcggcatgggtcggcctggccagcggcggctgtgggaggctgtgaagaggaggaaggccttgtgcaaacgcaagtcgtggatgagtaaggtgttcagtggaaagcgactggaggctgagttcccacctcatcactctcagagcaccttccggaagacctcgcccgcccctgggggcccagcaggggaggggcccctgcagagcctcacctgcctcattggggagaaggacctgcgcctcctggagaagctgggtgatggttcctttggcgtggtgcgcaggggcgagtgggacgcgccctcagggaagacggtgagtgtggctgtgaagtgcctgaagcccgatgtcctgagccagccagaagccatggacgacttcatccgggaggtcaatgccatgcactcgctcgaccaccgaaacctcatccgcctctacggggtggtgctcacgccgcccatgaagatggtgacagagctggcacctctgggatcgttgttggaccggctacgtaagcaccagggccacttcctcctggggactctgagccgctacgctgtgcaggtggctgagggcatgggctacctggagtccaagcgctttattcaccgtgacctggctgcccgcaatctgctgttggctacccgcgacctggtcaagatcggggactttgggctgatgcgagcactacctcagaatgacgaccattacgtcatgcaggaacatcgcaaggtgcccttcgcctggtgtgcccccgagagcctgaagacacgcaccttctcccatgccagcgacacctggatgttcggggtgacactgtgggaaatgttcacctacggccaggagccctggatcggcctcaacggcagtcagatcctgcataagatcgacaaggagggggagcggctgccccggcccgaggactgtccccaggacatctacaacgtcatggtccagtgctgggctcacaagccagaggacagacccacgtttgtggccctgcgggacttcctgctggaggcccagcccacagacatgcgggcccttcaggactttgaggaaccggacaagctgcacatccagatgaatgatgtcatcaccgtcatcgagggaagggccgagaactactggtggcgtggccagaacacacggacgctgtgtgtggggcccttccctcgcaacgtggtgacctccgtggccggcctgtcggcccaggacatcagccagcccctgcagaacagcttcatccacacagggcatggcgacagtgacccccgccactgctggggcttcccggacaggattgacgaactgtatctgggaaaccccatggacccccccgacctcctgagcgtggaactgagcacctcccggcccccccagcatctaggaggggtgaaaaaaccaacctatgaccctgtgagcgaggaccaagaccccttgtccagcgacttcaagaggctgggcctgcggaagccaggcctgccccgagggctgtggctggcgaagccctcggcgcgggtgccgggcaccaaggccagccgaggcagcggggctgaggtcacgctcatcgacttcggtgaggagcccgtggtcccggccctacggccctgcgcgccctccctggcgcagctggccatggacgcctgctccctgctggacgagaccccgcctcagagccccacgcgggcactgccccggcccctgcaccccacgcctgtggtggactgggacgcacgcccgctgccccccccgcccgcctatgacgacgtggcccaggatgaggatgactttgagatctgctccatcaacagcaccctcgtgggcgcgggggtccctgccgggcccagccagggccagaccaactacgcctttgtgcctgagcaggcgcggccgccccctcccctggaggacaacctgttcctcccgccccagggtgggggcaagccgcccagctccgcacagaccgcagagatcttccaggcgctacagcaggagtgcatgaggcaactgcaggctccggccggctccccggccccctctcccagcccggggggtgacgacaagccccaggtgcctcctcgggtacccatcccccctcggcccacgcgcccacacgtccagctgtctccagcccccccgggcgaggaggagaccagccagtggcctggacctgcttcccctccccgggtgcctccgcgggagcccctgtcccctcaaggctcgaggacacccagccccctggtaccacctggcagctccccgctgccaccccggctctcaagctcacctgggaagaccatgcccaccacccagagctttgcctcagaccccaagtacgccaccccccaggtgatccaggcccctggcccgcgggctggtccctgcatcctgcccatcgtccgggatggcaagaaggtcagcagcacccactattacttgctgcccgagcgaccatcctacctggagcgctaccagcgcttcctgcgtgaggcccagagccccgaggagcctacccccctgcctgtgcctctgctgctgcccccacccagcaccccagcccccgccgcccccacggccaccgtgcggccgatgccccaggctgccttggaccccaaggccaacttctccaccaacaacagcaacccaggggcccggccaccacccccgagggccactgctcggctgccacagaggggctgccctggcgatgggccagaggcgggccggccagcagacaagatccagatggccatggtgcatggggtgaccacagaggagtgccaggcggccctgcagtgccacggctggagcgtgcagagggctgcccagtatctgaaggtggagcagctcttcgggctgggtctgcggcccagaggggagtgccacaaagtgctggagatgttcgactggaacctggagcaggccggctgccaccttctgggctcctggggccctgcccaccacaagcgctgagatgcgtctggagagccagagggcctgcctgaaggaatcacctgagcctgtccgtccaccaggagtggggagatgcccccatccagtcctggaggacccgctgctcctgctgctcccggggatggagcaaggccaaggctgcgggaggctgggagccctgccctgcccatccctcctgcaccagcgctgtccctgcacactttggttcagtcccggtgcccctgccaagatgtggaaggggccgggtgaagacaggcttgagggctgccccagcaggctctgggtatgacctgcctctggccctggtcctgggcggggcctgtgggtggagtagtacccccaggccctgccctgggtgacagactgggaggaaaccaggctggacctgggcaggcgggatgtgttggccacagggagaggcggaccggcacccggtgggacctcctaggactgggccttcttccagggggcccctggcagcagctggggtgtcgggcagaatgtgacttgtggccttaccatggacttgaatgggacttggctggcctcaggatcttgtgcctggaaatagcctgaggtggctcaggaagcggagaaagggtgccagaccattctctggcggggaccagggcccaaggccccagggctggaaggagaccaaggggcagccgccctggagggacatcagtgcttcctcttccacccaattcccccacgcggttccatgttttcccaccagcctgttggcgaagttgctgctccggcattcagtacctgcttcttccagagaaataaagttagtttctattttatgtta

SEQ ID NO: 21925 - DNA, 3377 bp, Homo sapiens
  misc_feature 1..3377: note = ENST00000420716
  source 1..3377: mol_type = unassigned DNA; mol_type = unassigned DNA
cgtttgctgggggcttgtacattcactcgcccccattcacttctctcccttcgtctctctacactctgccctctcgtccggccgtctccctcctttgtcctctgtcctgctccgtctctctccccctgtccgcatggcctttcttgcaggggagcctccacctcgcccacctcagcctgccttcttcactcagagtaagtggggctgcttccgatgccttggcccccgcccccgccccctctctctcactcctctcctggaaggtacagagcctgggcggctgggccggaggggaggtgggtgggtgtgtgctgtgagcttccgcggctgccctggcctagcatgcctgccccccctcgagcccgccccccggagcctgggcttctgctcacgagtgtggccctggcttccgcctcggcctcactccctcccagacctgtctgagcttctggagcacgagtgtggccctggcttctgccttggcctcgctgcctcccagacctgcaggcgctgtctgggctttgtggccgttggtcaggagtactgtcctctccaaggatagtccttatagcccctgatggcaggaggcggctccgtgcctgcactaatggtgtgccgtgacaggggcggggatgagggctcactaactcgccagggcgcaggagcagggccgccggggtcttgtgctggtggaggcagcgtcaggcaggagccagtgttgcttgctgcagcttagacggagcgaggcggggctcaccggcccacatggggctgccgggcagagcaggttccgccctcctgatggagtggtcggaggtgcgctgagaacctggccgccggtggctgacctcagacctcggggggagttgggagtggagggttgctgggggacacttggctttctctcccacgtgccacctcccctcgtgtcccagaccctgcctgactgccttcctgttgggctctccctttccatcacagaaccaacctatgaccctgtgagcgaggaccaagaccccttgtccagcgacttcaagaggctgggcctgcggaagccaggcctgccccgagggctgtggctggcgaagccctcggcgcgggtgccgggcaccaaggccagccgaggcagcggggctgaggtcacgctcatcgacttcggtgaggagcccgtggtcccggccctacggccctgcgcgccctccctggcgcagctggccatggacgcctgctccctgctggacgagaccccgcctcagagccccacgcgggcactgccccggcccctgcaccccacgcctgtggtggactgggacgcacgcccgctgccccccccgcccgcctatgacgacgtggcccaggatgaggatgactttgagatctgctccatcaacagcaccctcgtgggcgcgggggtccctgccgggcccagccagggccagaccaactacgcctttgtgcctgagcaggcgcggccgccccctcccctggaggacaacctgttcctcccgccccagggtgggggcaagccgcccagctccgcacagaccgcagagatcttccaggcgctacagcaggagtgcatgaggcaactgcaggctccggccggctccccggccccctctcccagcccggggggtgacgacaagccccaggtgcctcctcgggtacccatcccccctcggcccacgcgcccacacgtccagctgtctccagcccccccgggcgaggaggagaccagccagtggcctggacctgcttcccctccccgggtgcctccgcgggagcccctgtcccctcaaggctcgaggacacccagccccctggtaccacctggcagctccccgctgccaccccggctctcaagctcacctgggaagaccatgcccaccacccagagctttgcctcagaccccaagtacgccaccccccaggtgatccaggcccctggcccgcgggctggtccctgcatcctgcccatcgtccgggatggcaagaaggtcagcagcacccactattacttgctgcccgagcgaccatcctacctggagcgctaccagcgcttcctgcgtgaggcccagagccccgaggagcctacccccctgcctgtgcctctgctgctgcccccacccagcaccccagcccccgccgcccccacggccaccgtgcggccgatgccccaggctgccttggaccccaaggccaacttctccaccaacaacagcaacccaggggcccggccaccacccccgagggccactgctcggctgccacagaggggctgccctggcgatgggccagaggcgggccggccagcagacaagatccagatgctgcaggccatggtgcatggggtgaccacagaggagtgccaggcggccctgcagtgccacggctggagcgtgcagagggctgcccagtatctgaaggtggagcagctcttcgggctgggtctgcggcccagaggggagtgccacaaagtgctggagatgttcgactggaacctggagcaggccggctgccaccttctgggctcctggggccctgcccaccacaagcgctgagatgcgtctggagagccagagggcctgcctgaaggaatcacctgagcctgtccgtccaccaggagtggggagatgcccccatccagtcctggaggacccgctgctcctgctgctcccggggatggagcaaggccaaggctgcgggaggctgggagccctgccctgcccatccctcctgcaccagcgctgtccctgcacactttggttcagtcccggtgcccctgccaagatgtggaaggggccgggtgaagacaggcttgagggctgccccagcaggctctgggtatgacctgcctctggccctggtcctgggcggggcctgtgggtggagtagtacccccaggccctgccctgggtgacagactgggaggaaaccaggctggacctgggcaggcgggatgtgttggccacagggagaggcggaccggcacccggtgggacctcctaggactgggccttcttccagggggcccctggcagcagctggggtgtcgggcagaatgtgacttgtggccttaccatggacttgaatgggacttggctggcctcaggatcttgtgcctggaaatagcctgaggtggctcaggaagcggagaaagggtgccagaccattctctggcggggaccagggcccaaggccccagggctggaaggagaccaaggggcagccgccctggagggacatcagtgcttcctcttccacccaattcccccacgcggttccatgttttcccaccagcctgttggcgaagttgctgctccggcattcagtacctgcttcttccagagaaataaagttagtttctattttatgtt

SEQ ID NO: 21926 - DNA, 4235 bp, Homo sapiens
  misc_feature 1..4235: note = ENST00000428187
  source 1..4235: mol_type = unassigned DNA; mol_type = unassigned DNA
gttgggtggggaagccggggagtagggctggactgtgaccactgccctggagagaagacagaaacaggacagaggatcccggctgcagccagcgtgaggaaagctctgctccctgccagaccggccagctgtggaaacccagcggggcttgcagcagagcggaggggcccaccccgttcttcctcatttcccacccctggtgtgggatttggggggctcctgggcagagtgcgaagctccggagccgaggccactggatccccagtgactgctcgggggggtcccgctgcgtggagatgccggcagcacgtcggttccctggcctggagctctccttccctctcctggccagactgcggcgacgcctgtacacaaggctgggaggcggcagaatgcagccagaggagggcacaggctggctgctggagctgctgtccgaggtgcagctgcaacagtacttcctgcggctccgagatgacctcaacgtcacccgcctgtcccactttgagtacgtcaagaatgaggacctggagaagatcggcatgggtcggcctggccagcggcggctgtgggaggctgtgaagaggaggaaggccttgtgcaaacgcaagtcgtggatgagtaaggtgttcagtggaaagcgactggaggctgagttcccacctcatcactctcagagcaccttccggaagacctcgcccgcccctgggggcccagcaggggaggggcccctgcagagcctcacctgcctcattggggagaaggacctgcgcctcctggagaagctgggtgatggttcctttggcgtggtgcgcaggggcgagtgggacgcgccctcagggaagacggtgagtgtggctgtgaagtgcctgaagcccgatgtcctgagccagccagaagccatggacgacttcatccgggaggtcaatgccatgcactcgctcgaccaccgaaacctcatccgcctctacggggtggtgctcacgccgcccatgaagatggtgacagagctggcacctctgggatcgttgttggaccggctacgtaagcaccagggccacttcctcctggggactctgagccgctacgctgtgcaggtggctgagggcatgggctacctggagtccaagcgctttattcaccgtgacctggctgcccgcaatctgctgttggctacccgcgacctggtcaagatcggggactttgggctgatgcgagcactacctcagaatgacgaccattacgtcatgcaggaacatcgcaaggtgcccttcgcctggtgtgcccccgagagcctgaagacacgcaccttctcccatgccagcgacacctggatgttcggggtgacactgtgggaaatgttcacctacggccaggagccctggatcggcctcaacggcagtcagatcctgcataagatcgacaaggagggggagcggctgccccggcccgaggactgtccccaggacatctacaacgtcatggtccagtgctgggctcacaagccagaggacagacccacgtttgtggccctgcgggacttcctgctggaggcccagcccacagacatgcgggcccttcaggactttgaggaaccggacaagctgcacatccagatgaatgatgtcatcaccgtcatcgagggaagggccgagaactactggtggcgtggccagaacacacggacgctgtgtgtggggcccttccctcgcaacgtggtgacctccgtggccggcctgtcggcccaggacatcagccagcccctgcagaacagcttcatccacacagggcatggcgacagtgacccccgccactgctggggcttcccggacaggattgacgaactgtatctgggaaaccccatggacccccccgacctcctgagcgtggaactgagcacctcccggcccccccagcatctaggaggggtgaaaaaaccaacctatgaccctgtgagcgaggaccaagaccccttgtccagcgacttcaagaggctgggcctgcggaagccaggcctgccccgagggctgtggctggcgaagccctcggcgcgggtgccgggcaccaaggccagccgaggcagcggggctgaggtcacgctcatcgacttcggtgaggagcccgtggtcccggccctacggccctgcgcgccctccctggcgcagctggccatggacgcctgctccctgctggacgagaccccgcctcagagccccacgcgggcactgccccggcccctgcaccccacgcctgtggtggactgggacgcacgcccgctgccccccccgcccgcctatgacgacgtggcccaggatgaggatgactttgagatctgctccatcaacagcaccctcgtgggcgcgggggtccctgccgggcccagccagggccagaccaactacgcctttgtgcctgagcaggcgcggccgccccctcccctggaggacaacctgttcctcccgccccagggtgggggcaagccgcccagctccgcacagaccgcagagatcttccaggcgctacagcaggagtgcatgaggcaactgcaggctccggccggctccccggccccctctcccagcccggggggtgacgacaagccccaggtgcctcctcgggtacccatcccccctcggcccacgcgcccacacgtccagctgtctccagcccccccgggcgaggaggagaccagccagtggcctggacctgcttcccctccccgggtgcctccgcgggagcccctgtcccctcaaggctcgaggacacccagccccctggtaccacctggcagctccccgctgccaccccggctctcaagctcacctgggaagaccatgcccaccacccagagctttgcctcagaccccaagtacgccaccccccaggtgatccaggcccctggcccgcgggctggtccctgcatcctgcccatcgtccgggatggcaagaaggtcagcagcacccactattacttgctgcccgagcgaccatcctacctggagcgctaccagcgcttcctgcgtgaggcccagagccccgaggagcctacccccctgcctgtgcctctgctgctgcccccacccagcaccccagcccccgccgcccccacggccaccgtgcggccgatgccccaggctgccttggaccccaaggccaacttctccaccaacaacagcaacccaggggcccggccaccacccccgagggccactgctcggctgccacagaggggctgccctggcgatgggccagaggcgggccggccagcagacaagatccagatggtggagcagctcttcgggctgggtctgcggcccagaggggagtgccacaaagtgctggagatgttcgactggaacctggagcaggccggctgccaccttctgggctcctggggccctgcccaccacaagcgctgagatgcgtctggagagccagagggcctgcctgaaggaatcacctgagcctgtccgtccaccaggagtggggagatgcccccatccagtcctggaggacccgctgctcctgctgctcccggggatggagcaaggccaaggctgcgggaggctgggagccctgccctgcccatccctcctgcaccagcgctgtccctgcacactttggttcagtcccggtgcccctgccaagatgtggaaggggccgggtgaagacaggcttgagggctgccccagcaggctctgggtatgacctgcctctggccctggtcctgggcggggcctgtgggtggagtagtacccccaggccctgccctgggtgacagactgggaggaaaccaggctggacctgggcaggcgggatgtgttggccacagggagaggcggaccggcacccggtgggacctcctaggactgggccttcttccagggggcccctggcagcagctggggtgtcgggcagaatgtgacttgtggccttaccatggacttgaatgggacttggctggcctcaggatcttgtgcctggaaatagcctgaggtggctcaggaagcggagaaagggtgccagaccattctctggcggggaccagggcccaaggccccagggctggaaggagaccaaggggcagccgccctggagggacatcagtgcttcctcttccacccaattcccccacgcggttccatgttttcccaccagcctgttggcgaagttgctgctccggcattcagtacctgcttcttccagagaaataaagttagtttctattttatgtt

SEQ ID NO: 21927 - DNA, 491 bp, Homo sapiens
  misc_feature 1..491: note = ENST00000495247
  source 1..491: mol_type = unassigned DNA; mol_type = unassigned DNA
ctgagcgtggaactgagcacctcccggcccccccagcatctaggaggggtgaaaagggagcctccacctcgcccacctcagcctgccttcttcactcagaaaccaacctatgaccctgtgagcgaggaccaagaccccttgtccagcgacttcaagaggctgggcctgcggaagccaggcctgccccgagggctgtggctggcgaagccctcggcgcgggtgccgggcaccaaggccagccgaggcagcggggctgaggtcacgctcatcgacttcgcaccctcgtgggcgcgggggtccctgccgggcccagccagggccagaccaactacgcctttgtgcctgagcaggcgcggccgccccctcccctggaggacaacctgttcctcccgccccagggtgggggcaagccgcccagctccgcacagaccgcagagatcttccaggcgctacagcaggagtgcatgaggcaactgcaggctccggccggc

SEQ ID NO: 21928 - DNA, 3545 bp, Homo sapiens
  misc_feature 1..3545: note = ENST00000464041
  source 1..3545: mol_type = unassigned DNA; mol_type = unassigned DNA
ggaagccggggagtagggctggactgtgaccactgccctggagagaagacagaaacaggacagaggatcccggctgcagccagcgtgaggaaagctctgctccctgccagaccggccagctgtggaaacccagcggggcttgcagcagagcggaggggcccaccccgttcttcctcatttcccacccctggtgtgggatttggggggctcctgggcagagtgcgaagctccggagccgaggccactggatccccagtgactgctcgggggggtcccgctgcgtggagatgccggcagcacgtcggttccctggcctggagctctccttccctctcctggccagactgcggcgacgcctgtacacaaggctgggaggcggcagaatgcagccagaggagggcacaggctggctgctggagctgctgtccgaggtgcagctgcaacagtacttcctgcggctccgagatgacctcaacgtcacccgcctgtcccactttgagtacgtcaagaatgaggacctggagaagatcggcatgggtcggcctggccagcggcggctgtgggaggctgtgaagaggaggaaggccttgtgcaaacgcaagtcgtggatgagtaaggtgttcagtggaaagcgactggaggctgagttcccacctcatcactctcagagcaccttccggaagacctcgcccgcccctgggggcccagcaggggaggggcccctgcagagcctcacctgcctcattggggagaaggacctgcgcctcctggagaagctgggtgatggttcctttggcgtggtgcgcaggggcgagtgggacgcgccctcagggaagacggtgagtgtggctgtgaagtgcctgaagcccgatgtcctgagccagccagaagccatggacgacttcatccgggaggtcaatgccatgcactcgctcgaccaccgaaacctcatccgcctctacggggtggtgctcacgccgcccatgaagatggtgtgcccccgagagcctgaagacacgcaccttctcccatgccagcgacacctggatgttcggggtgacactgtgggaaatgttcacctacggccaggagccctggatcggcctcaacggcagtcagatcctgcataagatcgacaaggagggggagcggctgccccggcccgaggactgtccccaggacatctacaacgtcatggtccagtgctgggctcacaagccagaggacagacccacgtttgtggccctgcgggacttcctgctggaggcccagcccacagacatgcgggcccttcaggactttgaggaaccggacaagctgcacatccagatgaatgatgtcatcaccgtcatcgagggaagggccgagaactactggtggcgtggccagaacacacggacgctgtgtgtggggcccttccctcgcaacgtggtgacctccgtggccggcctgtcggcccaggacatcagccagcccctgcagaacagcttcatccacacagggcatggcgacagtgacccccgccactgctggggcttcccggacaggattgacgaactgtatctgggaaaccccatggacccccccgacctcctgagcgtggaactgagcacctcccggcccccccagcatctaggaggggtgaaaagtaagagcccctctgctccctggtgtccctaactcatcggctactcaggaaggggcactgtcttcacaggccaccctaaggctgctgttctgtttttggggacagtggggtcagggcagcaggcgggacagctgtgtccctggctccggctgggcgtggggtggaagacaggcagctgtatccgccgaggtgggcctcctcgggctgggtctgcagcaggcccgtccgccccggcgtccctcctccctccttccacggccgagctcagatcctggctttcctcacttccccctaatcctgctctcctgtcccaagccaaaaccaccccacggctccggctctgcctggggcctcctccatctcccggtcctctgcctatcatactggaccgccgtgttcctcatcctgccgcctgcggcctcccgtttgctgggggcttgtacattcactcgcccccattcacttctctcccttcgtctctctacactctgccctctcgtccggccgtctccctcctttgtcctctgtcctgctccgtctctctccccctgtccgcatggcctttcttgcaggggagcctccacctcgcccacctcagcctgccttcttcactcagagtaagtggggctgcttccgatgccttggcccccgcccccgccccctctctctcactcctctcctggaaggtacagagcctgggcggctgggccggaggggaggtgggtgggtgtgtgctgtgagcttccgcggctgccctggcctagcatgcctgccccccctcgagcccgccccccggagcctgggcttctgctcacgagtgtggccctggcttccgcctcggcctcactccctcccagacctgtctgagcttctggagcacgagtgtggccctggcttctgccttggcctcgctgcctcccagacctgcaggcgctgtctgggctttgtggccgttggtcaggagtactgtcctctccaaggatagtccttatagcccctgatggcaggaggcggctccgtgcctgcactaatggtgtgccgtgacaggggcggggatgagggctcactaactcgccagggcgcaggagcagggccgccggggtcttgtgctggtggaggcagcgtcaggcaggagccagtgttgcttgctgcagcttagacggagcgaggcggggctcaccggcccacatggggctgccgggcagagcaggttccgccctcctgatggagtggtcggaggtgcgctgagaacctggccgccggtggctgacctcagacctcggggggagttgggagtggagggttgctgggggacacttggctttctctcccacgtgccacctcccctcgtgtcccagaccctgcctgactgccttcctgttgggctctccctttccatcacagaaccaacctatgaccctgtgagcgaggaccaagaccccttgtccagcgacttcaagaggctgggcctgcggaagccaggcctgccccgagggctgtggctggcgaagccctcggcgcgggtgccgggcaccaaggccagccgaggcagcggggctgaggtcacgctcatcgacttcggtgaggagcccgtggtcccggccctacggccctgcgcgccctccctggcgcagctggccatggacgcctgctccctgctggacgagaccccgcctcagagccccacgcgggcactgccccggcccctgcaccccacgcctgtggtggactgggacgcacgcccgctgccccccccgcccgcctatgacgacgtggcccaggatgaggatgactttgagatctgctccatcaacagcaccctcgtgggcgcgggggtccctgccgggcccagccagggccagaccaactacgcctttgtgcctgagcaggcgcggcc

SEQ ID NO: 21929 - DNA, 2331 bp, Homo sapiens
  misc_feature 1..2331: note = ENST00000439230
  source 1..2331: mol_type = unassigned DNA; mol_type = unassigned DNA
cgcggagccggctgagcgcagggccgagctgcggggcagaggctgggaggcggcagaatgcagccagaggagggcacaggctggctgctggagctgctgtccgaggtgcagctgcaacagtacttcctgcggctccgagatgacctcaacgtcacccgcctgtcccactttgagtacgtcaagaatgaggacctggagaagatcggcatgggtcggcctggccagcggcggctgtgggaggctgtgaagaggaggaaggccttgtgcaaacgcaagtcgtggatgagtaaggtgttcagtggaaagcgactggaggctgagttcccacctcatcactctcagagcaccttccggaagacctcgcccgcccctgggggcccagcaggggaggggcccctgcagagcctcacctgcctcattggggagaaggacctgcgcctcctggagaagctgggtgatggttcctttggcgtggtgcgcaggggcgagtgggacgcgccctcagggaagacggtgagtgtggctgtgaagtgcctgaagcccgatgtcctgagccagccagaagccatggacgacttcatccgggaggtcaatgccatgcactcgctcgaccaccgaaacctcatccgcctctacggggtggtgctcacgccgcccatgaagatggtgacagagctggcacctctgggatcgttgttggaccggctacgtaagcaccagggccacttcctcctggggactctgagccgctacgctgtgcaggtggctgagggcatgggctacctggagtccaagcgctttattcaccgtgacctggctgcccgcaatctgctgttggctacccgcgacctggtcaagatcggggactttgggctgatgcgagcactacctcagaatgacgaccattacgtcatgcaggaacatcgcaaggtgcccttcgcctggtgtgcccccgagagcctgaagacacgcaccttctcccatgccagcgacacctggatgttcggggtgacactgtgggaaatgttcacctacggccaggagccctggatcggcctcaacggcagtcagatcctgcataagatcgacaaggagggggagcggctgccccggcccgaggactgtccccaggacatctacaacgtcatggtccagtgctgggctcacaagccagaggacagacccacgtttgtggccctgcgggacttcctgctggaggcccagcccacagacatgcgggcccttcaggactttgaggaaccggacaagctgcacatccagatgaatgatgtcatcaccgtcatcgagggaagggccgagaactactggtggcgtggccagaacacacggacgctgtgtgtggggcccttccctcgcaacgtggtgacctccgtggccggcctgtcggcccaggacatcagccagcccctgcagaacagcttcatccacacagggcatggcgacagtgacccccgccactgctggggcttcccggacaggattgacgagtgtcctttctctgccttctctccaggacaccccccagctgagacgtgcggtcaggttctgtggactgggaggcgggaggcctgtgcttcagacccaagactacacccggtttcctccaggacgaaggggctctgatgagattctgccacccctccacacgcttcccctgctctcttgacccagctctctcccccacagactgtatctgggaaaccccatggacccccccgacctcctgagcgtggaactgagcacctcccggcccccccagcatctaggaggggtgaaaagggagcctccacctcgcccacctcagcctgccttcttcactcagaaaccaacctatgaccctgtgagcgaggaccaagaccccttgtccagcgacttcaagaggctgggcctgcggaagccaggcctgccccgagggctgtggctggcgaagccctcggcgcgggtgccgggcaccaaggccagccgaggcagcggggctgaggtcacgctcatcgacttcggtgaggagcccgtggtcccggccctacggccctgcgcgccctccctggcgcagctggccatggacgcctgctccctgctggacgagaccccgcctcagagccccacgcgggcactgccccggcccctgcaccccacgcctgtggtggactgggacgcacgcccgctgccccccccgcccgcctatgacgacgtggcccaggatgaggatgactttgagatctgctccatcaacagcaccctcgtgggcgcgggggtccctgccgggcccagccagggccagaccaactacgcctttgtgcctgagcaggc

SEQ ID NO: 21930 - DNA, 5940 bp, Homo sapiens
  misc_feature 1..5940: note = ENST00000481865
  source 1..5940: mol_type = unassigned DNA; mol_type = unassigned DNA
gggatcctttggcttttcctggaaacactgtcctggtcctttgcccgggttttagggaaggatgagtagtgtcgggatggtggaggcaggagaagagagcagcgtggtttgctgagatttaggggtcttggatctgccactggctcctgataggtccctgggcggtcagtggcctccagatttttgttgtgtcttcagtgaaatgataccggtccccactgcccagctcacctcccggggctgcaggaggcaccggagataatggctgtagagggtcttgtaacctgaacattgcttgcaaacataaggaattctagttactgggaggaagcacagggcagaggccagaagaggccctcagatttgaggcaccctagcccagacggataaggatccaccagctctgggggcgtgagacccaagctggcaagaatctgcaatctggagccaaggctgtgggtgcctcagtggaggccgagtcagaccgacgtggccagctttgaccctcatggcctcctttcttctgtcccttgaccttcggctcctccctgtccaccctggcctccgagtctcctccacttttccttccgtctcagccctcagctctaggcgcccctccagagacccagctgtcttcccaggccccttcccagcaaggactagcttcatctgaaccacacacacactcacggttcaacctcagactaaaattatcctctcccctgggcaggatgaagggcagccgactccctggtgagggtggagacagacagcaccaaatggtcaggccagagaaggggccagggctaaaaatggacaaggaggtgtctgtggagggcccctgcggctccatcgatgcgggttagggctggagtctgcggggtggcgggtgcaggaagggagggtggggcaggactgggaggagactccgaccttggctgggcggtgccctccctctccacacagctgggtgtggggccgctcagccacaggctgcatgcctgtcggtctctttctggcaccctccttgaggccagcatcaggctttgggttcatgtttgggggtgtgccctggacggagtgtgggcctccagccaggctgccccactgacagtttggcaaaaccaggacctatctggaagccgaagccggggatcaccaggtggacccagcggggtgggactgagtgactgaccctggggtgttggattccatctggcccccggctgccttcaaacaggtgttcagtggaaagcgactggaggctgagttcccacctcatcactctcagagcaccttccggaagacctcgcccgcccctgggggcccagcaggggaggggcccctgcagagcctcacctgcctcattggggagaaggacctgcgcctcctggagaagctgggtgatggttcctttggcgtggtgcgcaggggcgagtgggacgcgccctcagggaagacggtgagctctctgtgtcctgccagcgcagcagaggcatgggacccggggctggtagtggctcttctgcccccaaccagggtgtggatgggactggggatgcgtcacagtgtggctcatcccagagtccgtgctcaggatttttggggttttatttatttatttatttttgagatggagtctcgctctgtcgcccaggctggagtgcagtaggcacgatctcggcttcctgcaacctccactttccgggttcaagcaatcctcctgcctcagcctcctgagtagctgggattacaggcatgcaccaccacactcagttaatttttgtatttttagtagagacggggtttcaccatgttggccaggctggtctcgaactcctgacctcagatgatctgcccactttagcctcccaaagtgcttggattacaggtgtgagccaccacgtccagcccatgctcaggtttaactaagcacatttattatttcaactataaaaataatttattataaaagtttggaaagtatttgaaaaacaagaaaaaaaaaatcgcctgtaatcccaccactcagaggaagccgagcctcttcctcccactttaggtattttgttggatttagttaagatacaaattctggatacagcttttaaaatcttgttctttcttctcggcgttgcatttaacattttcccctcagggataacgtgtcaccacagcatacagttctggtgtgactgtttcctgtgcagcagccgtgtccttactgctcagatcacgtgcggtgcattcccagcacctcagagggctcctcattctccgtccactcagtgcgtccttctcccggggaagccgctgtcactcagtgcatccttctcccggggaagccgctgtgcagacttccagctccacagctttgtttttggcattacatttacagcattttccttctacagcaaaacaccttttaatattccattttatgaccagcctgagcaatatggagaaaccccatctctactaaaaatacaaaattagccaggcgtggtggcacctgcctgtaatcccagctactcaggaggctgaggcaggagaatcacttgaacccgggaggcagaggttgcagtgagctgagatcacgtcactgcattccagcctgggcgacaagagcgagactgtctcaaaaaaaaaaattccattttataacatttgaatattctctcatcatactggttatctcttactttttggttggtatttaagcccggcattcccccaggaaggggaggtgtggccgacgatggctcctgagggccagccgtctgcccttctccagccaggcctcacgcagagcacgtaagcccaggcactggtgacatgcttacccacccagatgaggagctcacaggcagggatcgttgagccgagttggagggtggagcaggttggctccgcgtgtctgggacctggcaagtcctgagtccttgcaaatcccgctctgggcaggtgagtgtggctgtgaagtgcctgaagcccgatgtcctgagccagccagaagccatggacgacttcatccgggaggtcaatgccatgcactcgctcgaccaccgaaacctcatccgcctctacggggtggtgctcacgccgcccatgaagatggtgacagagctggcacctctgggatcgttgttggaccggctacgtaagcaccagggccacttcctcctggggactctgagccgctacgctgtgcaggtggctgagggcatgggctacctggagtccaagcgctttattcaccgtgacctggctgcccgcaatctgctgttggctacccgcgacctggtcaagatcggggactttgggctgatgcgagcactacctcagaatgacgaccattacgtcatgcaggaacatcgcaaggtgcccttcgcctggtgtgcccccgagagcctgaagacacgcaccttctcccatgccagcgacacctggatgttcggggtgacactgtgggaaatgttcacctacggccaggagccctggatcggcctcaacggcagtcagatcctgcataagatcgacaaggagggggagcggctgccccggcccgaggactgtccccaggacatctacaacgtcatggtccagtgctgggctcacaagccagaggacagacccacgtttgtggccctgcgggacttcctgctggaggcccagcccacagacatgcgggcccttcaggactttgaggaaccggacaagctgcacatccagatgaatgatgtcatcaccgtcatcgagggaagggccgagaactactggtggcgtggccagaacacacggacgctgtgtgtggggcccttccctcgcaacgtggtgacctccgtggccggcctgtcggcccaggacatcagccagcccctgcagaacagcttcatccacacagggcatggcgacagtgacccccgccactgctggggcttcccggacaggattgacgaactgtatctgggaaaccccatggacccccccgacctcctgagcgtggaactgagcacctcccggcccccccagcatctaggaggggtgaaaagtaagagcccctctgctccctggtgtccctaactcatcggctactcaggaaggggcactgtcttcacaggccaccctaaggctgctgttctgtttttggggacagtggggtcagggcagcaggcgggacagctgtgtccctggctccggctgggcgtggggtggaagacaggcagctgtatccgccgaggtgggcctcctcgggctgggtctgcagcaggcccgtccgccccggcgtccctcctccctccttccacggccgagctcagatcctggctttcctcacttccccctaatcctgctctcctgtcccaagccaaaaccaccccacggctccggctctgcctggggcctcctccatctcccggtcctctgcctatcatactggaccgccgtgttcctcatcctgccgcctgcggcctcccgtttgctgggggcttgtacattcactcgcccccattcacttctctcccttcgtctctctacactctgccctctcgtccggccgtctccctcctttgtcctctgtcctgctccgtctctctccccctgtccgcatggcctttcttgcaggggagcctccacctcgcccacctcagcctgccttcttcactcagagtaagtggggctgcttccgatgccttggcccccgcccccgccccctctctctcactcctctcctggaaggtacagagcctgggcggctgggccggaggggaggtgggtgggtgtgtgctgtgagcttccgcggctgccctggcctagcatgcctgccccccctcgagcccgccccccggagcctgggcttctgctcacgagtgtggccctggcttccgcctcggcctcactccctcccagacctgtctgagcttctggagcacgagtgtggccctggcttctgccttggcctcgctgcctcccagacctgcaggcgctgtctgggctttgtggccgttggtcaggagtactgtcctctccaaggatagtccttatagcccctgatggcaggaggcggctccgtgcctgcactaatggtgtgccgtgacaggggcggggatgagggctcactaactcgccagggcgcaggagcagggccgccggggtcttgtgctggtggaggcagcgtcaggcaggagccagtgttgcttgctgcagcttagacggagcgaggcggggctcaccggcccacatggggctgccgggcagagcaggttccgccctcctgatggagtggtcggaggtgcgctgagaacctggccgccggtggctgacctcagacctcggggggagttgggagtggagggttgctgggggacacttggctttctctcccacgtgccacctcccctcgtgtcccagaccctgcctgactgccttcctgttgggctctccctttccatcacagaaccaacctatgaccctgtgagcgaggaccaagaccccttgtccagcgacttcaagaggctgggcctgcggaagccaggcctgccccgagggctgtggctggcgaagccctcggcgcgggtgccgggcaccaaggccagccgaggcagcggggctgaggtcacgctcatcgacttcggtgaggagcccgtggtcccggccctacggccctgcgcgccctccctggcgcagctggccatggacgcctgctccctgctggacgagaccccgcctcagagccccacgcgggcactgccccggcccctgcaccccacgcctgtggtggactgggacgcacgcccgctgccccccccgcccgcctatgacgacgtggcccaggatgaggatgactttgagatctgctccatcaacagcaccctcgtgggcgcgggggtccctgccgggcccagccagggccagaccaactacgcctttgtgcctgagcag

SEQ ID NO: 21931 - DNA, 726 bp, Homo sapiens
  misc_feature 1..726: note = ENST00000424563
  source 1..726: mol_type = unassigned DNA; mol_type = unassigned DNA
ggctctgggggctccttccccctgggccaccagccctggcttggaaccacagcacctgccctccgtgcctggagctgctcaggagggccgagaactactggtggcgtggccagaacacacggacgctgtgtgtggggcccttccctcgcaacgtggtgacctccgtggccggcctgtcggcccaggacatcagccagcccctgcagaacagcttcatccacacagggcatggcgacagtgacccccgccactgctggggcttcccggacaggattgacgaactgtatctgggaaaccccatggacccccccgacctcctgagcgtggaactgagcacctcccggcccccccagcatctaggaggggtgaaaaaaccaacctatgaccctgtgagcgaggaccaagaccccttgtccagcgacttcaagaggctgggcctgcggaagccaggcctgccccgagggctgtggctggcgaagccctcggcgcgggtgccgggcaccaaggccagccgaggcagcggggctgaggtcacgctcatcgacttcggtgaggagcccgtggtcccggccctacggccctgcgcgccctccctggcgcagctggccatggacgcctgctccctgctggacgagaccccgcctcagagccccacgcgggcactgccccggcccctgcaccccacgcctgtggtggactgggacgcacgcccgctgccccccccgc

SEQ ID NO: 21932 - DNA, 565 bp, Homo sapiens
  misc_feature 1..565: note = ENST00000478623
  source 1..565: mol_type = unassigned DNA; mol_type = unassigned DNA
accacagcacctgccctccgtgcctggagctgctcaggaggtgggaggtgaggggcaggaggccacaacagccgggccgagaactactggtggcgtggccagaacacacggacgctgtgtgtggggcccttccctcgcaacgtggtgacctccgtggccggcctgtcggcccaggacatcagccagcccctgcagaacagcttcatccacacagggcatggcgacagtgacccccgccactgctggggcttcccggacaggattgacgaactgtatctgggaaaccccatggacccccccgacctcctgagcgtggaactgagcacctcccggcccccccagcatctaggaggggtgaaaaaaccaacctatgaccctgtgagcgaggaccaagaccccttgtccagcgacttcaagaggctgggcctgcggaagccaggcctgccccgagggctgtggctggcgaagccctcggcgcgggtgccgggcaccaaggccagccgaggcagcggggctgaggtcacgctcatcgacttcggtgaggagcccgtggtcccggccctac

SEQ ID NO: 21933 - DNA, 600 bp, Homo sapiens
  misc_feature 1..600: note = ENST00000411741
  source 1..600: mol_type = unassigned DNA; mol_type = unassigned DNA
gttggccccagccgctggttccctgtggctgctgctggtggggctctgggggctccttccccctgggccaccagccctggcttggaaccacagcacctgccctccgtgcctggagctgctcaggagtccctgaatatctccatgtttgtttggctgcctccgtctccatgtctccaggcggatggctctgtggccgagaactactggtggcgtggccagaacacacggacgctgtgtgtggggcccttccctcgcaacgtggtgacctccgtggccggcctgtcggcccaggacatcagccagcccctgcagaacagcttcatccacacagggcatggcgacagtgacccccgccactgctggggcttcccggacaggattgacgaactgtatctgggaaaccccatggacccccccgacctcctgagcgtggaactgagcacctcccggcccccccagcatctaggaggggtgaaaaaaccaacctatgaccctgtgagcgaggaccaagaccccttgtccagcgacttcaagaggctgggcctgcggaagccaggcctgccccgagggctgtggctggcgaagccctcggcgcgggtg

SEQ ID NO: 21934 - DNA, 1220 bp, Homo sapiens
  misc_feature 1..1220: note = ENST00000489628
  source 1..1220: mol_type = unassigned DNA; mol_type = unassigned DNA
cttctctccctgccccatcccagagcctctgacctccttcctttccatgcttctctggctgggaaacttcctttcctcttcccccaccaggctgcaagtgaataagaggcctgggcttagacgatttccccaagtccctgcatcgtgtcgtcaaggggtcctgcccgcttcacacggcgcccctgagacccactgttgaacctggcacagggggtcacaacaagtgtttgctgcatgagtgttttaagtccctggggcggacgcaggtagggtgtttgagagggcttctctttgacccctgcctctgccaggtgtgcccccgagagcctgaagacacgcaccttctcccatgccagcgacacctggatgttcggggtgacactgtgggaaatgttcacctacggccaggagccctggatcggcctcaacggcagtcagatcctgcataagatcgacaaggagggggagcggctgccccggcccgaggactgtccccaggacatctacaacgtcatggtccagtgctgggctcacaagccagaggacagacccacgtttgtggccctgcgggacttcctgctggaggcccagcccacagacatgcgggcccttcaggactttgaggaaccggacaagctgcacatccagatgaatgatgtcatcaccgtcatcgagggaagggccgagaactactggtggcgtggccagaacacacggacgctgtgtgtggggcccttccctcgcaacgtggtgacctccgtggccggcctgtcggcccaggacatcagccagcccctgcagaacagcttcatccacacagggcatggcgacagtgacccccgccactgctggggcttcccggacaggattgacgagacaccccccagctgagacgtgcggtcaggttctgtggactgggaggcgggaggcctgtgcttcagacccaagactacacccggtttcctccaggacgaaggggctctgatgagattctgccacccctccacacgcttcccctgctctcttgacccagctctctcccccacagactgtatctgggaaaccccatggacccccccgacctcctgagcgtggaactgagcacctcccggcccccccagcatctaggaggggtgaaaaaaccaacctatgaccctgtgagcgaggaccaagaccccttgtccagcgacttcaagaggctgggcctgcggaagccaggc

SEQ ID NO: 21935 - DNA, 1048 bp, Homo sapiens
  misc_feature 1..1048: note = ENST00000478715
  source 1..1048: mol_type = unassigned DNA; mol_type = unassigned DNA
gtggtgacctccgtggccggcctgtcggcccaggacatcagccagcccctgcagaacagcttcatccacacagggcatggcgacagtgacccccgccactgctggggcttcccggacaggattgacgagacaccccccagctgagacgtgcggtcaggttctgtggactgggaggcgggaggcctgtgcttcagacccaagactacacccggtttcctccaggacgaaggggctctgatgagattctgccacccctccacacgcttcccctgctctcttgacccagctctctcccccacagactgtatctgggaaaccccatggacccccccgacctcctgagcgtggaactgagcacctcccggcccccccagcatctaggaggggtgaaaagtaagagcccctctgctccctggtgtccctaactcatcggctactcaggaaggggcactgtcttcacaggccaccctaaggctgctgttctgtttttggggacagtggggtcagggcagcaggcgggacagctgtgtccctggctccggctgggcgtggggtggaagacaggcagctgtatccgccgaggtgggcctcctcgggctgggtctgcagcaggcccgtccgccccggcgtccctcctccctccttccacggccgagctcagatcctggctttcctcacttccccctaatcctgctctcctgtcccaagccaaaaccaccccacggctccggctctgcctggggcctcctccatctcccggtcctctgcctatcatactggaccgccgtgttcctcatcctgccgcctgcggcctcccgtttgctgggggcttgtacattcactcgcccccattcacttctctcccttcgtctctctacactctgccctctcgtccggccgtctccctcctttgtcctctgtcctgctccgtctctctccccctgtccgcatggcctttcttgcaggggagcctccacctcgcccacctcagcctgccttcttcactcagagtaagtggggctgcttccgatgccttggcccccgcccc

SEQ ID NO: 21936 - DNA, 737 bp, Homo sapiens
  misc_feature 1..737: note = ENST00000468680
  source 1..737: mol_type = unassigned DNA; mol_type = unassigned DNA
gcgttgggtcccaggtctgctgggatctttctggtaaccgtggacaggtcatgttgcctgctgcagcagcttccagcgtgcctccttatttgcaaaccatagggaaagctgcctgacccacctagagagttgtgggtaaggccgtgtgcaaacaggcctgtacggggcatggtgggtcacgggggctgttggggaggagggccggtggcacacagcctggtcctgaggcctgagctccatcccccttctgccacagtggccagggtgtgaggagggtcccagtgccggggctgccccgccacgcctggcgttcaccgtgccatctctgtcgcgcagggccgagaactactggtggcgtggccagaacacacggacgctgtgtgtggggcccttccctcgcaacgtggtgacctccgtggccggcctgtcggcccaggacatcagccagcccctgcagaacagcttcatccacacagggcatggcgacagtgacccccgccactgctggggcttcccggacaggattgacgagacaccccccagctgagacgtgcggtcaggttctgtggactgggaggcgggaggcctgtgcttcagacccaagactacacccggtttcctccaggacgaaggggctctgatgagattctgccacccctccacacgcttcccctgctctcttgacccagctctctcccccacagactgtatctgggaaaccccatggacccccccga

SEQ ID NO: 21937 - DNA, 300 bp, Homo sapiens
  misc_feature 1..300: note = ENST00000486523
  source 1..300: mol_type = unassigned DNA; mol_type = unassigned DNA
ggcgatggcctcgcgccagtgctgggcgcggcacccccgcgtgggcctgtgttgggcggcttttgagcaggagtccgggccctcgtgtcaccgctctgaagtcaaggagggccgagaactactggtggcgtggccagaacacacggacgctgtgtgtggggcccttccctcgcaacgtggtgacctccgtggccggcctgtcggcccaggacatcagccagcccctgcagaacagcttcatccacacagggcatggcgacagtgacccccgccactgctggggcttcccggacaggattg

SEQ ID NO: 21938 - DNA, 870 bp, Homo sapiens
  misc_feature 1..870: note = ENST00000438207
  source 1..870: mol_type = unassigned DNA; mol_type = unassigned DNA
agccagaggagggcacaggctggctgctggagctgctgtccgaggtgcagctgcaacagtacttcctgcggctccgagatgacctcaacgtcacccgcctgtcccactttgagtacgtcaagaatgaggacctggagaagatcggcatgggtcggcctggccagcggcggctgtgggaggctgtgaagaggaggaaggccttgtgcaaacgcaagtcgtggatgagtaaggtgagtgtggctgtgaagtgcctgaagcccgatgtcctgagccagccagaagccatggacgacttcatccgggaggtcaatgccatgcactcgctcgaccaccgaaacctcatccgcctctacggggtggtgctcacgccgcccatgaagatggtgacagagctggcacctctgggatcgttgttggaccggctacgtaagcaccagggccacttcctcctggggactctgagccgctacgctgtgcaggtggctgagggcatgggctacctggagtccaagcgctttattcaccgtgacctggctgcccgcaatctgctgttggctacccgcgacctggtcaagatcggggactttgggctgatgcgagcactacctcagaatgacgaccattacgtcatgcaggaacatcgcaaggtgcccttcgcctggtgtgcccccgagagcctgaagacacgcaccttctcccatgccagcgacacctggatgttcggggtgacactgtgggaaatgttcacctacggccaggagccctggatcggcctcaacggcagtcagatcctgcataagatcgacaaggagggggagcggctgccccggcccgaggactgtccccaggacatctacaacgtcatggtcc

SEQ ID NO: 21939 - DNA, 829 bp, Homo sapiens
  misc_feature 1..829: note = ENST00000430929
  source 1..829: mol_type = unassigned DNA; mol_type = unassigned DNA
gtgttcagtggaaagcgactggaggctgagttcccacctcatcactctcagagcaccttccggaagacctcgcccgcccctgggggcccagcaggggaggggcccctgcagagcctcacctgcctcattggggagaaggacctgcgcctcctggagaagctgggtgatggttcctttggcgtggtgcgcaggggcgagtgggacgcgccctcagggaagacggtgagtgtggctgtgaagtgcctgaagcccgatgtcctgagccagccagaagccatggacgacttcatccgggaggtcaatgccatgcactcgctcgaccaccgaaacctcatccgcctctacggggtggtgctcacgccgcccatgaagatggcatcagtttcccaaattgcctcgagggagaggcctgagaaactgcaggactcctagaggtccccagacagcaggccaggaaggtgacagagctggcacctctgggatcgttgttggaccggctacgtaagcaccagggccacttcctcctggggactctgagccgctacgctgtgcaggtggctgagggcatgggctacctggagtccaagcgctttattcaccgtgacctggctgcccgcaatctgctgttggctacccgcgacctggtcaagatcggggactttgggctgatgcgagcactacctcagaatgacgaccattacgtcatgcaggaacatcgcaaggtgcccttcgcctggtgtgcccccgagagcctgaagacacgcaccttctcccatgccagcgacacctggatgttcggggtgacactgtgggaaatgttcacctacgg

SEQ ID NO: 21940 - DNA, 876 bp, Homo sapiens
  misc_feature 1..876: note = ENST00000468819
  source 1..876: mol_type = unassigned DNA; mol_type = unassigned DNA
atgtttttagtctggggctccttcctcatgtcagctccctagtggcagagcagtctccctcggtgtctctctggccaccatgatcagtgtcacggacacatcccagcatagccccagttctcaaccgcatggcagggaccgtccaggagttgaggctgggaggcggcagaatgcagccagaggagggcacaggctggctgctggagctgctgtccgaggtgcagctgcaacagtacttcctgcggctccgagatgacctcaacgtcacccgcctgtcccactttgagtacgtcaagaatgaggacctggagaagatcggcatgggtcggcctggccagcggcggctgtgggaggctgtgaagaggaggaaggccttgtgcaaacgcaagtcgtggatgagtaaggtgttcagtggaaagcgactggaggctgagttcccacctcatcactctcagagcaccttccggaagacctcgcccgcccctgggggcccagcaggggaggggcccctgcagagcctcacctgcctcattggggagaaggacctgcgcctcctggagaagctgggtgatggttcctttggcgtggtgcgcaggggcgagtgggacgcgccctcagggaagacggtgagtgtggctgtgaagtgcctgaagcccgatgtcctgagccagccagaagccatggacgacttcatccgggaggtcaatgccatgcactcgctcgaccaccgaaacctcatccgcctctacggggtggtgctcacgccgcccatgaagatggtgacagagctggcacctctgggatcgttgttggaccggctacgtgtgcccccgagagcctgaagacacgcaccttctcccatgccagcgacacctg

SEQ ID NO: 21941 - DNA, 763 bp, Homo sapiens
  misc_feature 1..763: note = ENST00000447060
  source 1..763: mol_type = unassigned DNA; mol_type = unassigned DNA
tcatttcccacccctggtgtgggatttggggggctcctgggcagagtgcgaagctccggagccgaggccactggatccccagtgactgctcgggggggtcccgctgcgtggagatgccggcagcacgtcggttccctggcctggagctctccttccctctcctggccagactgcggcgacgcctgtacacaaggctgggaggcggcagaatgcagccagaggagggcacaggctggctgctggagctgctgtccgaggtgcagctgcaacagtacttcctgcggctccgagatgacctcaacgtcacccgcctgtcccactttgagtacgtcaagaatgaggacctggagaagatcggcatgggtcggcctggccagcggcggctgtgggaggctgtgaagaggaggaaggccttgtgcaaacgcaagtcgtggatgagtaaggatgaagggcagccgactccctggtgagggtggagacagacagcaccaaatggtcaggccagagaaggggccagggctaaaaatggacaaggaggtgtctgtggagggcccctgcggctccatcgatgcgggtgttcagtggaaagcgactggaggctgagttcccacctcatcactctcagagcaccttccggaagacctcgcccgcccctgggggcccagcaggggaggggcccctgcagagcctcacctgcctcattggggagaaggacctgcgcctcctggagaagctgggtgatggttcctttggcgtggtgcgc

SEQ ID NO: 21942 - DNA, 580 bp, Homo sapiens
  misc_feature 1..580: note = ENST00000433111
  source 1..580: mol_type = unassigned DNA; mol_type = unassigned DNA
gtcgggctgttttcctgggcgaggagaaagggggccgggccgggccgggcgcggtggctcacgcctgtcatctcagcactttgggaggccgaggcgggcagatcacctgagacgaggacgctgagctggattactgggccagttacaggtcttgttcttactggacatccaagcatcccggagttccttcccgtcctcccacatgcatcccctgtgcagagctgcgctgttgctgggtcagggagcatggagtgcacagctgaacagagaggctgggaggcggcagaatgcagccagaggagggcacaggctggctgctggagctgctgtccgaggtgcagctgcaacagtacttcctgcggctccgagatgacctcaacgtcacccgcctgtcccactttgagtacgtcaagaatgaggacctggagaagatcggcatgggtcggcctggccagcggcggctgtgggaggctgtgaagaggaggaaggccttgtgcaaacgcaagtcgtggatgagtaaggtgttcagtggaaagcgactggaggctgagttcccacctcatcactctcagagcacctt

SEQ ID NO: 21943 - DNA, 541 bp, Homo sapiens
  misc_feature 1..541: note = ENST00000427576
  source 1..541: mol_type = unassigned DNA; mol_type = unassigned DNA
gagggggtgtacacgtggggtggattctcgaactcctagagggaaggtgccctgagctcagccctaaatacctggtactaaagagtcagtggctgcttcagatgccaccagaatgagaagcggtgccttggggccccgggggagaggaagagcctctgccctgggacttcctgtgccggcgatggcctcgcgccagtgctgggcgcggcacccccgcgtgggcctgtgttgggcggcttttgagcaggagtccgggccctcgtgtcaccgctctgaagtcaaggagaggctgggaggcggcagaatgcagccagaggagggcacaggctggctgctggagctgctgtccgaggtgcagctgcaacagtacttcctgcggctccgagatgacctcaacgtcacccgcctgtcccactttgagtacgtcaagaatgaggacctggagaagatcggcatgggtcggcctggccagcggcggctgtgggaggctgtgaagaggaggaaggccttgtgcaaacgcaagtcgtggatgagtaaggtg

SEQ ID NO: 21944 - DNA, 5413 bp, Homo sapiens
  misc_feature 1..5413: note = ENST00000361379
  source 1..5413: mol_type = unassigned DNA; mol_type = unassigned DNA
ctcggctctgcccctcacagtctgcagtctacggcgaggcacaggccagcccagctccacgaggactgaacaaggtgctgtctcactgccaccatgccggaagtcgagagaaaacccaagatcactgcctcccgcaaactcttgctgaagagcctgatgctggccaaggccaaggaatgctgggagcaggagcacgaggagcgcgaggctgagaaggtgcgctacctggcagagcgcatccccacgctgcagacccgtggcctgtccctcagtgccctgcaggacctgtgccgggagctgcacgccaaggtggaggtggtggatgaggagcgatacgacattgaggccaaatgcctccacaacaccagggagattaaggacctgaagctgaaggtgatggacctccgtgggaagttcaagcgcccgcccctgcgtcgagtccgtgtctcggctgacgccatgctccgggccctgctgggctccaagcacaaggtgtccatggatctgcgggccaacctcaagtctgtgaagaaggaagacacagagaaggagcggcctgtggaggtgggtgactggaggaagaacgtggaggccatgtctggcatggaaggccggaagaagatgtttgatgccgccaagtctccgacctcacaatagaggccagcttgctgtgctgcgctctgagctcctgcttcatgcttcttctccaacccagctcactcacctctctgcctgtgtctggagcatcccttcccacctctcccccacttcttccctccagcctgcatgccctcctctggaactgggattaaacagatacccaagaggcaggaaaaacgcgagtgtctgaagacctcaccctggcagggtgggcttctatccacccatgaggcacctggggcttctcagccaccccgtggtgtaacaagtggaggaggaggagggggtgagaacacctttcctccagccctgtgccacactccttctatgtgtgtacagtgtccacaggcatcacaccttcttcattaaaaacccagtttcctggtcatttctgcagctctgactgtgagccctgagaagaaagggaagacttggggcttgggaagagagggctgtgctgggctccagtcaccctgtctgcagtccggagctcgggatctgaagggagggctaaggaattggtggctgcttgccagggtcccctggggccccttctgcccagtccctgtgacgtcacactgcacacactcaccacccaggatgctcagctcaccagagccctgacctccgagaaatgaccccgtcctgcccctgactctggccatcagaagaggcctctccattaagagccgcttctcctgccggctttcatactctccttcctctgcaaacctggattaactctccctgatgtgtgctgggttgagaggtcagggcactttcaatccctcacctagtcctgctgcacagggcaggaggcctcacagaagagatacttgcagttccaggcctggccaccaggtgacgccttccttctctcctgggctctcctgtccctccggcctctgctctccccacgttcacccaccctcctcccaattgtttccccttcacactcctgcactggtcctatcccccaggactgattctttcccggagatggggtggccacttatctgtcctctggatcaggtcctttctccatcccactacctcctgggtccaaagcctggtgagagcatagggccttctggggtggaaggggggtctggggcagcctctcttcccccaacatactcactagagtggctcctgtgaagcagagaccaaagttctgacttttctttttccttttttttttttttttgagatggagtctcgctgtgtcacccaggctggagtgcagtgacgcgatctcgactcactgcaacctccgcctcccaggttcaagcgattctcctgcttcaacctcctgagtagctgggattacaggtgcgtgccaccacaccccgctaatttttgtatttttagtagagacagggtttcaccatgttggtcaggctggtctcgaactcctgacctcgtaatctgcccacctcggcctcccaaagttctgggattacaggtgtgagcgaccacatccggtcaagttctgacttttcagggcagtgggatggtgacttctgagctaagcctgcaagggaagtggctgttcccagacctggggtcccttggcttttcgaccaccctagcactggccctaggaggggctgagttatcagagcagcaacccttctacccaccctactgagtccccattctaccttcgaatcccatgtattatcttccataagtgccagaaattggtacaaagtgcagtgccagctgctccccagggcatggtctggctctctgggctgctgggctgccagcccctttcagaaagcatggcagtgggaaccagcaacttgggctaccttaggggaagcagcactctgcccagggttcttgctataaataggtcagtgggcagagaggcagatgtgtgcaaaaagcacaaccccaatcacacacagaaacccgtaggcacggacacacccagtctcaatgcacgaagttggagaacctgacagggctggtccaggccacagaggatggggttaggcttcatgccttcatgcccaggcagccacagaaacccactcttccccgcctcacagggctcctccggttggcctggatccaaagcgatctccttgtttcacctctttccagctcttccctagagcctggccccaagttccagagtcaaatcccagttttgcagtcaactattaacctggggccctggcagattggggtatccacccagtcatgtaaaggcaggagacctgctctgggcctgactcaaagcaaacacgtgggtgcagaagacccatgggaggaggaggtggggcccactcaacacacctaagccagtggccctctaggaggggcagaagagccaaccagagggttcctggaggtcatcgggttcctccttctgcttccaggcagcaacagacctaattcatctcctgtgaggatggagcaagggcgaatataggcatagacatatctggagcgcaaggattgagaggccctgtggacaaggggaaggagagcttgggggtgggagagggatctatggaaggggctgttgtagccaagaatggggcctgggctgggggcctggcctctggagagccctgattctactccagtcttctctcaccatggagacaacaccagtagagctgggagctggggcctgccactgagtaacagctcacacatgtagcacacttatgcgtcaggcaccagcatgtacaccttaatttatttaactttcacaacaaccctaggagaaaggtacagctactattctcatggtacagtggggaaaactgaggcacagagaggttagggacttttcatgatcacacagctaataagtggtggtcccaggattcaacccaagaagtctgttagaatccatactcttatcgactattttaataacagcatttcaataatagtaatatgtgatgttaaatgctttatctgagttatatcattgcattctcacaaaaatggtacatttgttagctcaaatttacagatgaggaaatggaggcctggagagttcaagtagctcactctaagttacagggtttgctagctgcagactggagactagatctcaggtcactctgccttggggttgcccttttctgagatcagactggccttaacagagcccaactttcttggaaggacacagctgggggtcgagggtcctgcatatgcacctggggagtccccacacacccgcaccaaaggggaaacattcaaaggagatgcaggtgacatacagatgggctaaggtgaggccttcctccaacatggggccctggctgagagtggagggatagggtgctacttgggggatatctattactaatcagcacacaatagctgggtgggcaccccctctctctgcagctggtggagatgggcctggtgctcctctctgcttggtaggaatgaccagggcaggatgccacctgctacactcttgcctgtcccagagcccttgggagaccagctgttgctcccacctttccccacagggtgcccggtccccacggcgcaaggaggccaagctcagctgtgtgtctgagcccactcagcagcaggcatgatcagggcagggcccagcgctaagggctgctggggctaaagtgccttgctgaaggaggggcagagttaaacattagccacaatggccccccgcgaagtgagtcatactccccacaagtctctgggctgggcagccgggggcgggggggttagcttcgttccaggtgggtgaccaagctgcggaagcccaggacagttcgctgggaccagtgctaatggcagcttctgctcctgacccccatcaggtctctttcctcagacatccccaaagcttgtctgcctgtgggtctttcattaaaggtgacgggcaagggttttctcttccttccaagacacacttctaggctggcttgtgggtcccctgagacgaaggctgagcagggtgagcctcgaaaaccccatagcactggcccagagcactgcggtcaatgtccgaaggaccagagagggagggtgacttgctcaaggtcacaaacctaactggagctaggaagtaggtccccagactcccagtctgaggaaattggatgtggacagggctttggtctcctggccagaggcaaacgcccagggatctgaacaggctgcccatctctggcctcaactcagcaccccaactggctccagtgccaaccattggcctctctcactggttggcacaggctgggtgagcctggccctttgccctgggttcaggagagaggtatggctttgcctggcagtcaggggaggtgttccaacctgggagcccctgggggaggagcgtgtgtgtgaacgcttgtgcctgttcatcagaaggggtgagcatggtgtgtatgcgtgggcatgcagaatgcagggtgatgacctgtctgcccgccctgagtgtcacagacacctgtgtgtcccctgtactagtgcctcccagatgctcttctcctgactggctctttgtgacctaaatttcaactgctccaccccacaaggaggaaaccagggccacaaatgtagtgagattttcataaagctaaatgtattcagtggaaacgaccttcctctgatctaaaagcatgcatgcctttgttttattactggagtattaaattagcccttacttatggaataggaggacagtaggtggcaattgttttctaatgctcttacttcacaaaataaaatggtggcagcacaa

SEQ ID NO: 21945 - DNA, 1750 bp, Homo sapiens
  misc_feature 1..1750: note = ENST00000336092
  source 1..1750: mol_type = unassigned DNA; mol_type = unassigned DNA
aaactgccccagcaggccccagggaaggacggcaggctgggatgccgtccccacggactccctctcctctcttagccctggcactaagtgcgttcctctggcaaagaagaaaataatttctgtccctcgccatctgctgcatgggaagatgggaatggagtgagcacggcaagacagatgctgcgtcctgcaatggccccaccatggaccctcgtcatccaaccgaagtcgcccccttgcctggctttatcttcactatattgtgaggctgcttcattgaatcttatcccagactttaacttttccatgactgccgtgattttgccatgttgttcacacagagtgtgtctgaccttagctgcattgccaccgcctttgggaccctgagccttcttgccagcactgtcactcccagaggttgcttccactttccccttttccagaaccacttgttcctttgggtggcatcctggaaacttgctgttgaagtctcaactgcctcagtggttcttcaagggaggtcctcaggccaccacctgagaaattgttagaaatgcaagtttctgggctgcatcccagacctgctgaatcagaaatttggggaggagcacggactttggcaccagagagctgggtgcagctctcagctctgcgtcatccttgctgtgggaccctgggttattgctgagccactgtgagtctgtttcctcgtgggtatagtaggtctgcagtctacggcgaggcacaggccagcccagctccacgaggactgaacaaggtgctgtctcactgccaccatgccggaagtcgagagaaaacccaagatcactgcctcccgcaaactcttgctgaagagcctgatgctggccaaggccaaggaatgctgggagcaggagcacgaggagcgcgaggctgagaaggtgcgctacctggcagagcgcatccccacgctgcagacccgtggcctgtccctcagtgccctgcaggacctgtgccgggagctgcacgccaaggtggaggtggtggatgaggagcgatacgacattgaggccaaatgcctccacaacaccagggagattaaggacctgaagctgaaggtgatggacctccgtgggaagttcaagcgcccgcccctgcgtcgagtccgtgtctcggctgacgccatgctccgggccctgctgggctccaagcacaaggtgtccatggatctgcgggccaacctcaagtctgtgaagaaggaagacacagagaaggagcggcctgtggaggtgggtgactggaggaagaacgtggaggccatgtctggcatggaaggccggaagaagatgtttgatgccgccaagtctccgacctcacaatagaggccagcttgctgtgctgcgctctgagctcctgcttcatgcttcttctccaacccagctcactcacctctctgcctgtgtctggagcatcccttcccacctctcccccacttcttccctccagcctgcatgccctcctctggaactgggattaaacagatacccaagaggcaggaaaaacgcgagtgtctgaagacctcaccctggcagggtgggcttctatccacccatgaggcacctggggcttctcagccaccccgtggtgtaacaagtggaggaggaggagggggtgagaacacctttcctccagccctgtgccacactccttctatgtgtgtacagtgtccacaggcatcacaccttcttcattaaaaacccagtttcctggt

SEQ ID NO: 21946 - DNA, 580 bp, Homo sapiens
  misc_feature 1..580: note = ENST00000555948
  source 1..580: mol_type = unassigned DNA; mol_type = unassigned DNA
cagtctgcagtctacggcgaggcacaggccagcccagctccacgaggactgaacaaggtgctgtctcactgccaccatgccggaagtcgagagaaaacccaagatcactgcctcccgcaaactcttgctgaagagcctgatgctggccaaggccaaggaatgctgggagcaggagcacgaggagcgcgaggctgagaaggtgcgctacctggcagagcgcatccccacgctgcagacccgtggcctgtccctcagtgccctgcaggacctgtgccgggagctgcacgccaaggtggaggtggtggatgaggagcgatacgacattgaggccatgtctggcatggaaggccggaagaagatgtttgatgccgccaagtctccgacctcacaatagaggccagcttgctgtgctgcgctctgagctcctgcttcatgcttcttctccaacccagctcactcacctctctgcctgtgtctggagcatcccttcccacctctcccccacttcttccctccagcctgcatgccctcctctggaactgggattaaacagatacccaagaggcaggaaaaacgcgag

SEQ ID NO: 21947 - DNA, 1100 bp, Homo sapiens
  misc_feature 1..1100: note = ENST00000367312
  source 1..1100: mol_type = unassigned DNA; mol_type = unassigned DNA
ctacggcgaggcacaggccagcccagctccacgaggactgaacaaggtgctgtctcactgccaccatgccggaagtcgagagaaaacccaagatcactgcctcccgcaaactcttgctgaagagcctgatgctggccaaggccaaggaatgctgggagcaggagcacgaggagcgcgaggctgagaaggtgcgctacctggcagagcgcatccccacgctgcagacccgtggcctgtccctcagtgccctgcaggacctgtgccgggagctgcacgccaaggtggaggtggtggatgaggagcgatacgacattgaggccaaatgcctccacaacaccagggagattaaggacctgaagctgaaggtgatggacctccgtgggaagttcaagcgcccgcccctgcgtcgagtccgtgtctcggctgacgccatgctccgggccctgctgggctccaagcacaaggtgtccatggatctgcgggccaacctcaagtctgtgaagaaggaagacacagagaaggagcggcctgtggaggtgggtgactggaggaagaacgtggaggccatgtctggcatggaaggccggaagaagatgtttgatgccgccaagtctccgacctcacaatagaggtacctagagaccagctcccttctctggggtccatcagagtctagaggataatgagggagtccacaatgggcaggcgggttgtacttagtgtggtgcacggatgcacggactaaggcaccgatgagactgatttgagtcggctctcctgggctcagtcctggctccagcaccatgatacttgggcatgtcatttctgtttggcggccctttttgttcccattatctatgaaattgggggctgtatcaaatcagtggttctccaagtgtggtcctgggaccagcagcgtctacatcacctgggatgcaaatgatcagcccccaccccagatccactaaattggaaactctggggtgaggccagccttctaggtgattctgatgcacatgagagtttgagaaccactaggttagagggtccctgggatcccttcatctctgactttctgagaatctatgcacttttaaata

SEQ ID NO: 21948 - DNA, 565 bp, Homo sapiens
  misc_feature 1..565: note = ENST00000555340
  source 1..565: mol_type = unassigned DNA; mol_type = unassigned DNA
tctgcagtctacggcgaggcacaggccagcccagctccacgaggactgaacaaggtgctgtctcactgccaccatgccggaagtgtaagtagtctcactgccatctggggccccaggaagcgagagaaaacccaagatcactgcctcccgcaaactcttgctgaagagcctgatgctggccaaggccaaggaatgctgggagcaggagcacgaggagcgcgaggctgagaaggtgcgctacctggcagagcgcatccccacgctgcagacccgtggcctgtccctcagtgccctgcaggacctgtgccgggagctgcacgccaaggtggaggtggtggatgaggagcgatacgacattgaggccaaatgcctccacaacaccagggagattaaggacctgaagctgaaggtgatggacctccgtgggaagttcaagcgcccgcccctgcgtcgagtccgtgtctcggctgacgccatgctccgggccctgctgggctccaagcacaaggtgtccatggatctgcgggccaacctcaagtctgtgaagaaggaagacacagagaag

SEQ ID NO: 21949 - DNA, 633 bp, Homo sapiens
  misc_feature 1..633: note = ENST00000556362
  source 1..633: mol_type = unassigned DNA; mol_type = unassigned DNA
cctcttcccccagctgctacttgcccctctgggccttcactgtggccctttgctctccctcattccccctcccagtcccatctctgctcagtccccacacctggtctggctgctcattctttccctttctgcagctcgagtctccccagtctgcagtctacggcgaggcacaggccagcccagctccacgaggactgaacaaggtgctgtctcactgccaccatgccggaagtcgagagaaaacccaagatcactgcctcccgcaaactcttgctgaagagcctgatgctggccaaggccaaggaatgctgggagcaggagcacgaggagcgcgaggctgagaaggtgcgctacctggcagagcgcatccccacgctgcagacccgtggcctgtccctcagtgccctgcaggacctgtgccgggagctgcacgccaaggtggaggtggtggatgaggagcgatacgacattgaggccaaatgcctccacaacaccagggagattaaggacctgaagctgaaggtgatggacctccgtgggaagttcaagcgcccgcccctgcgtcgagtccgtgtctcggctgacgccatgctccgggccctgctgggctccaagcacaaggtgtccatggat

SEQ ID NO: 21950 - DNA, 6142 bp, Homo sapiens
  misc_feature 1..6142: note = ENST00000622580
  source 1..6142: mol_type = unassigned DNA; mol_type = unassigned DNA
ctcggctctgcccctcacagtctgcagtctacggcgaggcacaggccagcccagctccacgaggactgaacaaggtgctgtctcactgccaccatgccggaagtacagagaaaacccaagatcactgcctcccgcaaactcttgctgaagagcctgatgctggccaaggccaaggaatgctgggagcaggagcacgaggagcgcgaggctgagaaggtgcgctacctggcagagcgcatccccacgctgcagacccgtggcctgtccctcagtgccctgcaggacctgtgccgggagctgcacgccaaggtggaggtggtggatgaggagcgatacgacattgaggccaaatgcctccacaacaccagggagattaaggacctgaagctgaaggtgatggacctccgtgggaagttcaagcgcccgcccctgcgtcgagtccgtgtctcggctgacgccatgctccgggccctgctgggctccaagcacaaggtgtccatggatctgcgggccaacctcaagtctgtgaagaaggaagacacagagaaggagcggcctgtggaggtgggtgactggaggaagaacgtggaggccatgtctggcatggaaggccggaagaagatgtttgatgccgccaagtctccgacctcacaatagaggccagcttgctgtgctgcgctctgagctcctgcttcatgcttcttctccaacccagctcactcacctctctgcctgtgtctggagcatcccttcccacctctcccccacttcttccctccagcctgcatgccctcctctggaactgggattaaacagatacccaagaggcaggaaaaacgcgagtgtctgaagacctcaccctggcagggtgggcttctatccacccatgaggcacctggggcttctcagccaccccgtggtgtaacaagtggaggaggaggagggggtgagaacacctttcctccagccctgtgccacactccttctatgtgtgtacagtgtccacaggcatcacaccttcttcattaaaaacccagtttcctggtcatttctgcagctctgactgtgagccctgagaagaaagggaagacttggggcttgggaagagagggctgtgctgggctccagtcaccctgtctgcagtccggagctcgggatctgaagggagggctaaggaattggtggctgcttgccagggtcccctggggccccttctgcccagtccctgtgacgtcacactgcacacactcaccacccaggatgctcagctcaccagagccctgacctccgagaaatgaccccgtcctgcccctgactctggccatcagaagaggcctctccattaagagccgcttctcctgccggctttcatactctccttcctctgcaaacctggattaactctccctgatgtgtgctgggttgagaggtcagggcactttcaatccctcacctagtcctgctgcacagggcaggaggcctcacagaagagatacttgcagttccaggcctggccaccaggtgacgccttccttctctcctgggctctcctgtccctccggcctctgctctccccacgttcacccaccctcctcccaattgtttccccttcacactcctgcactggtcctatcccccaggactgattctttcccggagatggggtggccacttatctgtcctctggatcaggtcctttctccatcccactacctcctgggtccaaagcctggtgagagcatagggccttctggggtggaaggggggtctggggcagcctctcttcccccaacatactcactagagtggctcctgtgaagcagagaccaaagttctgacttttctttttccttttttttttttttttgagatggagtctcgctgtgtcacccaggctggagtgcagtgacgcgatctcgactcactgcaacctccgcctcccaggttcaagcgattctcctgcttcaacctcctgagtagctgggattacaggtgcgtgccaccacaccccgctaatttttgtatttttagtagagacagggtttcaccatgttggtcaggctggtctcgaactcctgacctcgtaatctgcccacctcggcctcccaaagttctgggattacaggtgtgagcgaccacatccggtcaagttctgacttttcagggcagtgggatggtgacttctgagctaagcctgcaagggaagtggctgttcccagacctggggtcccttggcttttcgaccaccctagcactggccctaggaggggctgagttatcagagcagcaacccttctacccaccctactgagtccccattctaccttcgaatcccatgtattatcttccataagtgccagaaattggtacaaagtgcagtgccagctgctccccagggcatggtctggctctctgggctgctgggctgccagcccctttcagaaagcatggcagtgggaaccagcaacttgggctaccttaggggaagcagcactctgcccagggttcttgctataaataggtcagtgggcagagaggcagatgtgtgcaaaaagcacaaccccaatcacacacagaaacccgtaggcacggacacacccagtctcaatgcacgaagttggagaacctgacagggctggtccaggccacagaggatggggttaggcttcatgccttcatgcccaggcagccacagaaacccactcttccccgcctcacagggctcctccggttggcctggatccaaagcgatctccttgtttcacctctttccagctcttccctagagcctggccccaagttccagagtcaaatcccagttttgcagtcaactattaacctggggccctggcagattggggtatccacccagtcatgtaaaggcaggagacctgctctgggcctgactcaaagcaaacacgtgggtgcagaagacccatgggaggaggaggtggggcccactcaacacacctaagccagtggccctctaggaggggcagaagagccaaccagagggttcctggaggtcatcgggttcctccttctgcttccaggcagcaacagacctaattcatctcctgtgaggatggagcaagggcgaatataggcatagacatatctggagcgcaaggattgagaggccctgtggacaaggggaaggagagcttgggggtgggagagggatctatggaaggggctgttgtagccaagaatggggcctgggctgggggcctggcctctggagagccctgattctactccagtcttctctcaccatggagacaacaccagtagagctgggagctggggcctgccactgagtaacagctcacacatgtagcacacttatgcgtcaggcaccagcatgtacaccttaatttatttaactttcacaacaaccctaggagaaaggtacagctactattctcatggtacagtggggaaaactgaggcacagagaggttagggacttttcatgatcacacagctaataagtggtggtcccaggattcaacccaagaagtctgttagaatccatactcttatcgactattttaataacagcatttcaataatagtaatatgtgatgttaaatgctttatctgagttatatcattgcattctcacaaaaatggtacatttgttagctcaaatttacagatgaggaaatggaggcctggagagttcaagtagctcactctaagttacagggtttgctagctgcagactggagactagatctcaggtcactctgccttggggttgcccttttctgagatcagactggccttaacagagcccaactttcttggaaggacacagctgggggtcgagggtcctgcatatgcacctggggagtccccacacacccgcaccaaaggggaaacattcaaaggagatgcaggtgacatacagatgggctaaggtgaggccttcctccaacatggggccctggctgagagtggagggatagggtgctacttgggggatatctattactaatcagcacacaatagctgggtgggcaccccctctctctgcagctggtggagatgggcctggtgctcctctctgcttggtaggaatgaccagggcaggatgccacctgctacactcttgcctgtcccagagcccttgggagaccagctgttgctcccacctttccccacagggtgcccggtccccacggcgcaaggaggccaagctcagctgtgtgtctgagcccactcagcagcaggcatgatcagggcagggcccagcgctaagggctgctggggctaaagtgccttgctgaaggaggggcagagttaaacattagccacaatggccccccgcgaagtgagtcatactccccacaagtctctgggctgggcagccgggggcgggggggttagcttcgttccaggtgggtgaccaagctgcggaagcccaggacagttcgctgggaccagtgctaatggcagcttctgctcctgacccccatcaggtctctttcctcagacatccccaaagcttgtctgcctgtgggtctttcattaaaggtgacgggcaagggttttctcttccttccaagacacacttctaggctggcttgtgggtcccctgagacgaaggctgagcagggtgagcctcgaaaaccccatagcactggcccagagcactgcggtcaatgtccgaaggaccagagagggagggtgacttgctcaaggtcacaaacctaactggagctaggaagtaggtccccagactcccagtctgaggaaattggatgtggacagggctttggtctcctggccagaggcaaacgcccagggatctgaacaggctgcccatctctggcctcaactcagcaccccaactggctccagtgccaaccattggcctctctcactggttggcacaggctgggtgagcctggccctttgccctgggttcaggagagaggtatggctttgcctggcagtcaggggaggtgttccaacctgggagcccctgggggaggagcgtgtgtgtgaacgcttgtgcctgttcatcagaaggggtgagcatggtgtgtatgcgtgggcatgcagaatgcagggtgatgacctgtctgcccgccctgagtgtcacagacacctgtgtgtcccctgtactagtgcctcccagatgctcttctcctgactggctctttgtgacctaaatttcaactgctccaccccacaaggaggaaaccagggccacaaatgtagtgagattttcataaagctaaatgtattcagtggaaacgaccttcctctgatctaaaagcatgcatgcctttgttttattactggagtattaaattagcccttacttatggaataggaggacagtaggtggcaattgttttctaatgctcttacttcacaaaataaaatggtggcagcacaatgtcagtatttatattacacaatattattagtttgtaaaaaccgaaagccagggagcttactgccctggattctttagggcgtgggtcttatcacctcattcatttcttcccttcccctaagagtgccacaagcatggcagttgctcagctgagacacatgaatgggaacagaactgaaatatcaggatgtgacctcgagccagctggttggggctggggatccccctggatctccactctgtcctgtccgagaaaggggaagctgccctatgagtcttttttctgggggattccagaggttgaacgtctgttctgaggctcctcagaacctcgagggaggggacgagagagatgaccccttgcccaaccactggctgaaaaatcttgaaattccctgactttgaccagggaattcccagttgtgctaagccctgcctggtggaatgtccctggaggaagtaaccaggacacgcatacgtttttaatgtacgtataaagaatcgtaaagtgaacacccatctgccaaccactcattttaagaactaggatatggcacatacttttgaagcccttatgcgtccctccccaatcacaaccccttcctctccacaaaggtaaatacaatcctcaattttgtgtttgttattctcttggttctcttcataatgttactacgtatttatgaattcctaatacatcattcagttttggatctttttgtaaacctt

SEQ ID NO: 21951 - DNA, 12949 bp, Homo sapiens
  misc_feature 1..12949: note = ENST00000367674
  source 1..12949: mol_type = unassigned DNA; mol_type = unassigned DNA
cactagggggctgcttgtagggggatggaaaaaacggaggcttaaaaaaatcatgctgctgaaatttcagcaagaggggaaaagagagagcgcgtgagagagagagagagagagagagagagagagagagagagagagagacagcaaagcagtcccaggcttcctcctctctttcacgtcagaggcaggaaccgactgtgctaaggctgttggctcaacacccagaggagacgggcagacccagggagagtgagagaagggggtcctctctgacccaaggaattaccactagtggagtgaagccacctgactttttgatcttattttggttgcctcctcattctccttccacccgtagccctgacagcttgggtttcatttctttcgtggagccttgtctcttcctcccagaataggaggaagggaagagaagggaaagaggagggctctctaggtgagcgcatcagctggctccagcctgagcaagcaagaattttcttcccaggaagctcctctcgctccccggccgcccacccccagcctgggtggctgtatcgttttaactgcatagagggcaggtctcttttggaattaggattaaagaaagtgcagtaaagagaaagcatcgaagacaccatcacaaaagattcccacaactccatgctgtgtgctgcaggctggtcctgaacccagatctctggctgagaggatgggggcagatggggaaacagtggttctgaagaacatgctcattggcatcaacctgatccttctgggctccatgatcaagccttcagagtgtcagctggaggtcaccacagaaagggtccagagacagtcagtggaggaggagggaggcattgccaactacaacacatccagcaaagagcagcctgtggtcttcaaccacgtgtacaacattaacgtgcccttggacaacctctgctcctcagggctagaggcctctgctgagcaggaggtgagtgcagaagacgagactctggcagagtacatgggccagacctcagaccacgagagccaggtcacctttacacacaggatcaacttccccaaaaaggcctgtccatgtgccagttcagcccaggtgctgcaggagctgctgagccggatcgagatgctggagagggaggtgtcggtgctgcgagaccagtgcaacgccaactgctgccaagaaagtgctgccacaggacaactggactatatccctcactgcagtggccacggcaactttagctttgagtcctgtggctgcatctgcaacgaaggctggtttggcaagaattgctcggagccctactgcccgctgggttgctccagccggggggtgtgtgtggatggccagtgcatctgtgacagcgagtacagcggggatgactgttccgaactccggtgcccaacagactgcagctcccgggggctctgcgtggacggggagtgtgtctgtgaagagccctacactggcgaggactgcagggaactgaggtgccctggggactgttcggggaaggggagatgtgccaacggtacctgtttatgcgaggagggctacgttggtgaggactgcggccagcggcagtgtctgaatgcctgcagtgggcgaggacaatgtgaggaggggctctgcgtctgtgaagagggctaccagggccctgactgctcagcagttgcccctccagaggacttgcgagtggctggtatcagcgacaggtccattgagctggaatgggacgggccgatggcagtgacggaatatgtgatctcttaccagccgacggccctggggggcctccagctccagcagcgggtgcctggagattggagtggtgtcaccatcacggagctggagccaggtctcacctacaacatcagcgtctacgctgtcattagcaacatcctcagccttcccatcactgccaaggtggccacccatctctccactcctcaagggctacaatttaagacgatcacagagaccaccgtggaggtgcagtgggagcccttctcattttccttcgatgggtgggaaatcagcttcattccaaagaacaatgaagggggagtgattgctcaggtccccagcgatgttacgtcctttaaccagacaggactaaagcctggggaggaatacattgtcaatgtggtggctctgaaagaacaggcccgcagcccccctacctcggccagcgtctccacagtcattgacggccccacgcagatcctggttcgcgatgtctcggacactgtggcttttgtggagtggattccccctcgagccaaagtcgatttcattcttttgaaatatggcctggtgggcggggaaggtgggaggaccaccttccggctgcagcctcccctgagccaatactcagtgcaggccctgcggcctggctcccgatacgaggtgtcagtcagtgccgtccgagggaccaacgagagcgattctgccaccactcagttcacaacagagatcgatgcccccaagaacttgcgagttggttctcgcacagcaaccagccttgacctcgagtgggataacagtgaagccgaagttcaggagtacaaggttgtgtacagcaccctggcgggtgagcaatatcatgaggtactggtccccaggggcattggtccaaccaccagggccaccctgacagatctggtacctggcactgagtatggagttggaatatctgccgtcatgaactcacagcaaagcgtgccagccaccatgaatgccaggactgaacttgacagtccccgagacctcatggtgacagcctcctcggagacctccatctccctcatctggaccaaggccagtggccccattgaccactaccgaattacctttaccccatcctctgggattgcctcagaagtcaccgtacccaaggacaggacctcatacacactaacagatctagagcctggggcagagtacatcatttccgtcactgctgagaggggtcggcagcagagcttggagtccactgtggatgctttcacaggcttccgtcccatctctcatctgcacttttctcatgtgacctcctccagtgtgaacatcacttggagtgatccatctcccccagcagacagactcattcttaactacagccccagggatgaggaggaagagatgatggaggtctccctggatgccaccaagaggcatgctgtcctgatgggcctgcaaccagccacagagtatattgtgaaccttgtggctgtccatggcacagtgacctctgagcccattgtgggctccatcaccacaggaattgatcccccaaaagacatcacaattagcaatgtgaccaaggactcagtgatggtctcctggagccctcctgttgcatctttcgattactaccgagtatcatatcgacccacccaagtgggacgactagacagctcagtggtgcccaacactgtgacagaattcaccatcaccagactgaacccagctaccgaatacgaaatcagcctcaacagcgtgcggggcagggaggaaagcgagcgcatctgtactcttgtgcacacagccatggacaaccctgtggatctgattgctaccaatatcactccaacagaagccctgctgcagtggaaggcaccagtgggtgaggtggagaactacgtcattgttcttacacactttgcagtcgctggagagaccatccttgttgacggagtcagtgaggaatttcggcttgttgacctgcttcctagcacccactatactgccaccatgtatgccaccaatggacctctcaccagtggcaccatcagcaccaacttttctactctcctggaccctccggcaaacctgacagccagtgaagtcaccagacaaagtgccctgatctcctggcagcctcccagggcagagattgaaaattatgtcttgacctacaaatccaccgatggaagccgcaaggagctgattgtggatgcagaagacacctggattcgactggagggcctgttggagaacacagactacacggtgctcctgcaggcagcacaggacaccacgtggagcagcatcacctccaccgctttcaccacaggaggccgggtgttccctcatccccaagactgtgcccagcatttgatgaatggagacactttgagtggggtttaccccatcttcctcaatggggagctgagccagaaattacaagtgtactgtgatatgaccaccgacgggggcggctggattgtattccagaggcggcagaatggccaaactgattttttccggaaatgggctgattaccgtgttggcttcgggaacgtggaggatgagttctggctggggctggacaatatacacaggatcacatcccagggccgctatgagctgcgcgtggacatgcgggatggccaagaggccgccttcgcctcctacgacaggttctctgtcgaggacagcagaaacctgtacaaactccgcataggaagctacaacggcactgcgggggactccctcagctatcatcaaggacgccctttctccacagaggatagagacaatgatgttgcagtgactaactgtgccatgtcgtacaagggagcatggtggtataagaactgccaccggaccaacctcaatgggaagtacggggagtccaggcacagtcagggcatcaactggtaccattggaaaggccatgagttctccatcccctttgtggaaatgaagatgcgcccctacaaccaccgtctcatggcagggagaaaacggcagtccttacagttctgagcagtgggcggctgcaagccaaccaatattttctgtcatttgtttgtattttataatatgaaacaaggggggagggtaatagcaatgtgttttgcaacatattaagagtatgtgaaggaagcagggatgtcgcaggaatccgctggctaacatctgctcttggtttctgctgccctggagcctgaccctcagtctccattctccctcctacccaggcctcctcaaccttcacctcctttcccaccaaggaggagaagtaggaagttttcttaaagggccaattcaaagccaagtcgtggggtgcagattgttatggtgacaggcacacacatttttctacccttcttctgagatgtcctctgccttccaggtatttgtgattttgtcacagcctgacatggccaggttctcacactggcccagagaaaagagcctcagcaagagagttttgccaacaattccccttaaaaggaaacagatcaactacaccgcatcccaacaacccaggttcttttccttccttccttccttcctcccttccttctttcctgccttccctccttccctcctttctttcttgacagtatctcactcttgctcagtctggagtgcagtggtgcaatctcagctcactacagcctcgacttcctgagcttaagtgatcctctcgtctcagcctcttgagtagctgggactacaggcatgagccaccatacctggctgatttttcttttattttttgtagagatgggggtctcactgtgttgtccaggctggtcacaaactcctggccttgaacaatcctcccacctcagcctcccaaaatgctgggattacaggctacagccactgcatccagccccaagtcctttataatgggccaaagattctcatcttctgacactcttattataccagccacatgtcctgttacctttcaagaacagtggctcttttctggccctgatggagtcttttgcctaatcccatcctgtcttagaccccagagcctcaaaagcccaaccagcattttggaatctagttcccaaggcattgcctgctcctggccctgggtggcacagtggctatgtgcctgtgagtcatcagccactgcccccaccctcaggtcagacagacagtcactttctgcaaaggtaggagggggagatggttgtagtttttagcacttttgggtcaagcattgaggaaaggactgaagaagtcaaaatcagggcactgccatagagattatagtttccatgggaaacacagatcttccctagccctgttttctccatttctggtcctatttgtcacagattctttttttctgaattgcaaaccgaaggcctcatatctatcttcacccaagccctccttagtgtaggtggcttaataagagtcaggagaagaaggtatatgcccagagagctatacccctgactgataatcctggaaagaggttgattttttttttcttttttggtcctatgggaaacaggaatgaccttcttaatgaggtgagatcatgagaagcctttccatcttcttttattattctgccttgcaaaggaaaaatgacaatagccaaaggaaattacatccagaaatccaaaggtgaataggtgataactgtgggcctacttcccattttatgagatgcactgtcttcactagcacaatttgatcttaagcccaagagagctagatgctctagaagccgtgacctttcaatttctcctccaaatccaatatcagcaaccatccccgcaacatctgcccagatccatgcccagttccctgagctgtcttctccctttcctctcccattcctcaaggcccagcaccattttctgtagtgcctatgtttgtctgaccagagcagtgtgtacctttgccaaccagttactggatgagccttagtgtcggcaattttctaatggaaatatcctcactcttaccaagctttgagaaccaagatgaaaagtcccttgggctgaccatcaggcctcggacctcatggggatgcagccagccaccattgaatggaggcgcttcccttgccgcaggcttctaggctttgttcactgcggcagtgtggatgtgacaggcataaccctgaaaaacctaggcaccacttgcatttctcagttaaccatgggcttcaacaaactgggaggaggaaaaaacagaaacagatcctttcaacaagcatgtaaattacagaagacttacctagagacggggcaacaatgaatagtaggaagcacattgcatgggaaacttgagggccgaggtacaggccaacagctgtcatcttagctacgacatgacatcggctgggttgtttcacctctctgggccagtttcttcatctgtcagatgagagattagactagaatgagttctaatttccctttcagttttgacggtcaatgatgctaatctgtgatctgaaaacctaagtagaaattggcatggtgggacagcacaattaggtaatgaaaattcactagactccctgtttaatgaggaaagaaggaaagaaggaaggaaggaaggaaggaaagaaggaaggggagggagggagggaaagaaaagagagagattgattcaggagtcataagtaaaacacacacacacacacacacacacacacgaaaatactgcagaaaagatcatgccgagtgagaggctgaactctttttgtccataaaaacagagaccaggtacctgggtggtgccagcacgcccacttcatcaaggaagttgaaatggaaaaagattatgtgttgtcaattcaggtgaaagtcaagaaacatcagtggaaacaaaaatcttccttttattgaaaccattctacactatggaacatttttataaatagtaccagcggcattgcatagctttattttgaagcaagaaagagacttcaaagatcagcttattcaaccctctataaaaggatttatagattccttttatttaatagggtgattttctcatgagttttcaccatgtttaaaagacactgtgccccactctcatcccaaggtctatggtcaacttgactcaatgctcataactttcctcgctgattcctgcttatcctgctcctccaagcacaactgcatttcccaaaggtagatccagtaagcaatactctcaaagcacccaccctatgcacaccagtttccctcaagggactcaaaaggaatcgaggtagacccttctcagaggctgtttaactacagacacatcaggatatgtactaatacccaaaaccaaaaccaccaccaatgactgcaatagattcactgtctagacccaaggtccaggcagtttcccttttttgcatttccccaacatataaagataatttccaacatatcagatgcacattcaccagggttatttctggaaggtgaaggggtcaggtgtagaagaggtggcaagaatgacaagtctgtggaaaactgttggccttgagaccacagtgaactggtggaaggggacttgctaagtgtggccacaaggtggcagtcacctcctgaaaccccgtgtgaaacgtcagcggggttgagaaaggccacgtctccaagtttccaggagagccaaaccaggactcaggaaaaccggccagctgatttgtatgggagattgatttgtaaaagaacaacaacaacatatggcagcaaggaaatgcaaagcaaacatctacaaatatttgaatccacctgtccctcacctaccaacttccccctctactactcataaagtggtaggactcctaatgccccgcttccttccacctgagaaccaaccagcaccctgatatttcaaagccagacctaaagaaccatggttgccaataacctcaatgccaaaccaaacaatcctaatcacatttttacttttcaaatccagtctcagagcagagctgtagattaagggacaaaaagtcattgtggaatcttttcaaatagctcttgtaaaagcatcagttgggaaagagtttatgagttcctctttgtcctctcctctggagaaaagacagaacatgcaagaacactagatacaccaagctatgggtgttgaaatagactagctggtgacctggatttgcaaataccctagggacatgaaaacattttttctttttctttttcttttttgtaacctccacccagaatttcaggaaaggtggggccacatgcccaggatatatggtattctactgcttgctttcttatcaccagaatactagtcaatctgatttcttagttccatgtcttttcttccaaggaggtagggcatggggttgggggacactttccgccttccttgcatctcactgtccactcttaaatttttattaagaaacctctgaaagattcaaaattcagttcagtttcaataatcccaaagaagttgggataatttgttttcacttgcttcaaacttgccacggctgcaggaggagtctcaggacctcagaggaatggggcagatgtgtgaagtctgggagtctgcctcccacccagatgccaggagctgcatactcagctctgcctcacttccctgatggtctgctttcatccaggttaccatgacagagagggtctatcctctaaagaaagctgagttacaggctggcccctggggttgttcctgtagcctctctttgaccacattcctgaagatgtttagctgaatgcctcctcaaacctttgcttcttccataacccaatcctacacatatgtgataaagctttcttcaacaatactgggtcatttggacactaccagtccagatgagaactcacagaccaaatgaaaactttcaaaagcaagcagggaaagtaactcctatatgctttaagatgatgtattggtgtagattcaggtccaatttgaaaaaatgtctctggttctttctaattgtatccactctggatttgtttatgccagttctacattcatcaagccttgagaaacaggtggaaagaagaaaaatataaaattaagaagaagctgatggatcattggagattcaaaacaagccttctaccggtggcaccacactgaaaggcagagacaaggcaggagcggccatgggagaggaagcagcattggcttctcacgttctggcctccagcctcccaccagagcttctgccattcacccacttaacttgaggagaaactaaggcaccaaggcctgtcactgcaccgaaaaccagaagcagaaggactttctttctttgctcaaccagttctgcctggatctgacttttgcgtcaccagtagtcacaagcctgatttgtcatctccagcattctgtttatttttttaaggtcaatctttgcctgaaacatgacttcattgcacctgcagcacttcattgtccaaatgtccttggcaaacctcacagtctttggacagtgttgcattttctccaaaggggaaatcctctctccttcctcaagcttaataaggctcttgcagtgcatccaaataacacagctcttgttcctcagacacactcagccccctctgataacttcataaaacagctccttattgtctgggccatgaagccaggctaatgctaaagttccagttcaaaaacatttaactctattatccttatgaggccagctctcctgggtactggcactcactcactggcaccatggattcaggtcaggtggtgcaaacatcttccctgagaagcaagccatacacccaacaggtctagaacacctaggtcacaagaaagggtttcagtccagatgcactgtcagtaagtgaacacaaggacaagaatgcatgaactgttattttcttcccatcactggtttagcagcccctagggagaccctgtgttgctctttaatattctgacatggagcactaatatgctcaacactgcctccaacaggcaaatgttggaaatacactttcagagctggatgggactcaagatcatctaatataatcctctcattttatttcctctcaaggaaaccaagggcaagaaagtttaggcaatttgctcacattcacacaggcaattagtaacagagctgagttcgggtctggtataggctttttaatttgattctccacaaatgaacactaagataaatagcatttattgcatacccactatttaccagatactgtgcaaagggctttacatatattactttactaaatcctcaccataaactttaagtcaggtttaaccattttatagaagagggaagggagggccaggaaggttaagtaacatgctcaaagtcacacagctactaaatagagccataatctgaacctttgtctaattttgaagcccttgatttttccacttcatgaggctgctctttatatttatttagctgagtgaccaccatcttggattttactaatattcttacaagggggctttgatgccacttcttctgacttttaagaaaaggaaattcttgcattatttttgccatgtactccaggggaccctcaatctcatcatcatggggaataagaaacattctgacatctctttccttttctttctttttaaatttggtagacgagggagagggtccccaacagaatgagagggggaagataagaaccagaacataaacccaataccccccaccccactcttttgggaacatcccaacattagaagagtgggatatccagtcatttttttcaagctggagcaggcagtgtagccaggattgaggaaggagaagccacagaataaacatggcacatgttctcagagcatcaattttactccagaatttgggaagaaaggattatattattagtgtattcaaaccagtatggatagcacaaatgcagatatcctataaattttgaggctaactccagcaggttgtagactgatttaggctacctccttccagactcccaggggtacaaacaccttcacagtcccctgcgggagtacatcagtggaaatatttggggaatgaggctagaaggcaggagatacattcagtttacttatccccctggtttcttttccccactccttacctgccccacatccctagtgggtgggaaggcatcagaagacagttggctacaatatcagctttctctgctactttggggaatttagaaggaaatcagtacttggcaacctggtatttttagctgccaggccaaaactccagacataaaccccttccctttaattgaatgatgtttatatataaaggaatagatctccccaagaaagaaccccagaacactggttccattccagtgtgggggctgcttgggcagcagtgacacctgtgcattagatgcaatagacacttcaattcctgcaaaaatgtcggccaactaagtgctcctttaccaactgcggaggcccagactcacaccatggtcccacagactcaaggtttagaatctatgtgagtctattttggttaacacacaggctcctccttccaatcattcacacacacacacacacacacacacacacacacatgcacacacacacatgcatgcacacatacacaggtgcacatgcacaaacacacacatctaatgattccaacctcgaatactccccaggcccatggggatgcccaagtaccctaagcaaatcactgtgacactgagggggtcattaactggggctccgagcagctgaaacccaccctggtggtctctagattgttgttctgagaaatcataaacaccaaatcctccaatccctttgaatttgagtttgtcattttaacctttaacagccttttcaggtaaaaataacaaagaccaatttattgactttgtagctacaatgagcttgaaaaagcgcttacttaaaagaaagactggaaggaagaaaaaaaaaagaaaatggagtacatactcctcagacgatgcacactttaattagctaaaataaaaataaaaatgtacagaggaagggagaggaaaaaccaacttctctgatcctttcatggcactgtagctcaaagactggaatctctgcttgttaaccattgttaactagtatttttagtcctggttgcttttagcctctgtatagttccttttttaaacacattttctatacgttaataaaagatcctgaaagaaa

SEQ ID NO: 21952 - DNA, 540 bp, Homo sapiens
  misc_feature 1..540: note = ENST00000422274
  source 1..540: mol_type = unassigned DNA; mol_type = unassigned DNA
gatcaacttccccaaaaaggcctgtccatgtgccagttcagcccaggtgctgcaggagctgctgagccggatcgagatgctggagagggaggtgtcggtgctgcgagaccagtgcaacgccaactgctgccaagaaagtgctgccacagttgcccctccagaggacttgcgagtggctggtatcagcgacaggtccattgagctggaatgggacgggccgatggcagtgacggaatatgtgatctcttaccagccgacggccctggggggcctccagctccagcagcgggtgcctggagattggagtggtgtcaccatcacggagctggagccaggtctcacctacaacatcagcgtctacgctgtcattagcaacatcctcagccttcccatcactgccaaggtggccacccatctctccactcctcaagggctacaatttaagacgatcacagagaccaccgtggaggtgcagtgggagcccttctcattttccttcgatgggtgggaaatcagcttcattccaaagaacaatgaagg

SEQ ID NO: 21953 - DNA, 5190 bp, Homo sapiens
  misc_feature 1..5190: note = ENST00000263525
  source 1..5190: mol_type = unassigned DNA; mol_type = unassigned DNA
ccaggcttcctcctctctttcacgtcagaggcaggaaccgactgtgctaaggctgttggctcaacacccagaggagacgggcagacccagggagagtgagagaagggggtcctctctgacccaaggaattaccactagtggagtgaagccacctgactttttgatcttattttggttgcctcctcattctccttccacccgtagccctgacagcttgggtttcatttctttcgtggagccttgtctcttcctcccagaataggaggaagggaagagaagggaaagaggagggctctctaggtgagcgcatcagctggctccagcctgagcaagcaagaattttcttcccaggaagctcctctcgctccccggccgcccacccccagcctgggtggctgtatcgttttaactgcatagagggcaggtctcttttggaattaggattaaagaaagtgcagtaaagagaaagcatcgaagacaccatcacaaaagattcccacaactccatgctgtgtgctgcaggctggtcctgaacccagatctctggctgagaggatgggggcagatggggaaacagtggttctgaagaacatgctcattggcatcaacctgatccttctgggctccatgatcaagccttcagagtgtcagctggaggtcaccacagaaagggtccagagacagtcagtggaggaggagggaggcattgccaactacaacacatccagcaaagagcagcctgtggtcttcaaccacgtgtacaacattaacgtgcccttggacaacctctgctcctcagggctagaggcctctgctgagcaggaggtgagtgcagaagacgagactctggcagagtacatgggccagacctcagaccacgagagccaggtcacctttacacacaggatcaacttccccaaaaaggcctgtccatgtgccagttcagcccaggtgctgcaggagctgctgagccggatcgagatgctggagagggaggtgtcggtgctgcgagaccagtgcaacgccaactgctgccaagaaagtgctgccacaggacaactggactatatccctcactgcagtggccacggcaactttagctttgagtcctgtggctgcatctgcaacgaaggctggtttggcaagaattgctcggagccctactgcccgctgggttgctccagccggggggtgtgtgtggatggccagtgcatctgtgacagcgagtacagcggggatgactgttccgaactccggtgcccaacagactgcagctcccgggggctctgcgtggacggggagtgtgtctgtgaagagccctacactggcgaggactgcagggaactgaggtgccctggggactgttcggggaaggggagatgtgccaacggtacctgtttatgcgaggagggctacgttggtgaggactgcggccagcggcagtgtctgaatgcctgcagtgggcgaggacaatgtgaggaggggctctgcgtctgtgaagagggctaccagggccctgactgctcagcagttgcccctccagaggacttgcgagtggctggtatcagcgacaggtccattgagctggaatgggacgggccgatggcagtgacggaatatgtgatctcttaccagccgacggccctggggggcctccagctccagcagcgggtgcctggagattggagtggtgtcaccatcacggagctggagccaggtctcacctacaacatcagcgtctacgctgtcattagcaacatcctcagccttcccatcactgccaaggtggccacccatctctccactcctcaagggctacaatttaagacgatcacagagaccaccgtggaggtgcagtgggagcccttctcattttccttcgatgggtgggaaatcagcttcattccaaagaacaatgaagggggagtgattgctcaggtccccagcgatgttacgtcctttaaccagacaggactaaagcctggggaggaatacattgtcaatgtggtggctctgaaagaacaggcccgcagcccccctacctcggccagcgtctccacagtcattgacggccccacgcagatcctggttcgcgatgtctcggacactgtggcttttgtggagtggattccccctcgagccaaagtcgatttcattcttttgaaatatggcctggtgggcggggaaggtgggaggaccaccttccggctgcagcctcccctgagccaatactcagtgcaggccctgcggcctggctcccgatacgaggtgtcagtcagtgccgtccgagggaccaacgagagcgattctgccaccactcagttcacaacagagatcgatgcccccaagaacttgcgagttggttctcgcacagcaaccagccttgacctcgagtgggataacagtgaagccgaagttcaggagtacaaggttgtgtacagcaccctggcgggtgagcaatatcatgaggtactggtccccaggggcattggtccaaccaccagggccaccctgacagatctggtacctggcactgagtatggagttggaatatctgccgtcatgaactcacagcaaagcgtgccagccaccatgaatgccaggactgaacttgacagtccccgagacctcatggtgacagcctcctcggagacctccatctccctcatctggaccaaggccagtggccccattgaccactaccgaattacctttaccccatcctctgggattgcctcagaagtcaccgtacccaaggacaggacctcatacacactaacagatctagagcctggggcagagtacatcatttccgtcactgctgagaggggtcggcagcagagcttggagtccactgtggatgctttcacaggcttccgtcccatctctcatctgcacttttctcatgtgacctcctccagtgtgaacatcacttggagtgatccatctcccccagcagacagactcattcttaactacagccccagggatgaggaggaagagatgatggaggtctccctggatgccaccaagaggcatgctgtcctgatgggcctgcaaccagccacagagtatattgtgaaccttgtggctgtccatggcacagtgacctctgagcccattgtgggctccatcaccacaggaattgatcccccaaaagacatcacaattagcaatgtgaccaaggactcagtgatggtctcctggagccctcctgttgcatctttcgattactaccgagtatcatatcgacccacccaagtgggacgactagacagctcagtggtgcccaacactgtgacagaattcaccatcaccagactgaacccagctaccgaatacgaaatcagcctcaacagcgtgcggggcagggaggaaagcgagcgcatctgtactcttgtgcacacagccatggacaaccctgtggatctgattgctaccaatatcactccaacagaagccctgctgcagtggaaggcaccagtgggtgaggtggagaactacgtcattgttcttacacactttgcagtcgctggagagaccatccttgttgacggagtcagtgaggaatttcggcttgttgacctgcttcctagcacccactatactgccaccatgtatgccaccaatggacctctcaccagtggcaccatcagcaccaacttttctactctcctggaccctccggcaaacctgacagccagtgaagtcaccagacaaagtgccctgatctcctggcagcctcccagggcagagattgaaaattatgtcttgacctacaaatccaccgatggaagccgcaaggagctgattgtggatgcagaagacacctggattcgactggagggcctgttggagaacacagactacacggtgctcctgcaggcagcacaggacaccacgtggagcagcatcacctccaccgctttcaccacaggaggccgggtgttccctcatccccaagactgtgcccagcatttgatgaatggagacactttgagtggggtttaccccatcttcctcaatggggagctgagccagaaattacaagtgtactgtgatatgaccaccgacgggggcggctggattgtattccagaggcggcagaatggccaaactgattttttccggaaatgggctgattaccgtgttggcttcgggaacgtggaggatgagttctggctggggctggacaatatacacaggatcacatcccagggccgctatgagctgcgcgtggacatgcgggatggccaagaggccgccttcgcctcctacgacaggttctctgtcgaggacagcagaaacctgtacaaactccgcataggaagctacaacggcactgcgggggactccctcagctatcatcaaggacgccctttctccacagaggatagagacaatgatgttgcagtgactaactgtgccatgtcgtacaagggagcatggtggtataagaactgccaccggaccaacctcaatgggaagtacggggagtccaggcacagtcagggcatcaactggtaccattggaaaggccatgagttctccatcccctttgtggaaatgaagatgcgcccctacaaccaccgtctcatggcagggagaaaacggcagtccttacagttctgagcagtgggcggctgcaagccaaccaatattttctgtcatttgtttgtattttataatatgaaacaaggggggagggtaatagcaatgtgttttgcaacatattaagagtatgtgaaggaagcagggatgtcgcaggaatccgctggctaacatctgctcttggtttctgctgccctggagcctgaccctcagtctccattctccctcctacccaggcctcctcaaccttcacctcctttcccaccaaggaggagaagtaggaagttttcttaaagggccaattcaaagccaagtcgtggggtgcagattgttatggtgacaggcacacacatttttctacccttcttctgagatgtcctctgccttccaggtatttgtgattttgtcacagcctgacatggccaggttctcacactggcccagagaaaagagcctcagcaagagagttttgccaacaattccccttaaaaggaaacagatcaactacaccgcatcccaacaacccaggttcttttccttccttccttccttcctcccttccttctttcctgccttccc

SEQ ID NO: 21954 - DNA, 10331 bp, Homo sapiens
  misc_feature 1..10331: note = ENST00000171887
  source 1..10331: mol_type = unassigned DNA; mol_type = unassigned DNA
gttggcccgccccctgggctggcctgggagggaacccgactagcagagccctctgctcagttgctcccagcagtggccctgggaccagctctgctccttgcaccccgctccctgcctggacacaggctcactcgctgccttcttctgggggaaaccagcttcttgccagccacagctgctgcctccgccactggccaccgcccctgtcctgggagtcccttggcccagacacccacctgacttagtggctcctctgcaggaaaggtggctgccccctgcgttcctccatccaaccatgagctggtgcccatcaccactgagaatgcaccaaagaatgtagtggacaagggagaaggagcctcccggggtggaaacacacggaaaagcctcgaggacaacggctccaccagggtcaccccgagtgtccagccccacctccagcccatcagaaacatgagtgtgagccggaccatggaggacagctgtgagctggacctggtgtacgtcacagagaggatcatcgctgtctccttccccagcacagccaatgaggagaacttccggagcaacctccgtgaggtggcgcagatgctcaagtccaaacatggaggcaactacctgctgttcaacctctctgagcggagacctgacatcacgaagctccatgccaaggtactggaatttggctggcccgacctccacaccccagccctggagaagatctgcagcatctgtaaggccatggacacatggctcaatgcagaccctcacaatgtcgttgttctacacaacaagggaaaccgaggcaggataggagttgtcatcgcggcttacatgcactacagcaacatttctgccagtgcggaccaggctctggaccggtttgcaatgaagcggttctatgaggataagattgtgcccattggccagccatcccaaagaaggtacgtgcattacttcagtggcctgctctccggctccatcaaaatgaacaacaagcccttgtttctgcaccacgtgatcatgcacggcatccccaactttgagtctaaaggaggatgtcggccatttctccgcatctaccaggccatgcaacctgtgtacacatctggcatctacaacatcccaggagacagccagactagcgtctgcatcaccatcgagccaggactgctcttgaagggagacatcttgctgaagtgctaccacaagaagttccgaagcccagcccgagacgtcatcttccgtgtgcagttccacacctgtgccatccatgacctgggggttgtctttgggaaggaggaccttgatgatgctttcaaagatgatcgatttccagagtatggcaaagtggagtttgtattttcttatgggccagagaaaattcaaggcatggagcacctggagaacgggccgagcgtgtctgtggactataacacctccgaccccctcatccgctgggactcctacgacaacttcagtgggcatcgagatgacggcatggaggaggtggtgggacacacgcaggggccactagatgggagcctgtatgctaaggtgaagaagaaagactccctgcacggcagcaccggggctgttaatgccacacgtcctacactgtcggccacccccaaccacgtggaacacacgctttctgtgagcagcgactcgggcaactccacagcctccaccaagaccgacaagaccgacgagcctgtccccggggcctccagtgccactgctgccttgagtccccaggagaagcgggagctggaccgcctgctgagtggctttggcttagagcgagagaagcaaggcgccatgtaccacacccagcacctcaggtcccgcccagcagggggctcggctgtgccctcctctggacgccacgttgtcccagcccaggttcatgtcaatggtggggcgttagcatctgagcgggagacagacatcctggacgatgaattgccaaaccaggatggtcacagtgcgggcagcatgggcacactctcttctctggacggggtcaccaacaccagtgaggggggctacccagaggccctgtccccactgaccaacggtctggacaagtcctaccccatggagcctatggtcaatggaggaggctacccctacgagtctgccagccgggcggggcctgcccatgctggccacacggcccccatgcggccctcctactctgcacaggagggtttagctggctaccagagggaggggccccacccagcctggccacagccagtgaccacctcccactatgcccatgaccccagcggtatgttccgctctcaatccttttcggaagctgaaccccagctgcccccagctccggtccgagggggaagcagccgggaggctgtgcaaaggggactgaattcgtggcagcagcagcagcagcagcagcagcagcctcgcccacctccacgccagcaggaaagagcccacttggagagtcttgtagccagcaggcccagccctcagccattggcagagacccccatccccagtctccctgagttcccgcgagcagcctcccagcaggagattgaacagtccatcgaaacactcaatatgctgatgctggacctggagccagcctccgctgctgccccactacacaagtcccagagtgtccccggggcctggccaggggcttctccactctcctcccagcccctctctggatcctcccgtcagtcccatccactgacccagtccagatctggctatatccccagtgggcattcgttgggaacccctgagccagccccacgggcctctctggagtctgtccctcctggcaggtcttactcaccttatgactatcagccatgtttggctgggcctaaccaggatttccattcaaagagcccagcctcttcctccttgcctgccttccttccgaccacccacagccctccagggcctcagcaacccccagcctctctccctggcctcactgctcagcctctgctctcaccaaaggaagcgacttcagacccctcccggactccagaggaggagccattgaatttagaagggctggtggcccacagggtagcaggggtacaggctcgggagaagcagcctgcagagcccccagcccctctgcggaggcgggcggccagtgatggacagtatgagaaccagtctccagaagccacatcccctcgtagccctggggttcgctcccctgtccagtgtgtctccccggagctggctcttaccatcgctctcaatcctggagggcggcccaaagagccccatttgcacagctacaaggaggccttcgaggagatggagggaacctccccgagcagcccaccacccagtggggtgcggtcccccccgggtctggccaagacacccctgtctgctctgggcctgaaacctcacaacccagcggacatcctgttgcaccccacaggagttaccagaagacggatccagccagaggaagatgaggggaaggtggtggtcaggctgtcagaagagccccggagctatgtggagtctgtggcacggacagcggtggctggaccccgagctcaggactctgagcccaagagctttagtgctccagccacccaggcctatggccatgagatacccctgaggaacgggaccctgggtggctcctttgtctcccccagccccctctccaccagcagccccatcctcagtgctgacagcacttcagtggggagtttcccgtcgggagagagcagtgaccagggtccccggacgcccacccagcctctgttggagtctggcttccgctcaggcagcctgggacagcccagcccgtctgcccagagaaactaccagagctcttctcctctcccgactgtgggcagtagctacagcagccccgactactcacttcagcatttcagctcctctccggaaagccaggctcgagctcagttcagtgtggctggcgtccacacggtgcctgggagccctcaggcgcgccacagaacagtgggcaccaacactccccctagtcctggcttcggctggcgggccatcaatcccagcatggctgcccccagcagtcccagtttgagccatcaccagatgatgggtccaccaggcactggcttccatggtagcactgtctccagcccccagagcagtgcagcgaccaccccggggagccccagcctgtgtcggcacccagcaggggtctaccaggtttctggcctccacaacaaagtggccaccaccccggggagtcccagcctgggccggcaccctggggctcaccaaggcaacctggcctccggtcttcatagcaatgcaatagccagccctggaagccccagcctgggccgtcacctcggagggtctggatctgtggttcccggcagcccctgcttggaccggcatgtggcctatggtggctattctaccccggaggatcggagacccacactgtcccggcagagcagtgcctctggctaccaggctccttccacgccctccttccctgtctcccctgcctactaccctggcctgagcagccctgccacctccccgtcaccagactccgcagccttccggcaagggagcccaacaccagccttgccagagaagcgaaggatgtcagtgggagaccgggcaggcagcctccccaactatgccaccatcaatgggaaggtgtcttcgcctgtcgccagcggcatgtccagtcccagtgggggcagcaccgtctccttctcccacactctgcccgacttctccaagtactccatgccagacaacagcccggagacgcgggctaaagtgaagtttgtccaggacacttctaagtattggtacaagcctgagatctccagggagcaggccatcgcgctcctcaaggaccaggagccgggggccttcatcatccgcgacagtcactccttccgaggcgcgtacgggctggccatgaaggtgtcttcgccacctccaaccatcatgcagcagaataaaaaaggagacatgacccatgagctggtcaggcattttctgatagagactggccccagaggagtcaagctcaagggctgccccaatgagccaaacttcggatcgctgtctgccctggtctaccagcactccatcatcccattggccctgccttgcaagctggtcattccaaaccgagaccccacagatgaatcgaaagatagctccggccctgccaactcaactgcagacctgctgaaacaaggggcagcctgcaatgtgctcttcgtcaactctgtggacatggagtcactcactgggccacaggccatctctaaagccacatctgagacgttggctgcagaccccacgccagctgccaccatcgttcacttcaaagtctctgcccagggaatcactctgactgacaaccagagaaagctctttttcagacgccactaccctctcaacactgtcaccttctgtgacctggatccacaggaaagaaagtggatgaaaacagagggtggtgcccctgctaagctcttcggcttcgtggcccggaagcagggcagcaccacggacaacgcctgccacctctttgctgagcttgaccccaaccagccggcctctgccatcgtcaacttcgtctccaaggtcatgctgaatgccggccaaaagagatgaaccctgccccttgcccagggccagtgccatggggaaggggcttgtggggaggggacccatgaatcctgaccactcttgaacccagaaggaggactttgggccaatttcggaggagagaagaaagtgcaacgtggggagagggaagtgaattgcagaggggagggggaaaagagagagagagagagagagagagagagagagaaagatggaggagaagaacttggattcccctgggtagatggaaactgcaaaaacccaaagcctccaaaactaaccaggtccacctaacaccccctccctcccctaagaagatggatgtcctcaaaagagaaggaacaaacctccttgggaatccacattttttgggggaatggaaaagctctgtctccctaactcaactgctttgcaaggggaaatcaagctgggagaatctttttctggccacctgtggggtaggttgtcaaaccaaacagagccaccgtgggacatcaagtggaagaacttgtttgcttgaaagtatctcagacccaaggcacctcaggtctctttgctgtgcctccactatattgtcgtgtgggtgtgtgtctgcacccacatcctcacacattgatctagatctgcctttatccactcgaattataaacagctcggcttgtccttgtcccatgtgtttgtagacacacatgcatactgtccaaagattagggttggtggtggcagtgcagcaggggagggacaaacaaccaagctatgggtgacagaggctctctcctggtgcctgcacctgcactctagtgaccctgggtgccgccagacccttctcttctacaaagaccccagcaggagtgggagggtctgcaatggcatcgccctgtcctgccttggccagaagcctggagctttggtttgaggaggtagagatatgtgtatccataggaagagatctgtcagaacaggcagctgttgagctcggggtgtcttccccaaggcatgtggctcagcagcaagaaaggcaagttgctcctgctggggccctggactctgccttagctcccacctctcagccttgttattgggtttcatgcccctggaccagccttatctcagacctgcttacctgcatgatgcctttttgggggctggggattgagtcttgctgctctgcccagccctgttctattctgcagggtccctgtgttggaattctccctggggaacctactttctgctcagtgaggctccggccagaaacctggagtccttatcctcccctctgtaagtgttttagggtctggcttttgcaggcaccctctgacctcagcagagctcctgggcctgctgcctgcacaccacatcgcctacctacaatgccaaagcctcactgtcaccctttctgccttggtttccctagctgagccacgctgcccatgcagcagagggcagaaggcttgcacttgggccaaagggcctaaggtccactggacagttgggaaaacacctgaccaccatttaaggactctaagccagaatggaaaattcaccaggactccattcttaagcctatgcgagtcccctagagagaggcattgtactgatatataaatattatataatatatacatgagacatactgacagaatctgtaagctaataaaatgtaagaaaaggttaaaaaaagaataggtaaattgacaagaagtatttattgtttttccatattgctttattgccttccttggggataaaccaattcctatccttttttatatgtgtaagtaaagcctgaagtgtagggggcctttgttcttgaagcagccagggtctccttgccctggccttggccttccctagactgtgtggggctcagcattgggaggggttgcacatgtcccagcctttggcccccttacttttcagcaagccaggggcccagcagtcagctcccaggatgtgtggggagctgtccctgactctgcaggcctgagcgagtgtgtgagcatgcggggacatgggtgtgtatggcacacataggtgcgtgtgtgtcttttgtattttttctcctccaaggagctgtgtcagtgtggacgttctgtttcagggagttggaaaggagggtgtctgcagaaggtggagagcaggggcagaggccccactggccaccccctgcttcccagagtgaaaccttgtgcctggtgaccaaagtccctccaaagtgctcttccttctgggttattcaagccaaatatctgggtttccccctctcctcattccctagcaaaccccaattatcttccaagataggagatatttcccatccccttcctttgtaaatatctcatctcccactggagagcccaggagcctattcctggcatggatgttctgtccacacttgaggctgggcggtgtatcagacccttcaagcagcctggctggggcccaggactgagtctggggtcagctttcacggtcgcttttcccttcctcaccacccaccacagcccaccttgcatgcatggccagcccctccactccagcctgagccatgtgtgcccctgcgggaggacccattcatgccagaaagctggtaactccctcccagcatccctgcggaaggagtcagtttctgagagtgtgacttttcaaggcgaatgatggggaagggttccccagtccccacagtggccccacctctgggccctgcaccagagcccttctgtgtcacggcgggctgtgcacccatgcacacacctacgcacacacaacactccgcactgcagtatattcttgccaaagatttcctttaaaagcaagcacttttactaattattattttgtaaatgtttatcttcttctgtcttctccctccctgaatctattttactgttgtttattgttgaatctgtgtgtcagccaggagagcgctgtctggccttgaacatgggctgggatgggaaagggtctgggagaagatgggcaacaaagagccagggagtcatggacatcgcagcgacgcagaccccagcaggttcagtcccgtgctgccaccagctgtccagctgggtgtctggagggaagagggcagaggagggtcatgtcccttcagctgggggaggggcccagtgagctccacgtggctttttcccaaagggagcaagagggaaggattgggcgagaaaacaatggagaggggacctgcgaaggaaaacagggaggaagtgagcggtttgatcagcctgctatcacggtgttctggctctcttatttagccaggcgcttaagggacagatacatcacatcctaagtttgggaaaggcctttgacccatgtcatctgagcgtctcctccagtagctctgaaagctgtggacaccaatggccaggattccttctcccctggtttttgaggatccctgggtcttctgagactggccaggagagggatggtggggccagtggttgtgtgaaagcaggaggggcagccctcctggacaagtgtgatccccctataaacggctctcaggaggttagtgagtaggagattctgccttgttctgatgagcctgtgcaggggctccaggggagcatgctgtccagggggcacagaagggtggtgagtgtgatcaaatctagtctcactcccactttttagtctcactcctacttttgtccaccacccctgcctcctggatcttctcccactttttttttcagctttaggacctggggagatcctgtgagtcaaggcagacacccaatcctgcccccacactcggggtcctccaagaggttggggggcagagtcccagagcagccctttaccccaggtccaggccctggaatcctgagactcgcgtttccttggccagtggtaacacaggacgtgtgtgcgcatgtgcaagtgtggatgtatgtgtgtgcgtgtgttttgctcatttctttagggaacttgggagtcggggttggaggtgctgggcaatggaacttcaaattcaatgtcgcccagcagtgaggggagtcgggaggtgaggcctgtaggccaaccaattggtggagtctcagcgatagcccaggtgagaagtggttcacccagaggggcagggtgggggcctcgggcagatctgtccctcttggcacctctgtcctcaaatgtccaaaatgttggaggacctctgttcatatcccacgcctgggctcttgccagcagtggagttactgtagagggatgtcccaagcttgttttccaatcagtgttaagctgtttgaaactctcctgtgtctgtgttttgtttgtgcgtgtgtgtgagagcacatcagtgtgtgcaggctgtgtttccccatttctctcctcccttcagacccatcattgagaacaaatgtaagaaatcccttcccaccaccctccctgcctcccaggccctctgcgggggaaacaagatcacccagcatccttccccaccccagctgtgtatttatatagatggaaatatactttatattttgtatcatcgtgcctatagccgctgccaccgtgtataaatcctggtgtatgctccttatcctggacatgaatgtattgtacactgacgcgtccccactcctgtacagctgctttgtttctttgcaatgcattgtatggctttataaatgataaagttaaagaaaactctg

SEQ ID NO: 21955 - DNA, 4292 bp, Homo sapiens
  misc_feature 1..4292: note = ENST00000446688
  source 1..4292: mol_type = unassigned DNA; mol_type = unassigned DNA
agaggtcccaaggatggagtcctggaacctcccacattccaaggctacagacaggaggagggaaccagcataggaactggcatggagcagcttgtgaaggagaggaaaggggtacaggctcgggagaagcagcctgcagagcccccagcccctctgcggaggcgggcggccagtgatggacagtatgagaaccagtctccagaagccacatcccctcgtagccctggggttcgctcccctgtccagtgtgtctccccggagctggctcttaccatcgctctcaatcctggagggcggcccaaagagccccatttgcacagctacaaggaggccttcgaggagatggagggaacctccccgagcagcccaccacccagtggggtgcggtcccccccgggtctggccaagacacccctgtctgctctgggcctgaaacctcacaacccagcggacatcctgttgcaccccacaggagagccccggagctatgtggagtctgtggcacggacagcggtggctggaccccgagctcaggactctgagcccaagagctttagtgctccagccacccaggcctatggccatgagatacccctgaggaacgggaccctgggtggctcctttgtctcccccagccccctctccaccagcagccccatcctcagtgctgacagcacttcagtggggagtttcccgtcgggagagagcagtgaccagggtccccggacgcccacccagcctctgttggagtctggcttccgctcaggcagcctgggacagcccagcccgtctgcccagagaaactaccagagctcttctcctctcccgactgtgggcagtagctacagcagccccgactactcacttcagcatttcagctcctctccggaaagccaggctcgagctcagttcagtgtggctggcgtccacacggtgcctgggagccctcaggcgcgccacagaacagtgggcaccaacactccccctagtcctggcttcggctggcgggccatcaatcccagcatggctgcccccagcagtcccagtttgagccatcaccagatgatgggtccaccaggcactggcttccatggtagcactgtctccagcccccagagcagtgcagcgaccaccccggggagccccagcctgtgtcggcacccagcaggggtctaccaggtttctggcctccacaacaaagtggccaccaccccggggagtcccagcctgggccggcaccctggggctcaccaaggcaacctggcctccggtcttcatagcaatgcaatagccagccctggaagccccagcctgggccgtcacctcggagggtctggatctgtggttcccggcagcccctgcttggaccggcatgtggcctatggtggctattctaccccggaggatcggagacccacactgtcccggcagagcagtgcctctggctaccaggctccttccacgccctccttccctgtctcccctgcctactaccctggcctgagcagccctgccacctccccgtcaccagactccgcagccttccggcaagggagcccaacaccagccttgccagagaagcgaaggatgtcagtgggagaccgggcaggcagcctccccaactatgccaccatcaatgggaaggtgtcttcgcctgtcgccagcggcatgtccagtcccagtgggggcagcaccgtctccttctcccacactctgcccgacttctccaagtactccatgccagacaacagcccggagacgcgggctaaagtgaagtttgtccaggacacttctaagtattggtacaagcctgagatctccagggagcaggccatcgcgctcctcaaggaccaggagccgggggccttcatcatccgcgacagtcactccttccgaggcgcgtacgggctggccatgaaggtgtcttcgccacctccaaccatcatgcagcagaataaaaaaggagacatgacccatgagctggtcaggcattttctgatagagactggccccagaggagtcaagctcaagggctgccccaatgagccaaacttcggatcgctgtctgccctggtctaccagcactccatcatcccattggccctgccttgcaagctggtcattccaaaccgagaccccacagatgaatcgaaagatagctccggccctgccaactcaactgcagacctgctgaaacaaggggcagcctgcaatgtgctcttcgtcaactctgtggacatggagtcactcactgggccacaggccatctctaaagccacatctgagacgttggctgcagaccccacgccagctgccaccatcgttcacttcaaagtctctgcccagggaatcactctgactgacaaccagagaaagctctttttcagacgccactaccctctcaacactgtcaccttctgtgacctggatccacaggaaagaaagtggatgaaaacagagggtggtgcccctgctaagctcttcggcttcgtggcccggaagcagggcagcaccacggacaacgcctgccacctctttgctgagcttgaccccaaccagccggcctctgccatcgtcaacttcgtctccaaggtcatgctgaatgccggccaaaagagatgaaccctgccccttgcccagggccagtgccatggggaaggggcttgtggggaggggacccatgaatcctgaccactcttgaacccagaaggaggactttgggccaatttcggaggagagaagaaagtgcaacgtggggagagggaagtgaattgcagaggggagggggaaaagagagagagagagagagagagagagagagagaaagatggaggagaagaacttggattcccctgggtagatggaaactgcaaaaacccaaagcctccaaaactaaccaggtccacctaacaccccctccctcccctaagaagatggatgtcctcaaaagagaaggaacaaacctccttgggaatccacattttttgggggaatggaaaagctctgtctccctaactcaactgctttgcaaggggaaatcaagctgggagaatctttttctggccacctgtggggtaggttgtcaaaccaaacagagccaccgtgggacatcaagtggaagaacttgtttgcttgaaagtatctcagacccaaggcacctcaggtctctttgctgtgcctccactatattgtcgtgtgggtgtgtgtctgcacccacatcctcacacattgatctagatctgcctttatccactcgaattataaacagctcggcttgtccttgtcccatgtgtttgtagacacacatgcatactgtccaaagattagggttggtggtggcagtgcagcaggggagggacaaacaaccaagctatgggtgacagaggctctctcctggtgcctgcacctgcactctagtgaccctgggtgccgccagacccttctcttctacaaagaccccagcaggagtgggagggtctgcaatggcatcgccctgtcctgccttggccagaagcctggagctttggtttgaggaggtagagatatgtgtatccataggaagagatctgtcagaacaggcagctgttgagctcggggtgtcttccccaaggcatgtggctcagcagcaagaaaggcaagttgctcctgctggggccctggactctgccttagctcccacctctcagccttgttattgggtttcatgcccctggaccagccttatctcagacctgcttacctgcatgatgcctttttgggggctggggattgagtcttgctgctctgcccagccctgttctattctgcagggtccctgtgttggaattctccctggggaacctactttctgctcagtgaggctccggccagaaacctggagtccttatcctcccctctgtaagtgttttagggtctggcttttgcaggcaccctctgacctcagcagagctcctgggcctgctgcctgcacaccacatcgcctacctacaatgccaaagcctcactgtcaccctttctgccttggtttccctagctgagccacgctgcccatgcagcagagggcagaaggcttgcacttgggccaaagggcctaaggtccactggacagttgggaaaacacctgaccaccatttaaggactctaagccagaatggaaaattcaccaggactccattcttaagcctatgcgagtcccctagagagaggcattgtactgatatataaatattatataatatatacatgagacatactgacagaatctgtaagctaataaaatgtaagaaaaggtt

SEQ ID NO: 21956 - DNA, 1652 bp, Homo sapiens
  misc_feature 1..1652: note = ENST00000490566
  source 1..1652: mol_type = unassigned DNA; mol_type = unassigned DNA
aaaacaaacataaaaacccaacagaataagtttgccaacctgagtacaggaagacccgtaggagtagttaaattttaactttaaagaaaatttgtctcacctaagaaagaacgaaggtcggtaggctcaatgagacttaagtaaaactagcgccaccgaggtcttgcttcctcctctctccttgtcccttccccatgcagccatcgcgctcctcaaggaccaggagccgggggccttcatcatccgcgacagtcactccttccgaggcgcgtacgggctggccatgaaggtgtcttcgccacctccaaccatcatgcagcagaataaaaaaggagacatgacccatgagctggtcaggcattttctgatagagactggccccagaggagtcaagctcaagggctgccccaatgagccaaacttcggatcgctgtctgccctggtctaccagcactccatcatcccattggccctgccttgcaagctggtcattccaaaccgagaccccacagatgaatcgaaagatagctccggccctgccaactcaactgcagacctgctgaaacaaggggcagcctgcaatgtgctcttcgtcaactctgtggacatggagtcactcactgggccacaggccatctctaaagccacatctgagacgttggctgcagaccccacgccagctgccaccatcgttcacttcaaagtctctgcccagggaatcactctgactgacaaccagagaaagctctttttcagacgccactaccctctcaacactgtcaccttctgtgacctggatccacaggaaagaaagtggatgaaaacagagggtggtgcccctgctaagctcttcggcttcgtggcccggaagcagggcagcaccacggacaacgcctgccacctctttgctgagcttgaccccaaccagccggcctctgccatcgtcaacttcgtctccaaggtcatgctgaatgccggccaaaagagatgaaccctgccccttgcccagggccagtgccatggggaaggggcttgtggggaggggacccatgaatcctgaccactcttgaacccagaaggaggactttgggccaatttcggaggagagaagaaagtgcaacgtggggagagggaagtgaattgcagaggggagggggaaaagagagagagagagagagagagagagagagagaaagatggaggagaagaacttggattcccctgggtagatggaaactgcaaaaacccaaagcctccaaaactaaccaggtccacctaacaccccctccctcccctaagaagatggatgtcctcaaaagagaaggaacaaacctccttgggaatccacattttttgggggaatggaaaagctctgtctccctaactcaactgctttgcaaggggaaatcaagctgggagaatctttttctggccacctgtggggtaggttgtcaaaccaaacagagccaccgtgggacatcaagtggaagaacttgtttgcttgaaagtatctcagacccaaggcacctcaggtctctttgctgtgcctccactatattgtcgtgtgggtgtgtgtctgcacccacatcctcacacattgatctagatctgcctttatccactcgaattataaacagctcggcttgtccttg

SEQ ID NO: 21957 - DNA, 5921 bp, Homo sapiens
  misc_feature 1..5921: note = ENST00000419504
  source 1..5921: mol_type = unassigned DNA; mol_type = unassigned DNA
aaccatgagctggtgcccatcaccactgagaatgcaccaaagaatgtagtggacaagggagaaggagcctcccggggtggaaacacacggaaaagcctcgaggacaacggctccaccagggtcaccccgagtgtccagccccacctccagcccatcagaaacatgagtgtgagccggaccatggaggacagctgtgagctggacctggtgtacgtcacagagaggatcatcgctgtctccttccccagcacagccaatgaggagaacttccggagcaacctccgtgaggtggcgcagatgctcaagtccaaacatggaggcaactacctgctgttcaacctctctgagcggagacctgacatcacgaagctccatgccaaggtactggaatttggctggcccgacctccacaccccagccctggagaagatctgcagcatctgtaaggccatggacacatggctcaatgcagaccctcacaatgtcgttgttctacacaacaagggaaaccgaggcaggataggagttgtcatcgcggcttacatgcactacagcaacatttctgccagtgcggaccaggctctggaccggtttgcaatgaagcggttctatgaggataagattgtgcccattggccagccatcccaaagaaggtacgtgcattacttcagtggcctgctctccggctccatcaaaatgaacaacaagcccttgtttctgcaccacgtgatcatgcacggcatccccaactttgagtctaaaggaggatgtcggccatttctccgcatctaccaggccatgcaacctgtgtacacatctggcatctacaacatcccaggagacagccagactagcgtctgcatcaccatcgagccaggactgctcttgaagggagacatcttgctgaagtgctaccacaagaagttccgaagcccagcccgagacgtcatcttccgtgtgcagttccacacctgtgccatccatgacctgggggttgtctttgggaaggaggaccttgatgatgctttcaaagatgatcgatttccagagtatggcaaagtggagtttgtattttcttatgggccagagaaaattcaaggcatggagcacctggagaacgggccgagcgtgtctgtggactataacacctccgaccccctcatccgctgggactcctacgacaacttcagtgggcatcgagatgacggcatggaggaggtggtgggacacacgcaggggccactagatgggagcctgtatgctaaggtgaagaagaaagactccctgcacggcagcaccggggctgttaatgccacacgtcctacactgtcggccacccccaaccacgtggaacacacgctttctgtgagcagcgactcgggcaactccacagcctccaccaagaccgacaagaccgacgagcctgtccccggggcctccagtgccactgctgccttgagtccccaggagaagcgggagctggaccgcctgctgagtggctttggcttagagcgagagaagcaaggcgccatgtaccacacccagcacctcaggtcccgcccagcagggggctcggctgtgccctcctctggacgccacgttgtcccagcccaggttcatgtcaatggtggggcgttagcatctgagcgggagacagacatcctggacgatgaattgccaaaccaggatggtcacagtgcgggcagcatgggcacactctcttctctggacggggtcaccaacaccagtgaggggggctacccagaggccctgtccccactgaccaacggtctggacaagtcctaccccatggagcctatggtcaatggaggaggctacccctacgagtctgccagccgggcggggcctgcccatgctggccacacggcccccatgcggccctcctactctgcacaggagggtttagctggctaccagagggaggggccccacccagcctggccacagccagtgaccacctcccactatgcccatgaccccagcggtatgttccgctctcaatccttttcggaagctgaaccccagctgcccccagctccggtccgagggggaagcagccgggaggctgtgcaaaggggactgaattcgtggcagcagcagcagcagcagcagcagcagcctcgcccacctccacgccagcaggaaagagcccacttggagagtcttgtagccagcaggcccagccctcagccattggcagagacccccatccccagtctccctgagttcccgcgagcagcctcccagcaggagattgaacagtccatcgaaacactcaatatgctgatgctggacctggagccagcctccgctgctgccccactacacaagtcccagagtgtccccggggcctggccaggggcttctccactctcctcccagcccctctctggatcctcccgtcagtcccatccactgacccagtccagatctggctatatccccagtgggcattcgttgggaacccctgagccagccccacgggcctctctggagtctgtccctcctggcaggtcttactcaccttatgactatcagccatgtttggctgggcctaaccaggatttccattcaaagagcccagcctcttcctccttgcctgccttccttccgaccacccacagccctccagggcctcagcaacccccagcctctctccctggcctcactgctcagcctctgctctcaccaaaggaagcgacttcagacccctcccggactccagaggaggagccattgaatttagaagggctggtggcccacagggtagcaggggtacaggctcgggagaagcagcctgcagagcccccagcccctctgcggaggcgggcggccagtgatggacagtatgagaaccagtctccagaagccacatcccctcgtagccctggggttcgctcccctgtccagtgtgtctccccggagctggctcttaccatcgctctcaatcctggagggcggcccaaagagccccatttgcacagctacaaggaggccttcgaggagatggagggaacctccccgagcagcccaccacccagtggggtgcggtcccccccgggtctggccaagacacccctgtctgctctgggcctgaaacctcacaacccagcggacatcctgttgcaccccacaggagttaccagaagacggatccagccagagccccggagctatgtggagtctgtggcacggacagcggtggctggaccccgagctcaggactctgagcccaagagctttagtgctccagccacccaggcctatggccatgagatacccctgaggaacgggaccctgggtggctcctttgtctcccccagccccctctccaccagcagccccatcctcagtgctgacagcacttcagtggggagtttcccgtcgggagagagcagtgaccagggtccccggacgcccacccagcctctgttggagtctggcttccgctcaggcagcctgggacagcccagcccgtctgcccagagaaactaccagagctcttctcctctcccgactgtgggcagtagctacagcagccccgactactcacttcagcatttcagctcctctccggaaagccaggctcgagctcagttcagtgtggctggcgtccacacggtgcctgggagccctcaggcgcgccacagaacagtgggcaccaacactccccctagtcctggcttcggctggcgggccatcaatcccagcatggctgcccccagcagtcccagtttgagccatcaccagatgatgggtccaccaggcactggcttccatggtagcactgtctccagcccccagagcagtgcagcgaccaccccggggagccccagcctgtgtcggcacccagcaggggtctaccaggtttctggcctccacaacaaagtggccaccaccccggggagtcccagcctgggccggcaccctggggctcaccaaggcaacctggcctccggtcttcatagcaatgcaatagccagccctggaagccccagcctgggccgtcacctcggagggtctggatctgtggttcccggcagcccctgcttggaccggcatgtggcctatggtggctattctaccccggaggatcggagacccacactgtcccggcagagcagtgcctctggctaccaggctccttccacgccctccttccctgtctcccctgcctactaccctggcctgagcagccctgccacctccccgtcaccagactccgcagccttccggcaagggagcccaacaccagccttgccagagaagcgaaggatgtcagtgggagaccgggcaggcagcctccccaactatgccaccatcaatgggaaggtgtcttcgcctgtcgccagcggcatgtccagtcccagtgggggcagcaccgtctccttctcccacactctgcccgacttctccaagtactccatgccagacaacagcccggagacgcgggctaaagtgaagtttgtccaggacacttctaagtattggtacaagcctgagatctccagggagcaggccatcgcgctcctcaaggaccaggagccgggggccttcatcatccgcgacagtcactccttccgaggcgcgtacgggctggccatgaaggtgtcttcgccacctccaaccatcatgcagcagaataaaaaagacatgacccatgagctggtcaggcattttctgatagagactggccccagaggagtcaagctcaagggctgccccaatgagccaaacttcggatcgctgtctgccctggtctaccagcactccatcatcccattggccctgccttgcaagctggtcattccaaaccgagaccccacagatgaatcgaaagatagctccggccctgccaactcaactgcagacctgctgaaacaaggggcagcctgcaatgtgctcttcgtcaactctgtggacatggagtcactcactgggccacaggccatctctaaagccacatctgagacgttggctgcagaccccacgccagctgccaccatcgttcacttcaaagtctctgcccagggaatcactctgactgacaaccagagaaagctctttttcagacgccactaccctctcaacactgtcaccttctgtgacctggatccacaggaaagaaagtggatgaaaacagagggtggtgcccctgctaagctcttcggcttcgtggcccggaagcagggcagcaccacggacaacgcctgccacctctttgctgagcttgaccccaaccagccggcctctgccatcgtcaacttcgtctccaaggtcatgctgaatgccggccaaaagagatgaaccctgccccttgcccagggccagtgccatggggaaggggcttgtggggaggggacccatgaatcctgaccactcttgaacccagaaggaggactttgggccaatttcggaggagagaagaaagtgcaacgtggggagagggaagtgaattgcagaggggagggggaaaagagagagagagagagagagagagagagagagaaagatggaggagaagaacttggattcccctgggtagatggaaactgcaaaaacccaaagcctccaaaactaaccaggtccacctaacaccccctccctcccctaagaagatggatgtcctcaaaagagaaggaacaaacctccttgggaatccacattttttgggggaatggaaaagctctgtctccctaactcaactgctttgcaaggggaaatcaagctgggagaatctttttctggccacctgtggggtaggttgtcaaaccaaacagagccaccgtgggacatcaagtggaagaacttgtttgcttgaaagtatctcagacccaaggcacctcaggtctctttgctgtgcctccactatattgtcgtgtgggtgtgtgtctgcaccc

SEQ ID NO: 21958 - DNA, 5900 bp, Homo sapiens
  misc_feature 1..5900: note = ENST00000430930
  source 1..5900: mol_type = unassigned DNA; mol_type = unassigned DNA
aaccatgagctggtgcccatcaccactgagaatgcaccaaagaatgtagtggacaagggagaaggagcctcccggggtggaaacacacggaaaagcctcgaggacaacggctccaccagggtcaccccgagtgtccagccccacctccagcccatcagaaacatgagtgtgagccggaccatggaggacagctgtgagctggacctggtgtacgtcacagagaggatcatcgctgtctccttccccagcacagccaatgaggagaacttccggagcaacctccgtgaggtggcgcagatgctcaagtccaaacatggaggcaactacctgctgttcaacctctctgagcggagacctgacatcacgaagctccatgccaaggtactggaatttggctggcccgacctccacaccccagccctggagaagatctgcagcatctgtaaggccatggacacatggctcaatgcagaccctcacaatgtcgttgttctacacaacaagggaaaccgaggcaggataggagttgtcatcgcggcttacatgcactacagcaacatttctgccagtgcggaccaggctctggaccggtttgcaatgaagcggttctatgaggataagattgtgcccattggccagccatcccaaagaaggtacgtgcattacttcagtggcctgctctccggctccatcaaaatgaacaacaagcccttgtttctgcaccacgtgatcatgcacggcatccccaactttgagtctaaaggaggatgtcggccatttctccgcatctaccaggccatgcaacctgtgtacacatctggcatctacaacatcccaggagacagccagactagcgtctgcatcaccatcgagccaggactgctcttgaagggagacatcttgctgaagtgctaccacaagaagttccgaagcccagcccgagacgtcatcttccgtgtgcagttccacacctgtgccatccatgacctgggggttgtctttgggaaggaggaccttgatgatgctttcaaagatgatcgatttccagagtatggcaaagtggagtttgtattttcttatgggccagagaaaattcaaggcatggagcacctggagaacgggccgagcgtgtctgtggactataacacctccgaccccctcatccgctgggactcctacgacaacttcagtgggcatcgagatgacggcatggaggaggtggtgggacacacgcaggggccactagatgggagcctgtatgctaaggtgaagaagaaagactccctgcacggcagcaccggggctgttaatgccacacgtcctacactgtcggccacccccaaccacgtggaacacacgctttctgtgagcagcgactcgggcaactccacagcctccaccaagaccgacaagaccgacgagcctgtccccggggcctccagtgccactgctgccttgagtccccaggagaagcgggagctggaccgcctgctgagtggctttggcttagagcgagagaagcaaggcgccatgtaccacacccagcacctcaggtcccgcccagcagggggctcggctgtgccctcctctggacgccacgttgtcccagcccaggttcatgtcaatggtggggcgttagcatctgagcgggagacagacatcctggacgatgaattgccaaaccaggatggtcacagtgcgggcagcatgggcacactctcttctctggacggggtcaccaacaccagtgaggggggctacccagaggccctgtccccactgaccaacggtctggacaagtcctaccccatggagcctatggtcaatggaggaggctacccctacgagtctgccagccgggcggggcctgcccatgctggccacacggcccccatgcggccctcctactctgcacaggagggtttagctggctaccagagggaggggccccacccagcctggccacagccagtgaccacctcccactatgcccatgaccccagcggtatgttccgctctcaatccttttcggaagctgaaccccagctgcccccagctccggtccgagggggaagcagccgggaggctgtgcaaaggggactgaattcgtggcagcagcagcagcagcagcagcagcagcctcgcccacctccacgccagcaggaaagagcccacttggagagtcttgtagccagcaggcccagccctcagccattggcagagacccccatccccagtctccctgagttcccgcgagcagcctcccagcaggagattgaacagtccatcgaaacactcaatatgctgatgctggacctggagccagcctccgctgctgccccactacacaagtcccagagtgtccccggggcctggccaggggcttctccactctcctcccagcccctctctggatcctcccgtcagtcccatccactgacccagtccagatctggctatatccccagtgggcattcgttgggaacccctgagccagccccacgggcctctctggagtctgtccctcctggcaggtcttactcaccttatgactatcagccatgtttggctgggcctaaccaggatttccattcaaagagcccagcctcttcctccttgcctgccttccttccgaccacccacagccctccagggcctcagcaacccccagcctctctccctggcctcactgctcagcctctgctctcaccaaaggaagcgacttcagacccctcccggactccagaggaggagccattgaatttagaagggctggtggcccacagggtagcaggggtacaggctcgggagaagcagcctgcagagcccccagcccctctgcggaggcgggcggccagtgatggacagtatgagaaccagtctccagaagccacatcccctcgtagccctggggttcgctcccctgtccagtgtgtctccccggagctggctcttaccatcgctctcaatcctggagggcggcccaaagagccccatttgcacagctacaaggaggccttcgaggagatggagggaacctccccgagcagcccaccacccagtggggtgcggtcccccccgggtctggccaagacacccctgtctgctctgggcctgaaacctcacaacccagcggacatcctgttgcaccccacaggagagccccggagctatgtggagtctgtggcacggacagcggtggctggaccccgagctcaggactctgagcccaagagctttagtgctccagccacccaggcctatggccatgagatacccctgaggaacgggaccctgggtggctcctttgtctcccccagccccctctccaccagcagccccatcctcagtgctgacagcacttcagtggggagtttcccgtcgggagagagcagtgaccagggtccccggacgcccacccagcctctgttggagtctggcttccgctcaggcagcctgggacagcccagcccgtctgcccagagaaactaccagagctcttctcctctcccgactgtgggcagtagctacagcagccccgactactcacttcagcatttcagctcctctccggaaagccaggctcgagctcagttcagtgtggctggcgtccacacggtgcctgggagccctcaggcgcgccacagaacagtgggcaccaacactccccctagtcctggcttcggctggcgggccatcaatcccagcatggctgcccccagcagtcccagtttgagccatcaccagatgatgggtccaccaggcactggcttccatggtagcactgtctccagcccccagagcagtgcagcgaccaccccggggagccccagcctgtgtcggcacccagcaggggtctaccaggtttctggcctccacaacaaagtggccaccaccccggggagtcccagcctgggccggcaccctggggctcaccaaggcaacctggcctccggtcttcatagcaatgcaatagccagccctggaagccccagcctgggccgtcacctcggagggtctggatctgtggttcccggcagcccctgcttggaccggcatgtggcctatggtggctattctaccccggaggatcggagacccacactgtcccggcagagcagtgcctctggctaccaggctccttccacgccctccttccctgtctcccctgcctactaccctggcctgagcagccctgccacctccccgtcaccagactccgcagccttccggcaagggagcccaacaccagccttgccagagaagcgaaggatgtcagtgggagaccgggcaggcagcctccccaactatgccaccatcaatgggaaggtgtcttcgcctgtcgccagcggcatgtccagtcccagtgggggcagcaccgtctccttctcccacactctgcccgacttctccaagtactccatgccagacaacagcccggagacgcgggctaaagtgaagtttgtccaggacacttctaagtattggtacaagcctgagatctccagggagcaggccatcgcgctcctcaaggaccaggagccgggggccttcatcatccgcgacagtcactccttccgaggcgcgtacgggctggccatgaaggtgtcttcgccacctccaaccatcatgcagcagaataaaaaaggagacatgacccatgagctggtcaggcattttctgatagagactggccccagaggagtcaagctcaagggctgccccaatgagccaaacttcggatcgctgtctgccctggtctaccagcactccatcatcccattggccctgccttgcaagctggtcattccaaaccgagaccccacagatgaatcgaaagatagctccggccctgccaactcaactgcagacctgctgaaacaaggggcagcctgcaatgtgctcttcgtcaactctgtggacatggagtcactcactgggccacaggccatctctaaagccacatctgagacgttggctgcagaccccacgccagctgccaccatcgttcacttcaaagtctctgcccagggaatcactctgactgacaaccagagaaagctctttttcagacgccactaccctctcaacactgtcaccttctgtgacctggatccacaggaaagaaagtggatgaaaacagagggtggtgcccctgctaagctcttcggcttcgtggcccggaagcagggcagcaccacggacaacgcctgccacctctttgctgagcttgaccccaaccagccggcctctgccatcgtcaacttcgtctccaaggtcatgctgaatgccggccaaaagagatgaaccctgccccttgcccagggccagtgccatggggaaggggcttgtggggaggggacccatgaatcctgaccactcttgaacccagaaggaggactttgggccaatttcggaggagagaagaaagtgcaacgtggggagagggaagtgaattgcagaggggagggggaaaagagagagagagagagagagagagagagagagaaagatggaggagaagaacttggattcccctgggtagatggaaactgcaaaaacccaaagcctccaaaactaaccaggtccacctaacaccccctccctcccctaagaagatggatgtcctcaaaagagaaggaacaaacctccttgggaatccacattttttgggggaatggaaaagctctgtctccctaactcaactgctttgcaaggggaaatcaagctgggagaatctttttctggccacctgtggggtaggttgtcaaaccaaacagagccaccgtgggacatcaagtggaagaacttgtttgcttgaaagtatctcagacccaaggcacctcaggtctctttgctgtgcctccactatattgtcgtgtgggtgtgtgtctgcaccc

SEQ ID NO: 21959 - DNA, 335 bp, Homo sapiens
  misc_feature 1..335: note = ENST00000480416
  source 1..335: mol_type = unassigned DNA; mol_type = unassigned DNA
cgaaagatagctccggccctgccaactcaactgcagacctgctgaaacaaggggcagcctgcaatgtgctcttcgtcaactctgtggacatggagtcactcactgggccacaggccatctctaaagccacatctgagacgttggctgcagaccccacgccagctgccaccatcgttcacttcaaagtctctgcccagggaatcactctgactgacaaccagagaaagtaagactcccctgcctgctcctcggtggggttctccttcctgtgactcatctattcatccgtgtacccacacatttaccacttgattgattccttgcacccaactgct

SEQ ID NO: 21960 - DNA, 565 bp, Homo sapiens
  misc_feature 1..565: note = ENST00000495556
  source 1..565: mol_type = unassigned DNA; mol_type = unassigned DNA
ggttggctccttcctgatgttctaggggagaatctgtcccaggcctctctcccagtttcttgtggctgccagcatccttggtgtcccttggcatgtagacgcatcaccccagtctctgcctgcaccttccatggtgctctcccctgtgtgtatctctgtctcctctccttgtaaggacaccaggcatacaggcatactggattaaggctcaccctaatcctgtgtgacctcatcttaatttgtctacatctgcaaagaccctatttccaaataaggtcaaattcacaagcactgggggccaggactttgatgtatgttttgggtgaacacaatttaacccataacactttcttcccttctcctgctttagacaacagcccggagacgcgggctaaagtgaagtttgtccaggacacttctaagtattggtacaagcctgagatctccagggagcaggccatcgcgctcctcaaggaccaggagccgggggccttcatcatccgcgacagtcactccttccgaggcgcgtacgggctggccatgaaggtgtcttcgccacctccaa

SEQ ID NO: 21961 - DNA, 2464 bp, Homo sapiens
  misc_feature 1..2464: note = ENST00000446903
  source 1..2464: mol_type = unassigned DNA; mol_type = unassigned DNA
agatgctggcggagccggagcagccgcggactcagagagcccttctgccagcgccgcggggactctagcttcaggggctcttcacaggccctgggcgtgcctcagtgacgggacccagcaaagatgacgtggatctgtctgtcctgcatgctctggccagaggatctggaggcccccaagacacaccgcttcaaggtgaagaccttcaagaaggtgaagccctgtgggatctgccgccaggtcatcacccaggaaggctgcacctgcaaagtctgcagcttctcctgtcatcggaaatgccaggccaaggtggctgccccctgcgttcctccatccaaccatgagctggtgcccatcaccactgagaatgcaccaaagaatgtagtggacaagggagaaggagcctcccggggtggaaacacacggaaaagcctcgaggacaacggctccaccagggtcaccccgagtgtccagccccacctccagcccatcagaaacatgagtgtgagccggaccatggaggacagctgtgagctggacctggtgtacgtcacagagaggatcatcgctgtctccttccccagcacagccaatgaggagaacttccggagcaacctccgtgaggtggcgcagatgctcaagtccaaacatggaggcaactacctgctgttcaacctctctgagcggagacctgacatcacgaagctccatgccaaggtactggaatttggctggcccgacctccacaccccagccctggagaagatctgcagcatctgtaaggccatggacacatggctcaatgcagaccctcacaatgtcgttgttctacacaacaagggaaaccgaggcaggataggagttgtcatcgcggcttacatgcactacagcaacatttctgccagtgcggaccaggctctggaccggtttgcaatgaagcggttctatgaggataagattgtgcccattggccagccatcccaaagaaggtacgtgcattacttcagtggcctgctctccggctccatcaaaatgaacaacaagcccttgtttctgcaccacgtgatcatgcacggcatccccaactttgagtctaaaggaggatgtcggccatttctccgcatctaccaggccatgcaacctgtgtacacatctggcatctacaacatcccaggagacagccagactagcgtctgcatcaccatcgagccaggactgctcttgaagggagacatcttgctgaagtgctaccacaagaagttccgaagcccagcccgagacgtcatcttccgtgtgcagttccacacctgtgccatccatgacctgggggttgtctttgggaaggaggaccttgatgatgctttcaaagatgatcgatttccagagtatggcaaagtggagtttgtattttcttatgggccagagaaaattcaaggcatggagcacctggagaacgggccgagcgtgtctgtggactataacacctccgaccccctcatccgctgggactcctacgacaacttcagtgggcatcgagatgacggcatggaggaggtggtgggacacacgcaggggccactagatgggagcctgtatgctaaggtgaagaagaaagactccctgcacggcagcaccggggctgttaatgccacacgtcctacactgtcggccacccccaaccacgtggaacacacgctttctgtgagcagcgactcgggcaactccacagcctccaccaagaccgacaagaccgacgagcctgtccccggggcctccagtgccactgctgccttgagtccccaggagaagcgggagctggaccgcctgctgagtggctttggcttagagcgagagaagcaaggcgccatgtaccacacccagcacctcaggtcccgcccagcagggggctcggctgtgccctcctctggacgccacgttgtcccagcccaggttcatgtcaatggtggggcgttagcatctgagcgggagacagacatcctggacgatgaattgccaaaccaggatggtcacagtgcgggcagcatgggcacactctcttctctggacggggtcaccaacaccagtgaggggggctacccagaggccctgtccccactgaccaacggtctggacaagtcctaccccatggagcctatggtcaatggaggaggctacccctacgagtctgccagccgggcggggcctgcccatgctggccacacggcccccatgcggccctcctactctgcacaggagggtttagctggctaccagagggaggggccccacccagcctggccacagccagtgaccacctcccactatgcccatgaccccagcggtatgttccgctctcaatccttttcggaagctgaaccccagctgcccccagctccggtccgagggggaagcagccgggaggctgtgcaaaggggactgaattcgtggcagcagcagcagcagc

SEQ ID NO: 21962 - DNA, 2513 bp, Homo sapiens
  misc_feature 1..2513: note = ENST00000479185
  source 1..2513: mol_type = unassigned DNA; mol_type = unassigned DNA
tgcccctccctcatctcccctccagcagcccactctttttctgcccacctctctcccttagcaacatcccaggagacagccagactagcgtctgcatcaccatcgagccaggactgctcttgaagggagacatcttgctgaagtgctaccacaagaagttccgaagcccagcccgagacgtcatcttccgtgtgcagttccacacctgtgccatccatgacctgggggttgtctttgggaaggaggaccttgatgatgctttcaaagatgatcgatttccagagtatggcaaagtggagtttgtattttcttatgggccagagaaaattcaaggtataagccgagttagaattcattctctcactccttccttttatcctgaccctatccccagcacccttccacccctggtctgttccacagtgatcaagttatttttgagaggcaggccatcagtaaaggatctgggtttcagagtggacccctagctaaacatgaaccagtgacttaatctctggataataaaaataaaaaagcagacagagaggcactgggttggataaactgttctggtcccattaggtcatcagcctgttatattcagagactgaggtccttggtagatggagggagtggctggcgggcagggggcacacaaaggtgctggatagaagatgtgtatttatgagaactgaggtgattcaacctgaaggctggtttaataataaccttgaagcctctatactggttataagtggagaccagttgttcaccatcttattcgagaatggaatgaaaggagatgaagttaggttatgggcagagggactctggatagactaaagaaaggactgccaagccaggaaggtaactcaccctgacagacttgactaggagctatgctgtctttgagccaggtttttaaaaatttacttatttatttttattttaccttaagttctgggatacacgtgctgaatgtgcagatttgttacataggcatatatgtgccatggtggtttgctgcacctgtcaacccatcgtctacttttaagctctgcatgcattaggtatttgtcccaatgctgagctgggttttctgtggatggctgggagattctgccgtgccccctaggtttctgtctggagcggagagcgttttaagagggggcagggccatgcctgggatgaccctttggaggctttatgtcctttcaatgtcggggctgtgatttccctgctgtccctgatcccacgtagctcataagcagcctgccccccacccccagggtctgaccccaggggcagactttctagtctcttggcactgcctcaggagccccagggacacagaagaaaaagaggcaggtacccagccaggggtcctccccgctttcttccagggggtcttcattcttcagtgcctgtcctgatttacccctatgacccggcatgagccttttcaagaatgtgagaaactagactcccagttctcagtccagcttaagccactggtcccgcccaccacgctcaagaaaatgagaagtccctcagggagcctcttttggggagcttgtgggctttctctgtttttccagctgctgatctcttttccctctctgcactgtctccccgactgccgctgcctttcccatcccacttaggcatggagcacctggagaacgggccgagcgtgtctgtggactataacacctccgaccccctcatccgctgggactcctacgacaacttcagtgggcatcgagatgacggcatggaggaggtggtgggacacacgcaggggccactagatgggagcctgtatgctaaggtgaagaagaaagactccctgcacggcagcaccggggctgttaatgccacacgtcctacactgtcggccacccccaaccacgtggaacacacgctttctgtgagcagcgactcgggcaactccacagcctccaccaagaccgacaagaccgacgagcctgtccccggggcctccagtgccactgctgccttgagtccccaggagaagcgggagctggaccgcctgctgagtggctttggcttagagcgagagaagcaaggcgccatgtaccacacccagcacctcaggtcccgcccagcagggggctcggctgtgccctcctctggacgccacgttgtcccagcccaggttcatgtcaatggtggggcgttagcatctgagcgggagacagacatcctggacgatgaattgccaaaccaggatggtcacagtgcgggcagcatgggcacactctcttctctggacggggtcaccaacaccagtgaggggggctacccagaggccctgtccccactgaccaacggtctggacaagtcctaccccatggagcctatggtcaatggaggaggctacccctacgagtctgccagccgggcggggcctgcccatgctggccacacggcccccatgcggccctcctactctgcacaggagggtttagctggctaccagagggaggggc

SEQ ID NO: 21963 - DNA, 758 bp, Homo sapiens
  misc_feature 1..758: note = ENST00000480665
  source 1..758: mol_type = unassigned DNA; mol_type = unassigned DNA
gacagtcggagggagcttgagtaggacacagacagcacttggagctgcagccatgtaggaattattgggaacttggggcaccaggatcaaatcagagcgggcttccctccgcttcctccctctccctccctccctccagaggaggtggtgggacacacgcaggggccactagatgggagcctgtatgctaaggtgaagaagaaagactccctgcacggcagcaccggggctgttaatgccacacgtcctacactgtcggccacccccaaccacgtggaacacacgctttctgtgagcagcgactcgggcaactccacagcctccaccaagaccgacaagaccgacgagcctgtccccggggcctccagtgccactgctgccttgagtccccaggagaagcgggagctggaccgcctgctgagtggctttggcttagagcgagagaagcaaggcgccatgtaccacacccagcacctcaggtcccgcccagcagggggctcggctgtgccctcctctggacgccacgttgtcccagcccaggttcatgtcaatggtggggcgttagcatctgagcgggagacagacatcctggacgatgaattgccaaaccaggatggtcacagtgcgggcagcatgggcacactctcttctctggacggggtcaccaacaccagtgaggggggctacccagaggccctgtccccactgaccaacggtctggacaagtcctaccccatggagcctatggtcaatggagg

SEQ ID NO: 21964 - DNA, 1478 bp, Homo sapiens
  misc_feature 1..1478: note = ENST00000413554
  source 1..1478: mol_type = unassigned DNA; mol_type = unassigned DNA
aggcagcctgactcccatggtgagcccactgccaccaccacattgccctggggcagccctgcatgtccagccctacaaagcggcagcatcccatggaccgcatggggcctctccaggtggagcagggagcatgcctcttaaattagtggggaaggttctgctcaagggctccaccagggtcaccccgagtgtccagccccacctccagcccatcagaaacatgagtgtgagccggaccatggaggacagctgtgagctggacctggtgtacgtcacagagaggatcatcgctgtctccttccccagcacagccaatgaggagaacttccggagcaacctccgtgaggtggcgcagatgctcaagtccaaacatggaggcaactacctgctgttcaacctctctgagcggagacctgacatcacgaagctccatgccaaggtactggaatttggctggcccgacctccacaccccagccctggagaagatctgcagcatctgtaaggccatggacacatggctcaatgcagaccctcacaatgtcgttgttctacacaacaagggaaaccgaggcaggataggagttgtcatcgcggcttacatgcactacagcaacatttctgccagtgcggaccaggctctggaccggtttgcaatgaagcggttctatgaggataagattgtgcccattggccagccatcccaaagaaggtacgtgcattacttcagtggcctgctctccggctccatcaaaatgaacaacaagcccttgtttctgcaccacgtgatcatgcacggcatccccaactttgagtctaaaggaggatgtcggccatttctccgcatctaccaggccatgcaacctgtgtacacatctggcatctacaacatcccaggagacagccagactagcgtctgcatcaccatcgagccaggactgctcttgaagggagacatcttgctgaagtgctaccacaagaagttccgaagcccagcccgagacgtcatcttccgtgtgcagttccacacctgtgccatccatgacctgggggttgtctttgggaaggaggaccttgatgatgctttcaaagatgatcgatttccagagtatggcaaagtggagtttgtattttcttatgggccagagaaaattcaaggcatggagcacctggagaacgggccgagcgtgtctgtggactataacacctccgaccccctcatccgctgggactcctacgacaacttcagtgggcatcgagatgacggcatggaggaggtggtgggacacacgcaggggccactagatgggagcctgtatgctaaggtgaagaagaaagactccctgcacggcagcaccggggctgttaatgccacacgtcctacactgtcggccacccccaaccacgtggaacacacgctttctgtgagcagcgactcgggcaactccacagcctccaccaagaccgacaagaccgacg

SEQ ID NO: 21965 - DNA, 1792 bp, Homo sapiens
  misc_feature 1..1792: note = ENST00000310858
  source 1..1792: mol_type = unassigned DNA; mol_type = unassigned DNA
gagccacccagtagtgtctgagtggtgatccactcttgcctgcaatgaggaccaaggcaaaaagagttggctgaatctgcagcaggaaggatgagggttagataccaggaggaaattcctgacagtgagaaaagtaagacactctgtctgggaggctgtcgaatttcctttcatggtgccctttcagcaaaggaaggattgtgttttggagggctccaccagggtcaccccgagtgtccagccccacctccagcccatcagaaacatgagtgtgagccggaccatggaggacagctgtgagctggacctggtgtacgtcacagagaggatcatcgctgtctccttccccagcacagccaatgaggagaacttccggagcaacctccgtgaggtggcgcagatgctcaagtccaaacatggaggcaactacctgctgttcaacctctctgagcggagacctgacatcacgaagctccatgccaaggtactggaatttggctggcccgacctccacaccccagccctggagaagatctgcagcatctgtaaggccatggacacatggctcaatgcagaccctcacaatgtcgttgttctacacaacaagggaaaccgaggcaggataggagttgtcatcgcggcttacatgcactacagcaacatttctgccagtgcggaccaggctctggaccggtttgcaatgaagcggttctatgaggataagattgtgcccattggccagccatcccaaagaaggtacgtgcattacttcagtggcctgctctccggctccatcaaaatgaacaacaagcccttgtttctgcaccacgtgatcatgcacggcatccccaactttgagtctaaaggaggatgtcggccatttctccgcatctaccaggccatgcaacctgtgtacacatctggcatctacaacatcccaggagacagccagactagcgtctgcatcaccatcgagccaggactgctcttgaagggagacatcttgctgaagtgctaccacaagaagttccgaagcccagcccgagacgtcatcttccgtgtgcagttccacacctgtgccatccatgacctgggggttgtctttgggaaggaggaccttgatgatgctttcaaagatgatcgatttccagagtatggcaaagtggagtttgtattttcttatgggccagagaaaattcaaggcatggagcacctggagaacgggccgagcgtgtctgtggactataacacctccgaccccctcatccgctgggactcctacgacaacttcagtgggcatcgagatgacggcatggaggatgggaacaaacagaataccaatagccagtcaattggaagcatctcaggtggcctggaggatcaatatacctggccagacacacactggccttcccaaagttaggccctccaaaatgtcaagttgccaagccagaatccaaagctttgcactgagaacttcatgttggggctcctgtcccctcctggagccctgcctgggtgacaccccagtccttctattcaggtcctgtgttcacctctgggaagtgcaggaccctgtggggttttttctttttccttttccaagccaaggaagtgttctggctcctggactctgccctgtggaggggaaagggggagagagagggaaaaaaagatttccaccttattgttcagcagctggaaaattgttgtcatctgttctgccttccatttgctgagaatggaaaaaaaatgtggaaaatttggggaaataaatctcaataccctcata

SEQ ID NO: 21966 - DNA, 601 bp, Homo sapiens
  misc_feature 1..601: note = ENST00000453356
  source 1..601: mol_type = unassigned DNA; mol_type = unassigned DNA
aggagacagccagactagcgtctgcatcaccatcgagccaggactgctcttgaagggagacatcttgctgaagtgctaccacaagaagttccgaagcccagcccgagacgtcatcttccgtgtgcagttccacacctgtgccatccatgacctgggggttgtctttgggaaggaggaccttgatgatgctttcaaagatgatcgatttccagagtatggcaaagtggagtttgtattttcttatgggccagagaaaattcaaggcatggagcacctggagaacgggccgagcgtgtctgtggactataacacctccgaccccctcatccgctgggactcctacgacaacttcagtgggcatcgagatgacggcatggagggggcccagcaccctcagattggccaagacaccccaccaggcccctccgaccccccaggctgcttgtgaaaagcactcctccatccccgggcgctgagcggccaagcagaaagcagaggctggagcgaatttgttctgaggtttcagtggctgccagcctaattggtcgttgtgctggggatgtttgcatttttaacaagaacatttggcaattggaaagaa

SEQ ID NO: 21967 - DNA, 957 bp, Homo sapiens
  misc_feature 1..957: note = ENST00000492338
  source 1..957: mol_type = unassigned DNA; mol_type = unassigned DNA
ctgttcaacctctctgagcggagacctgacatcacgaagctccatgccaaggtactggaatttggctggcccgacctccacaccccagccctggagaagatctgcagcatctgtaaggccatggacacatggctcaatgcagaccctcacaatgtcgttgttctacacaacaagggaaaccgaggcaggataggagttgtcatcgcggcttacatgcactacagcaacatttctgccagtgcggaccaggctctggaccggtttgcaatgaagcggttctatgaggataagattgtgcccattggccagccatcccaaagaaggtgggtctctggggctcacagccccttgcatgtatgtgtgcactcactctatgtggggactagacttgtgtactcacagggatgggatagctgtgcctaggtgggggtgtaccaggcgcaagttttcagatgccagcctgcagtggtgtgagctcaggcacacaggagagcccgggagccagcctgtggtgtgtgcccgcagattggcacagcacttgactctgaggcctgtgctagagagcagtgcaaccttcatggggaagcatgagtctggggataagaaggcgctggtctaggaaggcatgtgctgttcttggccctggaagcaggattgcttcagtgcttggatgagtctacgggagactgcatcactgccccctgctgtgggaggtcagacactcatgataagggtcaccttctgttgggagagtttagacagttttactgagagctttcaaccacatggtctcattggagtctcacaatagcccaggcaggaaacagggcagggatggatttattcattcagcaaaatttaaatcatctactatggctccaagcactgagatatctgggtgaacaggaaaaagtcctttcccttggtgagctgatacctaatgagagagatggacat

SEQ ID NO: 21968 - DNA, 667 bp, Homo sapiens
  misc_feature 1..667: note = ENST00000413280
  source 1..667: mol_type = unassigned DNA; mol_type = unassigned DNA
cttccctccgtccctccttccctccttccttcccgagcgcggattgcgggctggggtgggaggagatttcgcggagtttccatttcatacctcgcggctaaaactttctttctgtgtctcgccctcttgcagtctgcagcttctcctgtcatcggaaatgccaggccaaggtggctgccccctgcgttcctccatccaaccatgagctggtgcccatcaccactgagaatgcaccaaagaatgtagtggacaagggagaaggagcctcccggggtggaaacacacggaaaagcctcgaggacaacggctccaccagggtcaccccgagtgtccagccccacctccagcccatcagaaacatgagtgtgagccggaccatggaggacagctgtgagctggacctggtgtacgtcacagagaggatcatcgctgtctccttccccagcacagccaatgaggagaacttccggagcaacctccgtgaggtggcgcagatgctcaagtccaaacatggaggcaactacctgctgttcaacctctctgagcggagacctgacatcacgaagctccatgccaaggtactggaatttggctggcccgacctccacaccccagccctggagaagatctgcagcatctgtaaggccatggacacatggctcaatgc

SEQ ID NO: 21969 - DNA, 538 bp, Homo sapiens
  misc_feature 1..538: note = ENST00000439083
  source 1..538: mol_type = unassigned DNA; mol_type = unassigned DNA
agtagccccacttggctcttccctccttcactgctgaggagctgctcattggtccgaggcagctgggactctgggcagagccttcttccggacagctggatggagggtccccctcttagcagagctgctctaacttggggctcagctgggagctggacctcggaacccacctatcctgcctcgtaggcactgcggagccaggagaggggtgcaggggctcctcttcttggagaccccgtggtcaagccccaggttggagtgtgaatcctgcctggccgtcaacttcccagggacttgaggggctccaccagggtcaccccgagtgtccagccccacctccagcccatcagaaacatgagtgtgagccggaccatggaggacagctgtgagctggacctggtgtacgtcacagagaggatcatcgctgtctccttccccagcacagccaatgaggagaacttccggagcaacctccgtgaggtggcgcagatgctcaagtccaaacatggaggcaactacctgctgttcaacctctctg

SEQ ID NO: 21970 - DNA, 548 bp, Homo sapiens
  misc_feature 1..548: note = ENST00000423413
  source 1..548: mol_type = unassigned DNA; mol_type = unassigned DNA
gcaaaacgcagtgggaatgtcaagcaggaggcagctcatgtgagctggcagagcggaggaagctttggagaagaggtaccatttgagatggattttgaagtttggcaaggagttttgcggggaggaaaaggggcaaagacttcttcaggcacaggggaaggcatgtgcagaggcccagtggcatgcaggtggctgccccctgcgttcctccatccaaccatgagctggtgcccatcaccactgagaatgcaccaaagaatgtagtggacaagggagaaggagcctcccggggtggaaacacacggaaaagcctcgaggacaacggctccaccagggtcaccccgagtgtccagccccacctccagcccatcagaaacatgagtgtgagccggaccatggaggacagctgtgagctggacctggtgtacgtcacagagaggatcatcgctgtctccttccccagcacagccaatgaggagaacttccggagcaacctccgtgaggtggcgcagatgctcaagtccaaacatggaggcaactacctggtg

SEQ ID NO: 21971 - DNA, 582 bp, Homo sapiens
  misc_feature 1..582: note = ENST00000449814
  source 1..582: mol_type = unassigned DNA; mol_type = unassigned DNA
agttgctcccagcagtggccctgggaccagctctgctccttgcaccccgctccctgcctggacacaggctcactcgctgccttcttctgggggaaaccagcttcttgccagccacagctgctgcctccgccactggccaccgcccctgtcctgggagtcccttggcccagacacccacctgacttagtggctcctctgcaggaaaggtggctgccccctgcgttcctccatccaaccatgagctggtgcccatcaccactgagaatgcaccaaagaatgtagtggacaagggagaaggagcctcccggggtggaaacacacggaaaagcctcgaggacaacgcactgcggagccaggagaggggtgcaggggctcctcttcttggagaccccgtggtcaagccccaggttggagtgtgaatcctgcctggccgtcaacttcccagggacttgaggggctccaccagggtcaccccgagtgtccagccccacctccagcccatcagaaacatgagtgtgagccggaccatggaggacagctgtgagctggacctggtgtacgtcacagagaggatcatcgctg

SEQ ID NO: 21972 - DNA, 393 bp, Homo sapiens
  misc_feature 1..393: note = ENST00000465306
  source 1..393: mol_type = unassigned DNA; mol_type = unassigned DNA
caccgcttcaaggtgaagaccttcaagaaggtgaagccctgtgggatctgccgccaggtcatcacccaggaaggctgcacctgcaaagggctggaccaagaatacttgctgaggccctgacagtggggagggcctggaaaactccctggttggagtctgcagaggtaggatagcttcccccacgcaggctgctgctcacctcctccgcgctgcgtgcagccatctggcaatcatgaactgagctgtcctctgggtcagatgctgtgccaggtcctggtgctgagagccagccccttacctgggaagacagacacagtcagacaatcatggagcacggtaccaaagctgacacaggtacgtgcgtgcgtgcgtgtgtgtgtgtgtgtgtgtgtg

SEQ ID NO: 21973 - DNA, 6509 bp, Homo sapiens
  misc_feature 1..6509: note = ENST00000611415
  source 1..6509: mol_type = unassigned DNA; mol_type = unassigned DNA
aggctcactcgctgccttcttctgggggaaaccagcttcttgccagccacagctgctgcctccgccactggccaccgcccctgtcctgggagtcccttggcccagacacccacctgacttagtggctcctctgcaggaaaggtggctgccccctgcgttcctccatccaaccatgagctggtgcccatcaccactgagaatgcaccaaagaatgtagtggacaagggagaaggagcctcccggggtggaaacacacggaaaagcctcgaggacaacggctccaccagggtcaccccgagtgtccagccccacctccagcccatcagaaacatgagtgtgagccggaccatggaggacagctgtgagctggacctggtgtacgtcacagagaggatcatcgctgtctccttccccagcacagccaatgaggagaacttccggagcaacctccgtgaggtggcgcagatgctcaagtccaaacatggaggcaactacctgctgttcaacctctctgagcggagacctgacatcacgaagctccatgccaaggtactggaatttggctggcccgacctccacaccccagccctggagaagatctgcagcatctgtaaggccatggacacatggctcaatgcagaccctcacaatgtcgttgttctacacaacaagggaaaccgaggcaggataggagttgtcatcgcggcttacatgcactacagcaacatttctgccagtgcggaccaggctctggaccggtttgcaatgaagcggttctatgaggataagattgtgcccattggccagccatcccaaagaaggtacgtgcattacttcagtggcctgctctccggctccatcaaaatgaacaacaagcccttgtttctgcaccacgtgatcatgcacggcatccccaactttgagtctaaaggaggatgtcggccatttctccgcatctaccaggccatgcaacctgtgtacacatctggcatctacaacatcccaggagacagccagactagcgtctgcatcaccatcgagccaggactgctcttgaagggagacatcttgctgaagtgctaccacaagaagttccgaagcccagcccgagacgtcatcttccgtgtgcagttccacacctgtgccatccatgacctgggggttgtctttgggaaggaggaccttgatgatgctttcaaagatgatcgatttccagagtatggcaaagtggagtttgtattttcttatgggccagagaaaattcaaggcatggagcacctggagaacgggccgagcgtgtctgtggactataacacctccgaccccctcatccgctgggactcctacgacaacttcagtgggcatcgagatgacggcatggaggaggtggtgggacacacgcaggggccactagatgggagcctgtatgctaaggtgaagaagaaagactccctgcacggcagcaccggggctgttaatgccacacgtcctacactgtcggccacccccaaccacgtggaacacacgctttctgtgagcagcgactcgggcaactccacagcctccaccaagaccgacaagaccgacgagcctgtccccggggcctccagtgccactgctgccttgagtccccaggagaagcgggagctggaccgcctgctgagtggctttggcttagagcgagagaagcaaggcgccatgtaccacacccagcacctcaggtcccgcccagcagggggctcggctgtgccctcctctggacgccacgttgtcccagcccaggttcatgtcaatggtggggcgttagcatctgagcgggagacagacatcctggacgatgaattgccaaaccaggatggtcacagtgcgggcagcatgggcacactctcttctctggacggggtcaccaacaccagtgaggggggctacccagaggccctgtccccactgaccaacggtctggacaagtcctaccccatggagcctatggtcaatggaggaggctacccctacgagtctgccagccgggcggggcctgcccatgctggccacacggcccccatgcggccctcctactctgcacaggagggtttagctggctaccagagggaggggccccacccagcctggccacagccagtgaccacctcccactatgcccatgaccccagcggtatgttccgctctcaatccttttcggaagctgaaccccagctgcccccagctccggtccgagggggaagcagccgggaggctgtgcaaaggggactgaattcgtggcagcagcagcagcagcagcagcagcagcctcgcccacctccacgccagcaggaaagagcccacttggagagtcttgtagccagcaggcccagccctcagccattggcagagacccccatccccagtctccctgagttcccgcgagcagcctcccagcaggagattgaacagtccatcgaaacactcaatatgctgatgctggacctggagccagcctccgctgctgccccactacacaagtcccagagtgtccccggggcctggccaggggcttctccactctcctcccagcccctctctggatcctcccgtcagtcccatccactgacccagtccagatctggctatatccccagtgggcattcgttgggaacccctgagccagccccacgggcctctctggagtctgtccctcctggcaggtcttactcaccttatgactatcagccatgtttggctgggcctaaccaggatttccattcaaagagcccagcctcttcctccttgcctgccttccttccgaccacccacagccctccagggcctcagcaacccccagcctctctccctggcctcactgctcagcctctgctctcaccaaaggaagcgacttcagacccctcccggactccagaggaggagccattgaatttagaagggctggtggcccacagggtagcaggggtacaggctcgggagaagcagcctgcagagcccccagcccctctgcggaggcgggcggccagtgatggacagtatgagaaccagtctccagaagccacatcccctcgtagccctggggttcgctcccctgtccagtgtgtctccccggagctggctcttaccatcgctctcaatcctggagggcggcccaaagagccccatttgcacagctacaaggaggccttcgaggagatggagggaacctccccgagcagcccaccacccagtggggtgcggtcccccccgggtctggccaagacacccctgtctgctctgggcctgaaacctcacaacccagcggacatcctgttgcaccccacaggagttaccagaagacggatccagccagagccccggagctatgtggagtctgtggcacggacagcggtggctggaccccgagctcaggactctgagcccaagagctttagtgctccagccacccaggcctatggccatgagatacccctgaggaacgggaccctgggtggctcctttgtctcccccagccccctctccaccagcagccccatcctcagtgctgacagcacttcagtggggagtttcccgtcgggagagagcagtgaccagggtccccggacgcccacccagcctctgttggagtctggcttccgctcaggcagcctgggacagcccagcccgtctgcccagagaaactaccagagctcttctcctctcccgactgtgggcagtagctacagcagccccgactactcacttcagcatttcagctcctctccggaaagccaggctcgagctcagttcagtgtggctggcgtccacacggtgcctgggagccctcaggcgcgccacagaacagtgggcaccaacactccccctagtcctggcttcggctggcgggccatcaatcccagcatggctgcccccagcagtcccagtttgagccatcaccagatgatgggtccaccaggcactggcttccatggtagcactgtctccagcccccagagcagtgcagcgaccaccccggggagccccagcctgtgtcggcacccagcaggggtctaccaggtttctggcctccacaacaaagtggccaccaccccggggagtcccagcctgggccggcaccctggggctcaccaaggcaacctggcctccggtcttcatagcaatgcaatagccagccctggaagccccagcctgggccgtcacctcggagggtctggatctgtggttcccggcagcccctgcttggaccggcatgtggcctatggtggctattctaccccggaggatcggagacccacactgtcccggcagagcagtgcctctggctaccaggctccttccacgccctccttccctgtctcccctgcctactaccctggcctgagcagccctgccacctccccgtcaccagactccgcagccttccggcaagggagcccaacaccagccttgccagagaagcgaaggatgtcagtgggagaccgggcaggcagcctccccaactatgccaccatcaatgggaaggtgtcttcgcctgtcgccagcggcatgtccagtcccagtgggggcagcaccgtctccttctcccacactctgcccgacttctccaagtactccatgccagacaacagcccggagacgcgggctaaagtgaagtttgtccaggacacttctaagtattggtacaagcctgagatctccagggagcaggccatcgcgctcctcaaggaccaggagccgggggccttcatcatccgcgacagtcactccttccgaggcgcgtacgggctggccatgaaggtgtcttcgccacctccaaccatcatgcagcagaataaaaaagacatgacccatgagctggtcaggcattttctgatagagactggccccagaggagtcaagctcaagggctgccccaatgagccaaacttcggatcgctgtctgccctggtctaccagcactccatcatcccattggccctgccttgcaagctggtcattccaaaccgagaccccacagatgaatcgaaagatagctccggccctgccaactcaactgcagacctgctgaaacaaggggcagcctgcaatgtgctcttcgtcaactctgtggacatggagtcactcactgggccacaggccatctctaaagccacatctgagacgttggctgcagaccccacgccagctgccaccatcgttcacttcaaagtctctgcccagggaatcactctgactgacaaccagagaaagctctttttcagacgccactaccctctcaacactgtcaccttctgtgacctggatccacaggaaagaaagtggatgaaaacagagggtggtgcccctgctaagctcttcggcttcgtggcccggaagcagggcagcaccacggacaacgcctgccacctctttgctgagcttgaccccaaccagccggcctctgccatcgtcaacttcgtctccaaggtcatgctgaatgccggccaaaagagatgaaccctgccccttgcccagggccagtgccatggggaaggggcttgtggggaggggacccatgaatcctgaccactcttgaacccagaaggaggactttgggccaatttcggaggagagaagaaagtgcaacgtggggagagggaagtgaattgcagaggggagggggaaaagagagagagagagagagagagagagagagagaaagatggaggagaagaacttggattcccctgggtagatggaaactgcaaaaacccaaagcctccaaaactaaccaggtccacctaacaccccctccctcccctaagaagatggatgtcctcaaaagagaaggaacaaacctccttgggaatccacattttttgggggaatggaaaagctctgtctccctaactcaactgctttgcaaggggaaatcaagctgggagaatctttttctggccacctgtggggtaggttgtcaaaccaaacagagccaccgtgggacatcaagtggaagaacttgtttgcttgaaagtatctcagacccaaggcacctcaggtctctttgctgtgcctccactatattgtcgtgtgggtgtgtgtctgcacccacatcctcacacattgatctagatctgcctttatccactcgaattataaacagctcggcttgtccttgtcccatgtgtttgtagacacacatgcatactgtccaaagattagggttggtggtggcagtgcagcaggggagggacaaacaaccaagctatgggtgacagaggctctctcctggtgcctgcacctgcactctagtgaccctgggtgccgccagacccttctcttctacaaagaccccagcaggagtgggagggtctgcaatggcatcgccctgtcctgccttggccagaagcctggagctttggtttgaggaggtagagatatgtgtatccataggaagagatctgtcagaacaggcagctgttgagctcggggtgtcttccccaaggcatgtggctcagcagcaagaaagg

SEQ ID NO: 21974 - DNA, 6488 bp, Homo sapiens
  misc_feature 1..6488: note = ENST00000615025
  source 1..6488: mol_type = unassigned DNA; mol_type = unassigned DNA
aggctcactcgctgccttcttctgggggaaaccagcttcttgccagccacagctgctgcctccgccactggccaccgcccctgtcctgggagtcccttggcccagacacccacctgacttagtggctcctctgcaggaaaggtggctgccccctgcgttcctccatccaaccatgagctggtgcccatcaccactgagaatgcaccaaagaatgtagtggacaagggagaaggagcctcccggggtggaaacacacggaaaagcctcgaggacaacggctccaccagggtcaccccgagtgtccagccccacctccagcccatcagaaacatgagtgtgagccggaccatggaggacagctgtgagctggacctggtgtacgtcacagagaggatcatcgctgtctccttccccagcacagccaatgaggagaacttccggagcaacctccgtgaggtggcgcagatgctcaagtccaaacatggaggcaactacctgctgttcaacctctctgagcggagacctgacatcacgaagctccatgccaaggtactggaatttggctggcccgacctccacaccccagccctggagaagatctgcagcatctgtaaggccatggacacatggctcaatgcagaccctcacaatgtcgttgttctacacaacaagggaaaccgaggcaggataggagttgtcatcgcggcttacatgcactacagcaacatttctgccagtgcggaccaggctctggaccggtttgcaatgaagcggttctatgaggataagattgtgcccattggccagccatcccaaagaaggtacgtgcattacttcagtggcctgctctccggctccatcaaaatgaacaacaagcccttgtttctgcaccacgtgatcatgcacggcatccccaactttgagtctaaaggaggatgtcggccatttctccgcatctaccaggccatgcaacctgtgtacacatctggcatctacaacatcccaggagacagccagactagcgtctgcatcaccatcgagccaggactgctcttgaagggagacatcttgctgaagtgctaccacaagaagttccgaagcccagcccgagacgtcatcttccgtgtgcagttccacacctgtgccatccatgacctgggggttgtctttgggaaggaggaccttgatgatgctttcaaagatgatcgatttccagagtatggcaaagtggagtttgtattttcttatgggccagagaaaattcaaggcatggagcacctggagaacgggccgagcgtgtctgtggactataacacctccgaccccctcatccgctgggactcctacgacaacttcagtgggcatcgagatgacggcatggaggaggtggtgggacacacgcaggggccactagatgggagcctgtatgctaaggtgaagaagaaagactccctgcacggcagcaccggggctgttaatgccacacgtcctacactgtcggccacccccaaccacgtggaacacacgctttctgtgagcagcgactcgggcaactccacagcctccaccaagaccgacaagaccgacgagcctgtccccggggcctccagtgccactgctgccttgagtccccaggagaagcgggagctggaccgcctgctgagtggctttggcttagagcgagagaagcaaggcgccatgtaccacacccagcacctcaggtcccgcccagcagggggctcggctgtgccctcctctggacgccacgttgtcccagcccaggttcatgtcaatggtggggcgttagcatctgagcgggagacagacatcctggacgatgaattgccaaaccaggatggtcacagtgcgggcagcatgggcacactctcttctctggacggggtcaccaacaccagtgaggggggctacccagaggccctgtccccactgaccaacggtctggacaagtcctaccccatggagcctatggtcaatggaggaggctacccctacgagtctgccagccgggcggggcctgcccatgctggccacacggcccccatgcggccctcctactctgcacaggagggtttagctggctaccagagggaggggccccacccagcctggccacagccagtgaccacctcccactatgcccatgaccccagcggtatgttccgctctcaatccttttcggaagctgaaccccagctgcccccagctccggtccgagggggaagcagccgggaggctgtgcaaaggggactgaattcgtggcagcagcagcagcagcagcagcagcagcctcgcccacctccacgccagcaggaaagagcccacttggagagtcttgtagccagcaggcccagccctcagccattggcagagacccccatccccagtctccctgagttcccgcgagcagcctcccagcaggagattgaacagtccatcgaaacactcaatatgctgatgctggacctggagccagcctccgctgctgccccactacacaagtcccagagtgtccccggggcctggccaggggcttctccactctcctcccagcccctctctggatcctcccgtcagtcccatccactgacccagtccagatctggctatatccccagtgggcattcgttgggaacccctgagccagccccacgggcctctctggagtctgtccctcctggcaggtcttactcaccttatgactatcagccatgtttggctgggcctaaccaggatttccattcaaagagcccagcctcttcctccttgcctgccttccttccgaccacccacagccctccagggcctcagcaacccccagcctctctccctggcctcactgctcagcctctgctctcaccaaaggaagcgacttcagacccctcccggactccagaggaggagccattgaatttagaagggctggtggcccacagggtagcaggggtacaggctcgggagaagcagcctgcagagcccccagcccctctgcggaggcgggcggccagtgatggacagtatgagaaccagtctccagaagccacatcccctcgtagccctggggttcgctcccctgtccagtgtgtctccccggagctggctcttaccatcgctctcaatcctggagggcggcccaaagagccccatttgcacagctacaaggaggccttcgaggagatggagggaacctccccgagcagcccaccacccagtggggtgcggtcccccccgggtctggccaagacacccctgtctgctctgggcctgaaacctcacaacccagcggacatcctgttgcaccccacaggagagccccggagctatgtggagtctgtggcacggacagcggtggctggaccccgagctcaggactctgagcccaagagctttagtgctccagccacccaggcctatggccatgagatacccctgaggaacgggaccctgggtggctcctttgtctcccccagccccctctccaccagcagccccatcctcagtgctgacagcacttcagtggggagtttcccgtcgggagagagcagtgaccagggtccccggacgcccacccagcctctgttggagtctggcttccgctcaggcagcctgggacagcccagcccgtctgcccagagaaactaccagagctcttctcctctcccgactgtgggcagtagctacagcagccccgactactcacttcagcatttcagctcctctccggaaagccaggctcgagctcagttcagtgtggctggcgtccacacggtgcctgggagccctcaggcgcgccacagaacagtgggcaccaacactccccctagtcctggcttcggctggcgggccatcaatcccagcatggctgcccccagcagtcccagtttgagccatcaccagatgatgggtccaccaggcactggcttccatggtagcactgtctccagcccccagagcagtgcagcgaccaccccggggagccccagcctgtgtcggcacccagcaggggtctaccaggtttctggcctccacaacaaagtggccaccaccccggggagtcccagcctgggccggcaccctggggctcaccaaggcaacctggcctccggtcttcatagcaatgcaatagccagccctggaagccccagcctgggccgtcacctcggagggtctggatctgtggttcccggcagcccctgcttggaccggcatgtggcctatggtggctattctaccccggaggatcggagacccacactgtcccggcagagcagtgcctctggctaccaggctccttccacgccctccttccctgtctcccctgcctactaccctggcctgagcagccctgccacctccccgtcaccagactccgcagccttccggcaagggagcccaacaccagccttgccagagaagcgaaggatgtcagtgggagaccgggcaggcagcctccccaactatgccaccatcaatgggaaggtgtcttcgcctgtcgccagcggcatgtccagtcccagtgggggcagcaccgtctccttctcccacactctgcccgacttctccaagtactccatgccagacaacagcccggagacgcgggctaaagtgaagtttgtccaggacacttctaagtattggtacaagcctgagatctccagggagcaggccatcgcgctcctcaaggaccaggagccgggggccttcatcatccgcgacagtcactccttccgaggcgcgtacgggctggccatgaaggtgtcttcgccacctccaaccatcatgcagcagaataaaaaaggagacatgacccatgagctggtcaggcattttctgatagagactggccccagaggagtcaagctcaagggctgccccaatgagccaaacttcggatcgctgtctgccctggtctaccagcactccatcatcccattggccctgccttgcaagctggtcattccaaaccgagaccccacagatgaatcgaaagatagctccggccctgccaactcaactgcagacctgctgaaacaaggggcagcctgcaatgtgctcttcgtcaactctgtggacatggagtcactcactgggccacaggccatctctaaagccacatctgagacgttggctgcagaccccacgccagctgccaccatcgttcacttcaaagtctctgcccagggaatcactctgactgacaaccagagaaagctctttttcagacgccactaccctctcaacactgtcaccttctgtgacctggatccacaggaaagaaagtggatgaaaacagagggtggtgcccctgctaagctcttcggcttcgtggcccggaagcagggcagcaccacggacaacgcctgccacctctttgctgagcttgaccccaaccagccggcctctgccatcgtcaacttcgtctccaaggtcatgctgaatgccggccaaaagagatgaaccctgccccttgcccagggccagtgccatggggaaggggcttgtggggaggggacccatgaatcctgaccactcttgaacccagaaggaggactttgggccaatttcggaggagagaagaaagtgcaacgtggggagagggaagtgaattgcagaggggagggggaaaagagagagagagagagagagagagagagagagaaagatggaggagaagaacttggattcccctgggtagatggaaactgcaaaaacccaaagcctccaaaactaaccaggtccacctaacaccccctccctcccctaagaagatggatgtcctcaaaagagaaggaacaaacctccttgggaatccacattttttgggggaatggaaaagctctgtctccctaactcaactgctttgcaaggggaaatcaagctgggagaatctttttctggccacctgtggggtaggttgtcaaaccaaacagagccaccgtgggacatcaagtggaagaacttgtttgcttgaaagtatctcagacccaaggcacctcaggtctctttgctgtgcctccactatattgtcgtgtgggtgtgtgtctgcacccacatcctcacacattgatctagatctgcctttatccactcgaattataaacagctcggcttgtccttgtcccatgtgtttgtagacacacatgcatactgtccaaagattagggttggtggtggcagtgcagcaggggagggacaaacaaccaagctatgggtgacagaggctctctcctggtgcctgcacctgcactctagtgaccctgggtgccgccagacccttctcttctacaaagaccccagcaggagtgggagggtctgcaatggcatcgccctgtcctgccttggccagaagcctggagctttggtttgaggaggtagagatatgtgtatccataggaagagatctgtcagaacaggcagctgttgagctcggggtgtcttccccaaggcatgtggctcagcagcaagaaagg

SEQ ID NO: 21975 - DNA, 5070 bp, Homo sapiens
  misc_feature 1..5070: note = ENST00000428457
  source 1..5070: mol_type = unassigned DNA; mol_type = unassigned DNA
gattttctgtgccttggacccacaagacaggaagtggatcaaagatggcccttcctcaaagtaagttgctgagatttctttacattctctccttgtctgcagttgtactccaaagttgaattctcttccagatttgcacagggggtgccttataagaaaatgactacaccatgccaatttcttttaaaaaagaaaaaagtaaaagtgttctcattatggacaaggatctggatgctgttaacttttctgccggctgttggctggatgtgcaatatttacatgtgtcatataacactgtggcatagatacagggagatggatggcacagcctttttggccatttgggaatgcatgggctcagcagtgctgaggtctgcacagctagaaggaattgctccctttgtgcaggtgtgtggatgaagcgggtgttccaaatttaccaaatgcaacggaggagggccttcatcacaccgttgctccacagccagtccaggcagctgttagagtttttttttttttttgagacagagttttgctctttttgcccaggctggagtgcagtggcgcgatcttggctcactgcaacctctgcctcccgggttcaagcaattctcctgcctcagcctcccaaatagctgggattacaggcgtccgccaccaggcccagctaattttttgtatttagtagagacggggtttcaccatgttggtcaggctggtctcgaactcctgacctcaggtgatccacctgcctcagcctcccaaagtgccgggattaaaggtgtgagccaccgtgcccggcttagagttccccttttataagcacacctttccctggctccctgagtaccgtggccttgcttggcctgggctcattcctggcccagtgttcctgtcagggccagctgagggacctcatcctaacctcccacttggaggcacaatgggctgtatccccccagcctggtttcctcggcataacccggatttaatgaccacagtgcctgatcacaggcatccttccctggaatcctgttttcaaatggcttgtctgtccaggaagttgctcagtgcatgcgttagcagaagcggggagaaggagaagagaccctggtactgacgagctgggcttccccggtggggactgtgttctgggcacactcccactctggctggtagcagaaacacgggctttcatgtgcttggaatttgtgactgtattggggttacctgagtgtcattgactggtcccttcatgatgcggaaactgctaaatttaaacaaaaaaaatccttcatttttctaagaaagagaagaaagtcctttgcccaggacctggatagggatatggtcattattgtgtgaagtgcaggactcataaaagcctattaagataatggctctaattcttctaagaaaaataattcgatgggctgttctttttaaacagctccctgaagtctatgtagtttgtaatgcaggcttccaaggcctgagaggagcgcctagtgtatttccccttcggtcccagtgggtgggagtgtcgaagtccagacaggacttgcattctggcatcatctcaggagcccctgagtcccttgccactcgccttgcagactgtggtccagtatgtcaggactggggctcaggaatctgcagggacaggtgcccaggagattctggccctggcgtggggaagcatctatagaggaagttgagcctcagctttgattcaggtcctaacctggggctgtggacagggcactcacctctcagcctcagggtcctcactgcagagctagagtcagacatcccatctgtaggtctgtgaaggctggaggtaaagtgcatgaacaggtggccagcagggtgctgggcacgtggttgatttttgataggtgccacttaaaattcctcctgacagtgccgctggcagctggaggaagtagaagcttggtactttgtgggacactgaccactctgactggactttcctttggcagagtctttggatttgtggcccggaagcagggcagtgccacggataatgtgtgccacctgtttgcagagcatgaccctgagcagcctgccagtgccattgtcaacttcgtatcaaaggtcatgattggttccccaaagaaggtctgagaactcccctccctccctggacccaccgatgcctctcgaagccctggagacagccgttgggtgagggtggggcccccactttttaccaaactagtaaacctgacattccaggcccatgaggggaaagaggatcttccagctctgcaaaaacaagaacaaacaacatcaccgtgaattggcctttcctgaaagtgacttatctgacacatctctgtagccacatgctttttgggtagaagaagctgggcatgggtgcaccccaccccctagggtccccatgggaaagggacatgcaaggaaacagcacagaacacgaggtggtccccatgtccctggcacactagcattccgggggatgaggaatccccagcccttgaggcagaggtgccgagtgactgccatgcttcgcccgtccgcatgggcgcttctgtccagctgcacccgaggccgggggtttccctcacctcggtcttcccaagatggagatgctaacgaaactgagaagggggcgtatgtttgacgaaggtttgtgcaagtcaggcccttctggaacacagcagggcctacaacgaggggcctttgcgatgggctgtgaggatgggggtggtgggaagaattggccacgttggagaccccatgccaccccaccatggtgagtgctctgtgcctcctgctcacctgtggtgagctgggcgagctgggcgagctgggcgagctgggctggggagagcctgtgaggaccgagaggagaaatgagaagaaggaacaaaaatattatttctatgtaatttatattttacttatgccaaattatttatgataatttgccattgctatactgtaccagtgtcaaatgctgcagcctgccaagctgtgattttgtgaggcttgtccctatgtaggatgcaccgcaggcccctggccactgaaagagtgtgcagtggactgtgggtctcccatatgcggtgccgcccaaaggtggctttgcctcaagcaacctaccctgatgttttactcattggaatgtttttccccgattgtggatgacttcttttctgatggagagagtccaggagggatggaaaactcctggatttaagctcagcatcccccacatgggcttttcgatcatcttcaggcctgaagctgcacgacctgaagttcgcctgcatttatcagccctctttgtgctgctccttgccaccttggggttcctgctggggaccatgtgtggttgtggcatgtgtgagcagaagggaggatgaggaaaaagagaagaaaccccggtactgacaagctgtttttgagtgccactgtttgccatcatctaagccactgaatcaagtgtatttcaggcttatttcaacattccaatgccctggttttcctgcttgaatctgttcgtggtcaaaggtttgggggaatttgtgaccctggaacatccccagagtgaaagatggagctgggccacatcagaataaggccttggccccatcctctcacagcctaggtgctctgcaggcatgctgactgtcctgattgcgatccagcccgaaattccctcctctgctttcaaaagtcaaatcccccattcttaggccacactggtgtcacaagctcctgtcagggagctggggtttgggaatgtgctttgtgaactctgctttaaagtgaggggccgaggaaaacttagaaacaggcagagttggaagcagccaaatcacagtgggtgttgtgtgtgtgtgcgtgtgtgcatgcgtgcgtgtatgcgtgtgtgaaagcaggtggaccattccactttttagctcctattgatgcaccaaaccaagtgcctcatttctgtgccaaatgtttgccttggtcgttgtggacctccttctctaacttgcggtggcatgactgtcaggaggtgctggcattttcagcagatcctcatgtgttgaccctgatgtctttagcagaggcctctagcatctcggtttttcatccactgcaggaatgtggccacagggagcagaggtttgtactttccccaagaggtcctcatcctgagacggtctctacccatgtttaacccaaagagtgcaggccaggttccttatccttctgatgaaggatgagagagctcatttagaagtcagagcaaactagggtctcagtattgagaaacgcagcctgccagggaatcacagagacatcggggtgcccgcgatggccctcatgaagccatgcctcgacggcattcaggaagccctgcaaacgtgctttttgaactcattggccaggtgtgatttttacacaaggtaaacgtggtcaagggcatcggggaatttgctccaagcagatagctccctctgaggaaccaaaggaagcaagtttccacgatttctgaagagctggtataggaagtttctttcttccttttgtgttacatgtgcattaaacagaacaagctgtgtgtcatcacagattgtactgtgggctcagaaaccgtgagagagcccccaccgtggacaccggctctagggccacaggaaaaggaacgtttccaggcattttgtctccagggctcccgctggacaggcacgtactgccctggggagtaaatgcggagagttcacgaactgtgcccaacgcatgttatagccagggtcctactaactactcagtaaaagaacgtattgttgtattcctccagtgttaagctatagccatgttaaaagtcactgtgcatttattctcagcatcaaataccttgtaacgtcttctctgccttgttagtgcatatttttacttttctgatactgtaaagaatatatccagtatgtaaatgaatgttctataaatcttttgtatagtcattttctctgctccttaaatatcatctctattcagagtataataaaattatgaacttggtaa

SEQ ID NO: 21976 - DNA, 7618 bp, Homo sapiens
  misc_feature 1..7618: note = ENST00000311160
  source 1..7618: mol_type = unassigned DNA; mol_type = unassigned DNA
agccagccaggaggacgggcccgcccgcgcgctactcggagcccagcctcgttgcggccatcgccctgccggaccgcgcctcaggctcccccagccggaagaattaacctcgagtctgcacgcttttaagaacaaggcctttaaaaaatccaaagtgtgtggagtttgcaaacaaattattgacggtcaaggtatttcatgccgagcctgcaagtattcctgccacaagaaatgtgaagccaaggtggtgattccctgcggtgtgcaagtccgactggaacaggctccagggagttccacgctgtccagttctctctgccgtgataaacctctgcggcccgtcatcctgagtcccaccatggaggagggccatgggctggacctcacttacatcacggagcgcatcatcgctgtgtccttccctgccggctgctctgaggagtcctacctgcacaacctacaggaggtcacgcgcatgctcaagtccaagcacggggacaactacctggtattaaacctttcagaaaagagatatgaccttacgaagcttaacccaaagatcatggatgtgggctggccagagctccacgcaccgcccctggataagatgtgtaccatatgcaaggcgcaggagtcctggctgaacagcaacctccagcatgtggtcgtcattcactgcaggggcgggaaaggacgcataggagtggtcatatcatcctacatgcatttcaccaacgtctcagccagcgccgaccaggcccttgacaggtttgcaatgaagaagttttatgatgacaaagtttcagctttaatgcagccttcccaaaaacggtatgttcagttcctcagtgggctcctgtccggatcggtgaaaatgaatgcctctcccctgttcctgcattttgtcatcctccacggcacccccaacttcgacacaggtggagtgtgccggccctttctgaagctctaccaagccatgcagcctgtgtacacctccgggatctacaacgttggcccagaaaaccccagcaggatctgcatcgtcatcgagccggcccagcttctgaagggagatgtcatggtgaaatgctaccacaagaaataccgctcggccacccgtgacgtcattttccgcctgcagtttcacactggggctgtgcagggctacgggctggtgtttgggaaggaggatctggacaatgccagcaaagatgaccgttttcctgactatgggaaggttgaattagtcttctctgccacgcctgagaagattcaagggtccgaacacttgtacaacgaccacggtgtgattgtggactacaacacaacagacccactgatacgctgggactcgtacgagaacctcagtgcagatggagaagtgctacacacgcagggccctgtcgatggcagcctttacgcgaaggtgaggaagaaaagctcctcggatcctggcatcccaggtggcccccaggcaatcccggccaccaacagcccagaccacagtgaccacaccttgtctgtcagcagtgactccggccactctacagcctctgccaggacggataagacggaagagcgcctggccccaggaaccaggaggggcctgagtgcccaggagaaggcagagttggaccagctgctcagtggctttggcctggaagatcctggaagctccctcaaggaaatgactgatgctcgaagcaagtacagtgggacccgccacgtggtgccagcccaggttcacgtgaatggagacgctgctctgaaggatcgggagacagacattctggatgacgagatgccccaccacgacctgcacagtgtggacagccttgggaccctgtcctcctcggaagggcctcagtcggcccacctgggtcccttcacctgccacaagagcagccagaactcactcctatctgacggttttggcagcaacgttggtgaagatccgcagggcaccctcgttccggacctgggccttggcatggacggcccctatgagcgggagcggacttttgggagtcgagagcccaagcagccccagcccctgctgagaaagccctcagtgtccgcccagatgcaggcctatgggcagagcagctactccacacagacctgggtgcgccagcagcagatggttgtagctcaccagtatagcttcgccccagatggggaggcccggctggtgagccgctgccctgcagacaatcctggcctcgtccaggcccagcccagagtgccactcacccccacccgagggaccagcagtagggtggctgtccagaggggtgtaggcagtgggccacatccccctgacacacagcagccctctcccagcaaagcgttcaaacccaggtttccaggagaccaggttgtgaatggagccggcccagagctgagcacaggcccctccccaggctcgcccaccctggacatcgaccagtccatcgagcagctcaacaggctgatcctggagctggatcccaccttcgagcccatccctacccacatgaacgccctcggtagccaggccaatggctctgtgtctccagacagcgtgggaggtgggctccgggcaagcagcaggctgcctgacacaggagagggccccagcagggccaccgggcggcaaggctcctctgctgaacagcccctgggcgggagactcaggaagctgagcctggggcagtacgacaacgatgctggggggcagctgcccttctccaaatgtgcatggggaaaggctggtgtggactatgccccaaacctgccgccattcccctcaccagcggacgtcaaagagacgatgacccctggctatccccaggacctcgatattatcgatggcagaattttaagtagcaaggagtccatgtgttcaactccagcatttcctgtgtctccagagacaccgtatgtgaaaacagcgctgcgccatcctccgttcagcccacctgagcccccgctgagcagcccagccagtcagcacaaaggaggacgtgaaccacgaagctgccctgagacgctcactcacgctgtggggatgtcagagagccccatcggacccaaatccacgatgctccgggctgatgcgtcctcgacgccctcctttcagcaggcttttgcttcttcctgcaccatttccagcaacggccctgggcagaggagagagagctcctcttctgcagaacgccagtgggtggagagcagccccaagcccatggtttccctgctggggagcggccggcccaccggaagtcccctcagcgctgagttctccggtaccaggaaggactccccagtgctgtcctgcttcccgccgtcagagctccaggctcctttccacagccatgagctgtccctagcagagccaccggactccctggcgcctcccagcagccaggccttcctgggcttcggcaccgccccagtgggaagtggccttccgcccgaggaggacctgggggccttgctggccaattctcatggagcgtcaccgacccccagcatcccgctgacagcgacaggggctgccgacaatggcttcctgtcccacaactttctcacggtggcgcctggacacagcagccaccacagtccaggcctgcagggccagggtgtgaccctgcccgggcagccacccctccctgagaagaagcgggcctcggagggggatcgttctttgggctcagtctctccctcctccagtggcttctccagcccgcacagcgggagcaccatcagtatccccttcccaaatgtccttcccgacttttccaaggcttcagaagcggcctcacctctgccagatagtccaggtgataaacttgtgatcgtgaaatttgttcaagacacttccaagttctggtacaaggcggatatttcaagagaacaagccatcgccatgttgaaggacaaggagccgggctcattcattgttcgagacagccattccttccgaggggcctatggcctggccatgaaggtggccacgcccccaccttcagtcctgcagctgaacaagaaagctggagatttggccaatgaactcgtccggcactttttgatcgagtgtaccccgaagggagtgcggttgaaagggtgctcgaatgaaccatatttcgggagcctgacggccttggtgtgccagcattccatcacgcccttggccttgccgtgcaagctgcttatcccagagagagatccattggaggaaatagcagaaagttctccccagacggcagccaattcagcagctgagctgttgaagcagggggcagcctgcaatgtgtggtacttgaactctgtggagatggagtccctcaccggccaccaggcgatccagaaggccctgagcatcaccctggtccaggagcctccacctgtgtccacagttgtgcacttcaaggtgtcagcccagggcatcaccctgacagacaatcagaggaagctcttcttccggaggcattaccccgtgaacagtgtgattttctgtgccttggacccacaagacaggaagtggatcaaagatggcccttcctcaaaagtctttggatttgtggcccggaagcagggcagtgccacggataatgtgtgccacctgtttgcagagcatgaccctgagcagcctgccagtgccattgtcaacttcgtatcaaaggtcatgattggttccccaaagaaggtctgagaactcccctccctccctggacccaccgatgcctctcgaagccctggagacagccgttgggtgagggtggggcccccactttttaccaaactagtaaacctgacattccaggcccatgaggggaaagaggatcttccagctctgcaaaaacaagaacaaacaacatcaccgtgaattggcctttcctgaaagtgacttatctgacacatctctgtagccacatgctttttgggtagaagaagctgggcatgggtgcaccccaccccctagggtccccatgggaaagggacatgcaaggaaacagcacagaacacgaggtggtccccatgtccctggcacactagcattccgggggatgaggaatccccagcccttgaggcagaggtgccgagtgactgccatgcttcgcccgtccgcatgggcgcttctgtccagctgcacccgaggccgggggtttccctcacctcggtcttcccaagatggagatgctaacgaaactgagaagggggcgtatgtttgacgaaggtttgtgcaagtcaggcccttctggaacacagcagggcctacaacgaggggcctttgcgatgggctgtgaggatgggggtggtgggaagaattggccacgttggagaccccatgccaccccaccatggtgagtgctctgtgcctcctgctcacctgtggtgagctgggcgagctgggcgagctgggcgagctgggctggggagagcctgtgaggaccgagaggagaaatgagaagaaggaacaaaaatattatttctatgtaatttatattttacttatgccaaattatttatgataatttgccattgctatactgtaccagtgtcaaatgctgcagcctgccaagctgtgattttgtgaggcttgtccctatgtaggatgcaccgcaggcccctggccactgaaagagtgtgcagtggactgtgggtctcccatatgcggtgccgcccaaaggtggctttgcctcaagcaacctaccctgatgttttactcattggaatgtttttccccgattgtggatgacttcttttctgatggagagagtccaggagggatggaaaactcctggatttaagctcagcatcccccacatgggcttttcgatcatcttcaggcctgaagctgcacgacctgaagttcgcctgcatttatcagccctctttgtgctgctccttgccaccttggggttcctgctggggaccatgtgtggttgtggcatgtgtgagcagaagggaggatgaggaaaaagagaagaaaccccggtactgacaagctgtttttgagtgccactgtttgccatcatctaagccactgaatcaagtgtatttcaggcttatttcaacattccaatgccctggttttcctgcttgaatctgttcgtggtcaaaggtttgggggaatttgtgaccctggaacatccccagagtgaaagatggagctgggccacatcagaataaggccttggccccatcctctcacagcctaggtgctctgcaggcatgctgactgtcctgattgcgatccagcccgaaattccctcctctgctttcaaaagtcaaatcccccattcttaggccacactggtgtcacaagctcctgtcagggagctggggtttgggaatgtgctttgtgaactctgctttaaagtgaggggccgaggaaaacttagaaacaggcagagttggaagcagccaaatcacagtgggtgttgtgtgtgtgtgcgtgtgtgcatgcgtgcgtgtatgcgtgtgtgaaagcaggtggaccattccactttttagctcctattgatgcaccaaaccaagtgcctcatttctgtgccaaatgtttgccttggtcgttgtggacctccttctctaacttgcggtggcatgactgtcaggaggtgctggcattttcagcagatcctcatgtgttgaccctgatgtctttagcagaggcctctagcatctcggtttttcatccactgcaggaatgtggccacagggagcagaggtttgtactttccccaagaggtcctcatcctgagacggtctctacccatgtttaacccaaagagtgcaggccaggttccttatccttctgatgaaggatgagagagctcatttagaagtcagagcaaactagggtctcagtattgagaaacgcagcctgccagggaatcacagagacatcggggtgcccgcgatggccctcatgaagccatgcctcgacggcattcaggaagccctgcaaacgtgctttttgaactcattggccaggtgtgatttttacacaaggtaaacgtggtcaagggcatcggggaatttgctccaagcagatagctccctctgaggaaccaaaggaagcaagtttccacgatttctgaagagctggtataggaagtttctttcttccttttgtgttacatgtgcattaaacagaacaagctgtgtgtcatcacagattgtactgtgggctcagaaaccgtgagagagcccccaccgtggacaccggctctagggccacaggaaaaggaacgtttccaggcattttgtctccagggctcccgctggacaggcacgtactgccctggggagtaaatgcggagagttcacgaactgtgcccaacgcatgttatagccagggtcctactaactactcagtaaaagaacgtattgttgtattcctccagtgttaagctatagccatgttaaaagtcactgtgcatttattctcagcatcaaataccttgtaacgtcttctctgccttgttagtgcatatttttacttttctgatactgtaaagaatatatccagtatgtaaatgaatgttctataaatcttttgtatagtcattttctctgctccttaaatatcatctctattcagagtataataaaattatgaacttggtaa

SEQ ID NO: 21977 - DNA, 3836 bp, Homo sapiens
  misc_feature 1..3836: note = ENST00000457718
  source 1..3836: mol_type = unassigned DNA; mol_type = unassigned DNA
cgcgactcccactaggctatgagctacaggagggagggtaggtcttgctcccggagagcaccttaatcacaggcgctgaatgaaagaatgaactggttgtgcaggaaccaggatccgaacccgcctccccagccggaagaattaacctcgagtctgcacgcttttaagaacaaggcctttaaaaaatccaaagtgtgtggagtttgcaaacaaattattgacggtcaaggtatttcatgccgagcctgcaagtattcctgccacaagaaatgtgaagccaaggtggtgattccctgcggtgtgcaagtccgactggaacaggctccagggagttccacgctgtccagttctctctgccgtgataaacctctgcggcccgtcatcctgagtcccaccatggaggagggccatgggctggacctcacttacatcacggagcgcatcatcgctgtgtccttccctgccggctgctctgaggagtcctacctgcacaacctacaggaggtcacgcgcatgctcaagtccaagcacggggacaactacctggtattaaacctttcagaaaagagatatgaccttacgaagcttaacccaaagatcatggatgtgggctggccagagctccacgcaccgcccctggataagatgtgtaccatatgcaaggcgcaggagtcctggctgaacagcaacctccagcatgtggtcgtcattcactgcaggggcgggaaaggacgcataggagtggtcatatcatcctacatgcatttcaccaacgtctcagccagcgccgaccaggcccttgacaggtttgcaatgaagaagttttatgatgacaaagtttcagctttaatgcagccttcccaaaaacggtatgttcagttcctcagtgggctcctgtccggatcggtgaaaatgaatgcctctcccctgttcctgcattttgtcatcctccacggcacccccaacttcgacacaggtggagtgtgccggccctttctgaagctctaccaagccatgcagcctgtgtacacctccgggatctacaacgttggcccagaaaaccccagcaggatctgcatcgtcatcgagccggcccagcttctgaagggagatgtcatggtgaaatgctaccacaagaaataccgctcggccacccgtgacgtcattttccgcctgcagtttcacactggggctgtgcagggctacgggctggtgtttgggaaggaggatctggacaatgccagcaaagatgaccgttttcctgactatgggaaggttgaattagtcttctctgccacgcctgagaagattcaagggtccgaacacttgtacaacgaccacggtgtgattgtggactacaacacaacagacccactgatacgctgggactcgtacgagaacctcagtgcagatggagaagtgctacacacgcagggccctgtcgatggcagcctttacgcgaaggtgaggaagaaaagctcctcggatcctggcatcccaggtggcccccaggcaatcccggccaccaacagcccagaccacagtgaccacaccttgtctgtcagcagtgactccggccactctacagcctctgccaggacggataagacggaagagcgcctggccccaggaaccaggaggggcctgagtgcccaggagaaggcagagttggaccagctgctcagtggctttggcctggaagatcctggaagctccctcaaggaaatgactgatgctcgaagcaagtacagtgggacccgccacgtggtgccagcccaggttcacgtgaatggagacgctgctctgaaggatcgggagacagacattctggatgacgagatgccccaccacgacctgcacagtgtggacagccttgggaccctgtcctcctcggaagggcctcagtcggcccacctgggtcccttcacctgccacaagagcagccagaactcactcctatctgacggttttggcagcaacgttggtgaagatccgcagggcaccctcgttccggacctgggccttggcatggacggcccctatgagcgggagcggacttttgggagtcgagagcccaagcagccccagcccctgctgagaaagccctcagtgtccgcccagatgcaggcctatgggcagagcagctactccacacagacctgggtgcgccagcagcagatggttgtagctcaccagtatagcttcgccccagatggggaggcccggctggtgagccgctgccctgcagacaatcctggcctcgtccaggcccagcccagagtgccactcacccccacccgagggaccagcagtagggtggctgtccagaggggtgtaggcagtgggccacatccccctgacacacagcagccctctcccagcaaagcgttcaaacccaggtttccaggagaccaggttgtgaatggagccggcccagagctgagcacaggcccctccccaggctcgcccaccctggacatcgaccagtccatcgagcagctcaacaggctgatcctggagctggatcccaccttcgagcccatccctacccacatgaacgccctcggtagccaggccaatggctctgtgtctccagacagcgtgggaggtgggctccgggcaagcagcaggctgcctgacacaggagagggccccagcagggccaccgggcggcaaggctcctctgctgaacagcccctgggcgggagactcaggaagctgagcctggggcagtacgacaacgatgctggggggcagctgcccttctccaaatgtgcatggggaaaggctggtgtggactatgccccaaacctgccgccattcccctcaccagcggacgtcaaagagacgatgacccctggctatccccaggacctcgatattatcgatggcagaattttaagtagcaaggagtccatgtgttcaactccagcatttcctgtgtctccagagacaccgtatgtgaaaacagcgctgcgccatcctccgttcagcccacctgagcccccgctgagcagcccagccagtcagcacaaaggaggacgtgaaccacgaagctgccctgagacgctcactcacgctgtggggatgtcagagagccccatcggacccaaatccacgatgctccgggctgatgcgtcctcgacgccctcctttcagcaggcttttgcttcttcctgcaccatttccagcaacggccctgggcagaggagagagagctcctcttctgcagaacgccagtgggtggagagcagccccaagcccatggtttccctgctggggagcggccggcccaccggaagtcccctcagcgctgagttctccggtaccaggaaggactccccagtgctgtcctgcttcccgccgtcagagctccaggctcctttccacagccatgagctgtccctagcagagccaccggactccctggcgcctcccagcagccaggccttcctgggcttcggcaccgccccagtgggaagtggccttccgcccgaggaggacctgggggccttgctggccaattctcatggagcgtcaccgacccccagcatcccgctgacagcgacaggggctgccgacaatggcttcctgtcccacaactttctcacggtggcgcctggacacagcagccaccacagtccaggcctgcagggccagggtgtgaccctgcccgggcagccacccctccctgagaagaagcgggcctcggagggggatcgttctttgggctcagtctctccctcctccagtggcttctccagcccgcacagcgggagcaccatcagtatccccttcccaaatgtccttcccgacttttccaaggcttcagaagc

SEQ ID NO: 21978 - DNA, 1832 bp, Homo sapiens
  misc_feature 1..1832: note = ENST00000450444
  source 1..1832: mol_type = unassigned DNA
caataaaaagccaccttcaaccatttgccttccactctggcttgcataggcagtgggctggcctgtgctcctggccgttgttcctgggtggaccccagagagtatgaatcctggtactcaggttggaggagttttatcctgctgggggctatctgttcattgctgaattcagatttctttggccggttcctgtgggcaccatgccggaagaattaacctcgagtctgcacgcttttaagaacaaggcctttaaaaaatccaaagtgtgtggagtttgcaaacaaattattgacggtcaaggtatttcatgccgagcctgcaagtattcctgccacaagaaatgtgaagccaaggtggtgattccctgcggtgtgcaagtccgactggaacaggctccagggagttccacgctgtccagttctctctgccgtgataaacctctgcggcccgtcatcctgagtcccaccatggaggagggccatgggctggacctcacttacatcacggagcgcatcatcgctgtgtccttccctgccggctgctctgaggagtcctacctgcacaacctacaggaggtcacgcgcatgctcaagtccaagcacggggacaactacctggtattaaacctttcagaaaagagatatgaccttacgaagcttaacccaaagatcatggatgtgggctggccagagctccacgcaccgcccctggataagatgtgtaccatatgcaaggcgcaggagtcctggctgaacagcaacctccagcatgtggtcgtcattcactgcaggggcgggaaaggacgcataggagtggtcatatcatcctacatgcatttcaccaacgtctcagccagcgccgaccaggcccttgacaggtttgcaatgaagaagttttatgatgacaaagtttcagctttaatgcagccttcccaaaaacggtatgttcagttcctcagtgggctcctgtccggatcggtgaaaatgaatgcctctcccctgttcctgcattttgtcatcctccacggcacccccaacttcgacacaggtggagtgtgccggccctttctgaagctctaccaagccatgcagcctgtgtacacctccgggatctacaacgttggcccagaaaaccccagcaggatctgcatcgtcatcgagccggcccagcttctgaagggagatgtcatggtgaaatgctaccacaagaaataccgctcggccacccgtgacgtcattttccgcctgcagtttcacactggggctgtgcagggctacgggctggtgtttgggaaggaggatctggacaatgccagcaaagatgaccgttttcctgactatgggaaggttgaattagtcttctctgccacgcctgagaagattcaagggtccgaacacttgtacaacgaccacggtgtgattgtggactacaacacaacagacccactgatacgctgggactcgtacgagaacctcagtgcagatggagaagtgctacacacgcagggccctgtcgatggcagcctttacgcgaaggtgaggaagaaaagctcctcggatcctggcatcccaggtggcccccaggcaatcccggccaccaacagcccagaccacagtgaccacaccttgtctgtcagcagtgactccggccactctacagcctctgccaggacggataagacggaagagcgcctggccccaggaaccaggaggggcctgagtgcccaggagaaggcagagttggaccagctgctcagtggctttggcctggaagatcctggaagctccctcaaggaaatgactgatgctcgaagcaagtacagtgggacccgc

SEQ ID NO: 21979 - DNA, 584 bp, Homo sapiens
  misc_feature 1..584: note = ENST00000469470
  source 1..584: mol_type = unassigned DNA; mol_type = unassigned DNA
agccttaggagtatttgaaagcttgtgctgtgaaaaataggaatcttacaggagaatcatatggggcctggagaggaacctgtttgggacaggccgattcccatctcctgccactctgtacctcctgggcaccgtggcctgccttctcctcccttctggtgaaatgctaccacaagaaataccgctcggccacccgtgacgtcattttccgcctgcagtttcacactggggctgtgcagggctacgggctggtgtttgggaaggaggatctggacaatgccagcaaagatgaccgttttcctgactatgggaaggttgaattagtcttctctgccacgcctgagaagattcaagggtccgaacacttgtacaacgaccacggtgtgattgtggactacaacacaacagacccactgatacgctgggactcgtacgagaacctcagtgcagatggagaagtgctacacacgcagggccctgtcgatggcagcctttacgcgaaggtgaggaagaaaagctcctcggatcctggcatcccaggtggcccccaggcaatcccggccaccaacagcccagaccacagt

SEQ ID NO: 21980 - DNA, 357 bp, Homo sapiens
  misc_feature 1..357: note = ENST00000485555
  source 1..357: mol_type = unassigned DNA; mol_type = unassigned DNA
gggaaggttgaattagtcttctctgccacgcctgagaagattcaagggtccgaacacttgtacaacgaccacggtgtgattgtggactacaacacaacagacccactgatacgctgggactcgtacgagaacctcagtgcagatggagaaggtgcgtgtgttcatcttgtgtgcagttatggaggcaaagggcacagggaagacagcccactcaaatatctgaagtattttgcagtctgctaagaagaaaaaatttcccctgttttctcagaggtccagaatcacaccttcgtgtgacacagttgtgagttttgagggtcttcgtgagaataaggcatggtgagtttgggtcagggc

SEQ ID NO: 21981 - DNA, 1166 bp, Homo sapiens
  misc_feature 1..1166: note = ENST00000442536
  source 1..1166: mol_type = unassigned DNA; mol_type = unassigned DNA
agaatgggaaactgccttgggagaagccccaagtgagcccaagggcgcagagcagaaggaccctggagtgtaagagcctagattgcaagcctggcaggaggagccggaagaattaacctcgagtctgcacgcttttaagaacaaggcctttaaaaaatccaaagtgtgtggagtttgcaaacaaattattgacggtcaaggtatttcatgccgagcctgcaagtattcctgccacaagaaatgtgaagccaaggtggtgattccctgcggtgtgcaagtccgactggaacaggctccagggagttccacgctgtccagttctctctgccgtgataaacctctgcggcccgtcatcctgagtcccaccatggaggagggccatgggctggacctcacttacatcacggagcgcatcatcgctgtgtccttccctgccggctgctctgaggagtcctacctgcacaacctacaggaggtcacgcgcatgctcaagtccaagcacggggacaactacctggtattaaacctttcagaaaagagatatgaccttacgaagcttaacccaaagatcatggatgtgggctggccagagctccacgcaccgcccctggataagatgtgtaccatatgcaaggcgcaggagtcctggctgaacagcaacctccagcatgtggtcgtcattcactgcaggggcgggaaaggacgcataggagtggtcatatcatcctacatgcatttcaccaacgtctcagccagcgccgaccaggcccttgacaggtttgcaatgaagaagttttatgatgacaaagtttcagctttaatgcagccttcccaaaaacggtatgttcagttcctcagtgggctcctgtccggatcggtgaaaatgaatgcctctcccctgttcctgcattttgtcatcctccacggcacccccaacttcgacacaggtggagtgtgccggccctttctgaagctctaccaagccatgcagcctgtgtacacctccgggatctacaacgttggcccagaaaaccccagcaggatctgcatcgtcatcgagccggcccagcttctgaagggagatgtcatggtcatgaattacaatattgcgaacatctgaagtcattttcagctccaagtgaagaaatcatggtgaaatgctacca

SEQ ID NO: 21982 - DNA, 570 bp, Homo sapiens
  misc_feature 1..570: note = ENST00000415929
  source 1..570: mol_type = unassigned DNA; mol_type = unassigned DNA
ttgtcagtcttgatctgctacagctttgtagccagagtgaggtggtgattccctgcggtgtgcaagtccgactggaacaggctccagggagttccacgctgtccagttctctctgccgtgataaacctctgcggcccgtcatcctgagtcccaccatggaggagggccatgggctggacctcacttacatcacggagcgcatcatcgctgtgtccttccctgccggctgctctgaggagtcctacctgcacaacctacaggaggtcacgcgcatgctcaagtccaagcacggggacaactacctggtattaaacctttcagaaaagagatatgaccttacgaagcttaacccaaagatcatggatgtgggctggccagagctccacgcaccgcccctggataagatgtgtaccatatgcaaggcgcaggagtcctggctgaacagcaacctccagcatgtggtcgtcattcactgcaggggcgggaaaggacgcataggagtggtcatatcatcctacatgcatttcaccaacgtctcagccagcgccgaccaggcccttgacaggtttg

SEQ ID NO: 21983 - DNA, 698 bp, Homo sapiens
  misc_feature 1..698: note = ENST00000413551
  source 1..698: mol_type = unassigned DNA; mol_type = unassigned DNA
aggctggccctcagccccgggcggacattgtcctgtgagctccatgcctgcgtgctcaccgtggggccgggcacacctgccagctgctcctggctgtggttctggggactcccacactcaccaggctctcccacctggtgggctattccagctgcctcctttatgcccagagctgccgagacattaacacgaagaggggtgtgcttgactaaagcaggggaaggagcgaaacgtaggaggagctgtttctggaagggaaaagcagccctggccggtggtccctgcccaggcccagcacagctccagggagttccacgctgtccagttctctctgccgtgataaacctctgcggcccgtcatcctgagtcccaccatggaggagggccatgggctggacctcacttacatcacggagcgcatcatcgctgtgtccttccctgccggctgctctgaggagtcctacctgcacaacctacaggaggtcacgcgcatgctcaagtccaagcacggggacaactacctggtattaaacctttcagaaaagagatatgaccttacgaagcttaacccaaagatcatggatgtgggctggccagagctccacgcaccgcccctggataagatgtgtaccatatgcaaggcgcaggagtcctggctgaacagcaacctccagcatgtggtcgtcattcactgcagg

SEQ ID NO: 21984 - DNA, 560 bp, Homo sapiens
  misc_feature 1..560: note = ENST00000434451
  source 1..560: mol_type = unassigned DNA; mol_type = unassigned DNA
ccactcgagtgggacccgtggcgcccgggcgccctggactgagggcagagaccggagcagctatgtcgcagtcgctgtcgggaccgagcggactttgctccctaggactccgtctcgagactccaggtggagagcgcagctaggggcttcaatgggcaggctcaagacccttctcctactttttctaggacttgtccaaggtggatctgagcctcctcatgtgctccaggcagagatcaggattcggatgcatcaccaactggtggaagatggggactaggcaccctgcacaccctgcacagccggaagaattaacctcgagtctgcacgcttttaagaacaaggcctttaaaaaatccaaagtgtgtggagtttgcaaacaaattattgacggtcaaggtatttcatgccgagcctgcaagtattcctgccacaagaaatgtgaagccaaggtggtgattccctgcggtgtgcaagtccgactggaacaggctccagggagttccacgctgtccagttctctctgccgtgataaacctctgcggcccgtcatcctgagt

SEQ ID NO: 21985 - DNA, 775 bp, Homo sapiens
  misc_feature 1..775: note = ENST00000474346
  source 1..775: mol_type = unassigned DNA; mol_type = unassigned DNA
gcctcgttgcggccatcgccctgccggaccgcgcctcaggctcccccaggaggtgttgctgaaggggatagcagagacctgaggaggaggcagtatggcaagaacagtgagtggaagggctgacctaccatttggcagtcgcagcttatatctgcttaggactctacacaaggacccattttacagatgagtaaaataccaagtaaattcttaaagtctgggaacagttagggatctgaatgagcccagttctctgactctatgtgccccattcctttcttaagatcagcctgttgtaaaccacccctgttcaggggaagcctcttgttccctccctgtgtccctgtgtatgaacttgagagggggaggaactttccaccttcctgagggcagaaagcattgtttagatccctgccacttactaggaagccagagacatttgctgagtgcctcagcagcacgcttagaattgaggcttcgaggcttcctcacagcggcccccatagatttcccagggaggggcctcctgtcttgcgggttgatctggtgggtttgccccatgcagcaggagctatcatgggaagggtgggtctgggcgtctgaagctctccaggaggtcagctgaccctgggaccccgggtccttcctgtaggaccccagaaatcactggggaatcagctaacccctgcaagctgtgcctggaatgacctagagccagtcctgtctacctagaatcctctgctgctatccttgttgatctagaatgagggatgct

SEQ ID NO: 21986 - DNA, 1156 bp, Homo sapiens
  misc_feature 1..1156: note = ENST00000458317
  source 1..1156: mol_type = unassigned DNA; mol_type = unassigned DNA
agaatgggaaactgccttgggagaagccccaagtgagcccaagggcgcagagcagaaggaccctggagtgtaagagcctagattgcaagcctggcaggaggagccggaagaattaacctcgagtctgcacgcttttaagaacaaggcctttaaaaaatccaaagtgtgtggagtttgcaaacaaattattgacggtcaaggtatttcatgccgagcctgcaagtattcctgccacaagaaatgtgaagccaaggtggtgattccctgcggtgtgcaagtccgactggaacaggctccagggagttccacgctgtccagttctctctgccgtgataaacctctgcggcccgtcatcctgagtcccaccatggaggagggccatgggctggacctcacttacatcacggagcgcatcatcgctgtgtccttccctgccggctgctctgaggagtcctacctgcacaacctacaggaggtcacgcgcatgctcaagtccaagcacggggacaactacctggtattaaacctttcagaaaagagatatgaccttacgaagcttaacccaaagatcatggatgtgggctggccagagctccacgcaccgcccctggataagatgtgtaccatatgcaaggcgcaggagtcctggctgaacagcaacctccagcatgtggtcgtcattcactgcaggggcgggaaaggacgcataggagtggtcatatcatcctacatgcatttcaccaacgtctcagccagcgccgaccaggcccttgacaggtttgcaatgaagaagttttatgatgacaaagtttcagctttaatgcagccttcccaaaaacggtatgttcagttcctcagtgggctcctgtccggatcggtgaaaatgaatgcctctcccctgttcctgcattttgtcatcctccacggcacccccaacttcgacacaggtggagtgtgccggccctttctgaagctctaccaagccatgcagcctgtgtacacctccgggatctacaacgttggcccagaaaaccccagcaggatctgcatcgtcatcgagccggcccagcttctgaagggagatgtcatggtcatgaattacaatattgcgaacatctgaagtcattttcagctccaagtgaagaaatcatggtta

SEQ ID NO: 21987 - DNA, 2229 bp, Homo sapiens
  misc_feature 1..2229: note = ENST00000499247
  source 1..2229: mol_type = unassigned DNA; mol_type = unassigned DNA
gaagctctggcccggcgtgtagcgggcgcactacggggacgctgggccgggcaccgggctgtgtggagaagtgagcgcgctcgtctgacccccgtgcccgccaccccgagccactaacggcgatctcccaaggcctgcccgaggcctctgtcctctgtcctcagccccgcagcggcaacgtcttgcactcggcgagctcgccgctcccgaccctcccgcgcccccgccctgccgcgctgctccccgcccagccgcgggtctgtggtccaagccgccccgaagcagcccgaacaagatcactcaaggtgaaggataatctactaataccagcactttgaatgaaaatttgtttctctgccacaaactgaacatcttttttttttttttttttttttggtgggggagttgaaacctaattttgtggcgtagcagctatgcagcttgaaatccaagtagcactaaattttattatttcgtatttgtacaataagcttcccaggagacgtgtcaacatttttggtgaagaacttgaaagacttcttaagaagaaatatgaagggcactggtatcctgaaaagccatacaaaggatcggggtttagatgtatacacataggggagaaagtggacccagtgattgaacaagcatccaaagagagtggtttggacattgatgatgttcgtggcaatctgccacaggatcttagtgtttggatcgacccatttgaggtttcttaccaaattggtgaaaagggaccagtgaaggtgctttacgtggatgataataatgaaaatggatgtgagttggataaggagatcaaaaacagctttaacccagaggcccaggtttttatgcccataagtgacccagcctcatcagtgtccagctctccatcgcctccttttggtcactctgctgctgtaagccctaccttcatgccccggtccactcagcctttaacctttaccactgccacttttgctgccaccaagttcggctctaccaaaatgaagaatagtggccgtagcaacaaggttgcacgtacttctcccatcaacctcggcttgaatgtgaatgacctcttgaagcagaaagccatctcttcctcaatgcactctctgtatgggcttggcttgggtagccagcagcagccacagcaacagcagcagccagcccagccgccaccgccaccaccaccaccacagcagcaacaacagcagaaaacctctgctctttctcctaatgccaaggaatttatttttcctaatatgcagggtcaaggtagtagtaccaatggaatgttcccaggtgacagcccccttaacctcagtcctctccagtacagtaatgcctttgatgtgtttgcagcctatggaggcctcaatgagaaatcttttgtagatggcttgaattttagcttaaataacatgcagtattctaaccagcaattccagcctgttatggctaactaaaaaaaagaaaatgtatcgtacaagttaaaatgcacgggcccaagggggattttttttttcacctccttgagaatttttttttttaagcttatagtaaggatacattcaagcttggttaaaaaaataataataaaacatgcatcatttttcatttgccaaccaagcacaaagttattttatactgactgtatattttaaagtatactctcagatatggcctcttacagtatttaagatatagcaaggacatggctgatttttttttataaaaattggcactaataagtgggtttattggtcttttctaattgtataatttaatttagtacaaagtttgtaaaatatcagaggatatatatatattgtttctacgacatggtattgcatttatatctttttactacagtgatctgtgacagcagcagcttcatgttgtattttttttactgaaattgtaaaatatccatcttaaagacatcaactattctaaaaattgtgtacaggatattcctttagtggtggaattaaaatgtacgaatacttgctttttcaaaaaaatgtattttctgttaaaagtttaaagatttttgctatatattatggaagaaaaatgtaatcgtaaatattaattttgtacctatattgtgcaatacttgaaaaaaacggtataaaagtattttgagtcagtgtcttacatgttaagagggactgaaatagtttatattaagtttgtattaaaattctttaaaattaaaaa

SEQ ID NO: 21988 - DNA, 1467 bp, Homo sapiens
  misc_feature 1..1467: note = ENST00000268957
  source 1..1467: mol_type = unassigned DNA; mol_type = unassigned DNA
agtgcggttccttctaaaaaggagaggcgggagagtcagggtggagaaggcggctccaaccagattttgcgtccacaaagccaaaagcttctaggcctggcatgtacggcgggtttgtgcccgaggagcacagctggtctacacgggcccgccccgtagacaccctactcctcgactttccccttttcccagtccgagtttgacgtcggtctcctggataccaggcagccaatcgcctcgttgcgaagggaccagcgcagccaatcaggcgtcgttgctacctgaacaagatcactcaaggtgaaggataatctactaataccagcactttgaatgaaaatttgtttctctgccacaaactgaacatcttttttttttttttttttttttggtgggggagttgaaacctaattttgtggcgtagcagctatgcagcttgaaatccaagtagcactaaattttattatttcgtatttgtacaataagcttcccaggagacgtgtcaacatttttggtgaagaacttgaaagacttcttaagaagaaatatgaagggcactggtatcctgaaaagccatacaaaggatcggggtttagatgtatacacataggggagaaagtggacccagtgattgaacaagcatccaaagagagtggtttggacattgatgatgttcgtggcaatctgccacaggatcttagtgtttggatcgacccatttgaggtttcttaccaaattggtgaaaagggaccagtgaaggtgctttacgtggatgataataatgaaaatggatgtgagttggataaggagatcaaaaacagctttaacccagaggcccaggtttttatgcccataagtgacccagcctcatcagtgtccagctctccatcgcctccttttggtcactctgctgctgtaagccctaccttcatgccccggtccactcagcctttaacctttaccactgccacttttgctgccaccaagttcggctctaccaaaatgaagaatagtggccgtagcaacaaggttgcacgtacttctcccatcaacctcggcttgaatgtgaatgacctcttgaagcagaaagccatctcttcctcaatgcactctctgtatgggcttggcttgggtagccagcagcagccacagcaacagcagcagccagcccagccgccaccgccaccaccaccaccacagcagcaacaacagcagaaaacctctgctctttctcctaatgccaaggaatttatttttcctaatatgcagggtcaaggtagtagtaccaatggaatgttcccaggtgacagcccccttaacctcagtcctctccagtacagtaatgcctttgatgtgtttgcagcctatggaggcctcaatgagaaatcttttgtagatggcttgaattttagcttaaataacatgcagtattctaaccagcaattccagcctgttatggctaactaa

SEQ ID NO: 21989 - DNA, 889 bp, Homo sapiens
  misc_feature 1..889: note = ENST00000509385
  source 1..889: mol_type = unassigned DNA; mol_type = unassigned DNA
agaaggagcgaagctctggcccggcgtgtagcgggcgcactacggggacgctgggccgggcaccgggctgtgtggagaagtgagcgcgctcgtctgacccccgtgcccgccaccccgagccactaacggcgatctcccaaggcctgcccgaggcctctgtcctctgtcctcagccccgcagcggcaacgtcttgcactcggcgagctcgccgctcccgaccctcccgcgcccccgccctgccgcgctgctccccgcccagccgcgggtctgtggtccaagccgccccgaagcagccccttcccaggagacgtgtcaacatttttggtgaagaacttgaaagacttcttaagaagaaatatgaagggcactggtatcctgaaaagccatacaaaggatcggggtttagatgtatacacataggggagaaagtggacccagtgattgaacaagcatccaaagagagtggtttggacattgatgatgttcgtggcaatctgccacaggatcttagtgtttggatcgacccatttgaggtttcttaccaaattggtgaaaagggaccagtgaaggtgctttacgtggatgataataatgaaaatggatgtgagttggataaggagatcaaaaacagctttaacccagaggcccaggtttttatgcccataagtgacccagcctcatcagtgtccagctctccatcgcctccttttggtcactctgctgctgtaagccctaccttcatgccccggtccactcagcctttaacctttaccactgccacttttgctgccaccaagttcggctctaccaaaatgaagaatagtggccgtagcaacaaggttgcacgtacttctcccatcaacctcggcttgaatgtgaatgacctct

SEQ ID NO: 21990 - DNA, 2442 bp, Homo sapiens
  misc_feature 1..2442: note = ENST00000570371
  source 1..2442: mol_type = unassigned DNA; mol_type = unassigned DNA
tgagtaaggaagttgataaacggcaacatctgaaatagctactcgccctgaataggcaggtggagaatattagttacacgtgggacaaatcccattatgagacatatcatcacaacaagaatatttcattctagattttagaatcccaggttttggctcactttggtcaagaaaaattataaataattgagttacagataattaaatgttagcctcctggagtgcatggcaattggttttgacctctatattaaaattcacaagaccacggacataagtcaaaacaggtccccttcgtctccctagtcaccatctccagggctaaaaaacagacttgaaatgggtggcagttagactacaggaaacaggatctacaagcaccaggagctcatctatggctatctgacatcgcctggggacacctcactctctggcaggctcctgctggctggagattgttaacatcgccaatcagatgttaattgaatgcaaaggaataggaaataaattctggttctgaaggggcagctggaaaggtgttgggcttctcagattccaacctacattacaaagcaggcctaaagccaagcatactccttgccagaagaaacggaaagcccctctcccgtttttagaatcaggctggaaaacacggctcccagaaggtggggttagaaaacaagagcttgcgaggcggcgccctgtggtccctcgaggaaatagtagagagacaaagagggcctgctcctgggaagccctaaattcgaagccaatccttcctcctagacatgaccacaactttaaagggcagggcgcacacctcccctcccggatctctaggacaaagggcagccaaagaggcgcagagaagaatgacaaggtgcccagcaagcggcaggatcaaagcctgggtctctaattcccaggctggagattctgggctgcctgctcctcctgcacggggcgaaaagcccacctgggatccgagcgggcggccgcgccactctcgcaggctccatacacccgccactacccgcctgtaccacctgcagccggcagcgcagcctcctcgcgggtcccgcagggcgcgctgcaggtgcgctgggcgtcccgaagccccgccctcgcgtccctgccccgcgcccagctcctcacgctcggtgcccgcgccccgcagcggcagcgcagaacgcaccgcctctgccagagcccgggaagcgctcgggcgaagaggaggagccaagggtaccgagcgggtggagtcgggagccggagagcggtggaggcggatttcctgggcccggccctctggcgctaccatggcgtttggcaagagtcaccgggatccctacgcgacctccgtgggccacctcatagaaaaggctacatttgctggagttcagactgaagattggggccagttcatgcacatctgtgacataattaacactacccaggatgggccaaaagatgcagtgaaagctttgaagaaaaggatttccaaaaactacaatcataaagaaatccaacttaccttgtcacttattgacatgtgtgtgcagaactgtggtccaagtttccagtctctgattgtgaagaaggaatttgttaaagagaatttagttaagctactgaatcccagatacaacttgccattagacattcagaatagaatcttgaatttcattaagacttggtcacagggcttcccaggaggtgtggatgtaagcgaagtcaaagaagtatacctcgacctggttaagaaaggcgttcagtttcctccctcagaagcagaggctgaaacagcaagacaagagactgctcaaatctcatcaaatcctccaacatctgtccctactgcaccagctctttcttctgtaattgctccaaagaactcgactgttacattggtcccagaacagattggaaaactgcacagtgaattggatatggtgaaaatgaatgtgcgagtgatgtccgccatattgatggagaatactcctgggtctgaaaaccatgaagacatagagcttctgcagaaactctataaaacaggtcgggagatgcaggagaggatcatggacctgcttgtggtggtggagaacgaagatgtaactgttgagctaattcaggtgaatgaggatttgaataatgctatccttggatatgagaggtttactagaaaccaacaaaggattttggagcaaaataagaaccagaaggaagccaccaatactaccagtgagccttctgccccatctcaagatctcctcgacctaagtcccagtccccggatgcctagggccactctgggagaactcaacaccatgaataatcaactttcaggcttaagtaaataaacactcaggtcttttcagaccagcagaagagcttgatgttaaacagttctccttaattacgtgattaaataccacctaagaa

SEQ ID NO: 21991 - DNA, 559 bp, Homo sapiens
  misc_feature 1..559: note = ENST00000574744
  source 1..559: mol_type = unassigned DNA; mol_type = unassigned DNA
gggacacctcactctctggcaggctcctgctggctggagattgttaacatcgccaatcagatgttaattgaatgcaaaggaataggaaataaattctggttctgaaggggcagctggaaaggtgttgggcttctcagattccaacctacattacaaagcaggcctaaagccaagcatactccttgccagaagaaacggaaagcccctctcccgtttttagaatcaggctggaaaacacggctcccagaaggtggggttagaaaacaagagcttgcgaggcggcgccctgtggtccctcgaggaaatagtagagagacaaagagggcctgctcctgggaagccctaaattcgaagccaatccttcctcctagacatgaccacaactttaaagggcagggcgcacacctcccctcccggatctctaggacaaaggcaggtcgaggggcagccaaagaggcgcagagaagaatgacaaggtgcccagcaagcggcaggatcaaagcctgggtctctaattcccaggctggagattctgggctgcctgctcctcctgcacggg

SEQ ID NO: 21992 - DNA, 2507 bp, Homo sapiens
  misc_feature 1..2507: note = ENST00000575882
  source 1..2507: mol_type = unassigned DNA; mol_type = unassigned DNA
aaaagcccacctgggatccgagcgggcggccgcgccactctcgcaggctccatacacccgccactacccgcctgtaccacctgcagccggcagcgcagcctcctcgcgggtcccgcagggcgcgctgcaggtgcgctgggcgtcccgaagccccgccctcgcgtccctgccccgcgcccagctcctcacgctcggtgcccgcgccccgcagcggcagcgcagaacgcaccgcctctgccagagcccgggaagcgctcgggcgaagaggaggagccaagggtaccgagcgggtggagtcgggagccggagagcggtggaggcggatttcctgggcccggccctctggcgctaccatggcgtttggcaagagtcaccgggatccctacgcgacctccgtgggccacctcatagaaaaggctacatttgctggagttcagactgaagattggggccagttcatgcacatctgtgacataattaacactacccaggatgggccaaaagatgcagtgaaagctttgaagaaaaggatttccaaaaactacaatcataaagaaatccaacttaccttgtcacttattgacatgtgtgtgcagaactgtggtccaagtttccagtctctgattgtgaagaaggaatttgttaaagagaatttagttaagctactgaatcccagatacaacttgccattagacattcagaatagaatcttgaatttcattaagacttggtcacagggcttcccaggaggtgtggatgtaagcgaagtcaaagaagtatacctcgacctggttaagaaaggcgttcagtttcctccctcagaagcagaggctgaaacagcaagacaagagactgctcaaatctcatcaaatcctccaacatctgtccctactgcaccagctctttcttctgtaattgctccaaagaactcgactgttacattggtcccagaacagattggaaaactgcacagtgaattggatatggtgaaaatgaatgtgcgagtgatgtccgccatattgatggagaatactcctgggtctgaaaaccatgaagacatagagcttctgcagaaactctataaaacaggtcgggagatgcaggagaggatcatggacctgcttgtggtggtggagaacgaagatgtaactgttgagctaattcaggtgaatgaggatttgaataatgctatccttggatatgagaggtttactagaaaccaacaaaggattttggagcaaaataagaaccagaaggaagccaccaatactaccagtgagccttctgccccatctcaagatctcctcgacctaagtcccagtccccggatgcctagggccactctgggagaactcaacaccatgaataatcaactttcaggcttaaatttcagccttccaagttctgatgtaacaaacaacttaaaacccagtcttcatccacagatgaacttgctagccttggagaatacagagatacccccgtttgcccaaaggaccagccaaaacctcacctcaagccacgcatatgataattttctggaacattcaaattcagtgtttctacagccagttagtctacaaaccattgcagcagcaccatcaaaccagagtctgccacctttgcccagcaatcatccagcgatgacaaaaagtgatctccagccacctaattactacgaggtaatggagtttgatcccttagctcctgctgtcactacagaagctatttatgaagaaattgatgctcaccagcacaaaggagctcaaaatgatggtgactgagaagaaagtggatgatcagctcactaccacatcaaaggtgccaactctctaaaacgtagactctgtgcagctttgaagcctggaagacaatacctaccaacatgtcaaagccatggtggcacatttctgctataatgaagattaaatagaataacagttccaggataacactgattcctgacaacagcgtgagatttcaacagaacttgtttggaacaaatactcacttaaaacttcagcagaagaaaaattacttagtccttaggccaaccaatttaactgcagtgtcatgtttcacaggccttcctacatttagaaatcgtcacacagctgtgataagagtagattattttactatgaaataattctgaatagatgaaagcataaaatgtgagaaactgaatgtattattcaggaagaatactgagtgccttcatttaactaaagttgaatgtaaaagtcaatttgcacttctttataatcctctggtttagaattataaattgttaaaaccttgataattgtcatttaattatatttcaggtgtcctgaacaggtcactagactctacattgggcagcctttaaatatgattctttgtaatgctaaatagcctttttttctctttttactgcaacttaatatttctatttagaacacagaaaatgaaaatatttagaataagttgtacatttgatgacaaataaatcactattaaaacaa

SEQ ID NO: 21993 - DNA, 1026 bp, Homo sapiens
  misc_feature 1..1026: note = ENST00000570965
  source 1..1026: mol_type = unassigned DNA; mol_type = unassigned DNA
agcggcagcgcagaacgcaccgcctctgccagagcccgggaagcgctcgggcgaagaggaggagccaagggtaccgagcgggtggagtcgggagccggagagcggtggaggcggatttcctgggcccggccctctggcgctaccatggcgtttggcaagagtcaccgggatccctacgcgacctccgtgggccacctcatagctcagactcaacagctttttcttggcagaaaaggctacatttgctggagttcagactgaagattggggccagttcatgcacatctgtgacataattaacactacccaggatgggccaaaagatgcagtgaaagctttgaagaaaaggatttccaaaaactacaatcataaagaaatccaacttaccttgtcacttattgacatgtgtgtgcagaactgtggtccaagtttccagtctctgattgtgaagaaggaatttgttaaagagaatttagttaagctactgaatcccagatacaacttgccattagacattcagaatagaatcttgaatttcattaagacttggtcacagggcttcccaggaggtgtggatgtaagcgaagtcaaagaagtatacctcgacctggttaagaaaggcgttcagtttcctccctcagaagcagaggctgaaacagcaagacaagagactgctcaaatctcatcaaatcctccaacatctgtccctactgcaccagctctttcttctgtaattgctccaaagaactcgactgttacattggtcccagaacagattggaaaactgcacagtgaattggatatggtgaaaatgaatgtgcgagtgatgtccgccatattgatggagaatactcctgggtctgaaaaccatgaagacatagagcttctgcagaaactctataaaacaggtcgggagatgcaggagaggatcatggacctgcttgtggtggtggagaacgaagatgtaactgttgagctaattcaggtgaatgaggatttgaataatgctatccttggatatgagag

SEQ ID NO: 21994 - DNA, 2228 bp, Homo sapiens
  misc_feature 1..2228: note = ENST00000445275
  source 1..2228: mol_type = unassigned DNA; mol_type = unassigned DNA
agagcccgggaagcgctcgggcgaagaggaggagccaagggtaccgagcgggtggagtcgggagccggagagcggtggaggcggatttcctgggcccggccctctggcgctaccatggcgtttggcaagagtcaccgggatccctacgcgacctccgtgggccacctcatagaaaaggctacatttgctggagttcagactgaagattggggccagttcatgcacatctgtgacataattaacactacccaggatgggccaaaagatgcagtgaaagctttgaagaaaaggatttccaaaaactacaatcataaagaaatccaacttaccttgtcacttattgacatgtgtgtgcagaactgtggtccaagtttccagtctctgattgtgaagaaggaatttgttaaagagaatttagttaagctactgaatcccagatacaacttgccattagacattcagaatagaatcttgaatttcattaagacttggtcacagggcttcccaggaggtgtggatgtaagcgaagtcaaagaagtatacctcgacctggttaagaaaggcgttcagtttcctccctcagaagcagaggctgaaacagcaagacaagagactgctcaaatctcatcaaatcctccaacatctgtccctactgcaccagctctttcttctgtaattgctccaaagaactcgactgttacattggtcccagaacagattggaaaactgcacagtgaattggatatggtgaaaatgaatgtgcgagtgatgtccgccatattgatggagaatactcctgggtctgaaaaccatgaagacatagagcttctgcagaaactctataaaacaggtcgggagatgcaggagaggatcatggacctgcttgtggtggtggagaacgaagatgtaactgttgagctaattcaggtgaatgaggatttgaataatgctatccttggatatgagaggtttactagaaaccaacaaaggattttggagcaaaataagaaccagaaggaagccaccaatactaccagtgagccttctgccccatctcaagatctcctcgacctaagtcccagtccccggatgcctagggccactctgggagaactcaacaccatgaataatcaactttcaggcttaaatttcagccttccaagttctgatgtaacaaacaacttaaaacccagtcttcatccacagatgaacttgctagccttggagaatacagagatacccccgtttgcccaaaggaccagccaaaacctcacctcaagccacgcatatgataatccagttagtctacaaaccattgcagcagcaccatcaaaccagagtctgccacctttgcccagcaatcatccagcgatgacaaaaagtgatctccagccacctaattactacgaggtaatggagtttgatcccttagctcctgctgtcactacagaagctatttatgaagaaattgatgctcaccagcacaaaggagctcaaaatgatggtgactgagaagaaagtggatgatcagctcactaccacatcaaaggtgccaactctctaaaacgtagactctgtgcagctttgaagcctggaagacaatacctaccaacatgtcaaagccatggtggcacatttctgctataatgaagattaaatagaataacagttccaggataacactgattcctgacaacagcgtgagatttcaacagaacttgtttggaacaaatactcacttaaaacttcagcagaagaaaaattacttagtccttaggccaaccaatttaactgcagtgtcatgtttcacaggccttcctacatttagaaatcgtcacacagctgtgataagagtagattattttactatgaaataattctgaatagatgaaagcataaaatgtgagaaactgaatgtattattcaggaagaatactgagtgccttcatttaactaaagttgaatgtaaaagtcaatttgcacttctttataatcctctggtttagaattataaattgttaaaaccttgataattgtcatttaattatatttcaggtgtcctgaacaggtcactagactctacattgggcagcctttaaatatgattctttgtaatgctaaatagcctttttttctctttttactgcaacttaatatttctatttagaacacagaaaatgaaaatatttagaataagttgtacatttgatgacaaataaatcactatt

SEQ ID NO: 21995 - DNA, 1895 bp, Homo sapiens
  misc_feature 1..1895: note = ENST00000348161
  source 1..1895: mol_type = unassigned DNA; mol_type = unassigned DNA
gagtcgggagccggagagcggtggaggcggatttcctgggcccggccctctggcgctaccatggcgtttggcaagagtcaccgggatccctacgcgacctccgtgggccacctcataggccaaaagatgcagtgaaagctttgaagaaaaggatttccaaaaactacaatcataaagaaatccaacttaccttgtcacttattgacatgtgtgtgcagaactgtggtccaagtttccagtctctgattgtgaagaaggaatttgttaaagagaatttagttaagctactgaatcccagatacaacttgccattagacattcagaatagaatcttgaatttcattaagacttggtcacagggcttcccaggaggtgtggatgtaagcgaagtcaaagaagtatacctcgacctggttaagaaaggcgttcagtttcctccctcagaagcagaggctgaaacagcaagacaagagactgctcaaatctcatcaaatcctccaacatctgtccctactgcaccagctctttcttctgtaattgctccaaagaactcgactgttacattggtcccagaacagattggaaaactgcacagtgaattggatatggtgaaaatgaatgtgcgagtgatgtccgccatattgatggagaatactcctgggtctgaaaaccatgaagacatagagcttctgcagaaactctataaaacaggtcgggagatgcaggagaggatcatggacctgcttgtggtggtggagaacgaagatgtaactgttgagctaattcaggtgaatgaggatttgaataatgctatccttggatatgagaggtttactagaaaccaacaaaggattttggagcaaaataagaaccagaaggaagccaccaatactaccagtgagccttctgccccatctcaagatctcctcgacctaagtcccagtccccggatgcctagggccactctgggagaactcaacaccatgaataatcaactttcaggcttaaatttcagccttccaagttctgatgtaacaaacaacttaaaacccagtcttcatccacagatgaacttgctagccttggagaatacagagatacccccgtttgcccaaaggaccagccaaaacctcacctcaagccacgcatatgataattttctggaacattcaaattcagtgtttctacagccagttagtctacaaaccattgcagcagcaccatcaaaccagagtctgccacctttgcccagcaatcatccagcgatgacaaaaagtgatctccagccacctaattactacgaggtaatggagtttgatcccttagctcctgctgtcactacagaagctatttatgaagaaattgatgctcaccagcacaaaggagctcaaaatgatggtgactgagaagaaagtggatgatcagctcactaccacatcaaaggtgccaactctctaaaacgtagactctgtgcagctttgaagcctggaagacaatacctaccaacatgtcaaagccatggtggcacatttctgctataatgaagattaaatagaataacagttccaggataacactgattcctgacaacagcgtgagatttcaacagaacttgtttggaacaaatactcacttaaaacttcagcagaagaaaaattacttagtccttaggccaaccaatttaactgcagtgtcatgtttcacaggccttcctacatttagaaatcgtcacacagctgtgataagagtagattattttactatgaaataattctgaatagatgaaagcataaaatgtgagaaactgaatgtattattcaggaagaatactgagtgccttcatttaactaaagttgaatgtaaaagtcaatttgcacttctttataatcctctgg

SEQ ID NO: 21996 - DNA, 2337 bp, Homo sapiens
  misc_feature 1..2337: note = ENST00000572405
  source 1..2337: mol_type = unassigned DNA; mol_type = unassigned DNA
ggatttcctgggcccggccctctggcgctaccatggcgtttggcaagagtcaccgggatccctacgcgacctccgtgggccacctcataggctacatttgctggagttcagactgaagattggggccagttcatgcacatctgtgacataattaacactacccaggatgggccaaaagatgcagtgaaagctttgaagaaaaggatttccaaaaactacaatcataaagaaatccaacttaccttgtcacttattgacatgtgtgtgcagaactgtggtccaagtttccagtctctgattgtgaagaaggaatttgttaaagagaatttagttaagctactgaatcccagatacaacttgccattagacattcagaatagaatcttgaatttcattaagacttggtcacagggcttcccaggaggtgtggatgtaagcgaagtcaaagaagtatacctcgacctggttaagaaaggcgttcagtttcctccctcagaagcagaggctgaaacagcaagacaagagactgctcaaatctcatcaaatcctccaacatctgtccctactgcaccagctctttcttctgtaattgctccaaagaactcgactgttacattggtcccagaacagattggaaaactgcacagtgaattggatatggtgaaaatgaatgtgcgagtgatgtccgccatattgatggagaatactcctgggtctgaaaaccatgaagacatagagcttctgcaggtgttgtacgatttcagggactatcagtcaaagtgtctcttaaagttattctctaaactttgagtttggagatggaagacaccttaatattgtctagtacatcctcctacatcctgatttcagttgatttctaaacttaacaaaaatatccaagaatgactttgtcagaaatgcagtagtaacttagacatggtttttagcctcttgcaacaaataatttattataagttataaccttggtcatgtacaatcaattctctagttgttttaagtatgtaaaaattgcctctattttcatccactcaacaaacattgagtaactgtgatataggaagggatgtagaaatgagaaggaggctattctagtccttaagagtttatgcctaatgagcaagattggtttgtaaacaacaaacataatgaagtattatagatactgtagtataaatttgttcagtatatggtgggatcatgggtggggagaaggagagatgtgaggtttttaagaatggtctagatggaggcaatgctcgagctatagaggaacaagtagacagggcatttagacctgcatgagtagttctacagccctcctatgccttctgctatgtctgtgtatacatatactttatttttccctctaccagtttgctcttctaattattttaaattttaaaacttattaattttagaagcagttagaaaaaaaaatcagtttctagtttctaagtccctttgttgccaagttaagaagcttaagatatttttacttttctcagattcccactcgccacctctcatgttatttttcctttaacttcttagattgttagtaaataactttttccttgctcatttcttatttgggaaacaaaaaaattgtaaaaattttcccaacaatgtttcttagatatcactgctgtcgtgaatagtttgttttttccttgctgcagtacacccatgttggtaaactttggtgcaaactttgagtgcttgcatatccaaaaatgtcctctgattgtcatgttaaatgcaggttagtttagctagatataaaattctaggcacaaaattctaggcctttgaagatactgcttcactgttctcttacacccactaatgctgatagaagtattatattattctgcttcttaatcctttgattaataatatttttttctagttgcatttgttatttttctacgttaatatttcagaaattgtactgttccctctgaagagatatatgtacatgtgtgcagatgtttgtttaacttacttatcttccttagtagatgataggcttttttgccttatcaacttatgtgtatttttaattctaggaattctcagctcctactttaaatattgactttctaccattctttctattctcttcttatggaactttaagacgatgaaacttccagttggattcatttgtctcttaacatttcttttatacttttcatttcttcattctaagttctgggataatttctctgtttaatgtatttctctaaaacttgtaattgagttgcttattcagtccttctaataaatgtttcaacaatttctttctattaaaaa

SEQ ID NO: 21997 - DNA, 1252 bp, Homo sapiens
  misc_feature 1..1252: note = ENST00000576932
  source 1..1252: mol_type = unassigned DNA; mol_type = unassigned DNA
ggatttcctgggcccggccctctggcgctaccatggcgtttggcaagagtcaccgggatccctacgcgacctccgtgggccacctcatagcttattgacatgtgtgtgcagaactgtggtccaagtttccagtctctgattgtgaagaaggaatttgttaaagagaatttagttaagctactgaatcccagatacaacttgccattagacattcagaatagaatcttgaatttcattaagacttggtcacagggcttcccaggaggtgtggatgtaagcgaagtcaaagaagtatacctcgacctggttaagaaaggcgttcagtttcctccctcagaagcagaggctgaaacagcaagacaagagactgctcaaatctcatcaaatcctccaacatctgtccctactgcaccagctctttcttctgtaattgctccaaagaactcgactgttacattggtcccagaacagattggaaaactgcacagtgaattggatatggtgaaaatgaatgtgcgagtgatgtccgccatattgatggagaatactcctgggtctgaaaaccatgaagacatagagcttctgcagaaactctataaaacaggtcgggagatgcaggagaggatcatggacctgcttgtggtggtggagaacgaagatgtaactgttgagctaattcaggtgaatgaggatttgaataatgctatccttggatatgagaggtttactagaaaccaacaaaggattttggagcaaaataagaaccagaaggaagccaccaatactaccagtgagccttctgccccatctcaagatctcctcgacctaagtcccagtccccggatgcctagggccactctgggagaactcaacaccatgaataatcaactttcaggcttaaatttcagccttccaagttctgatgtaacaaacaacttaaaacccagtcttcatccacagatgaacttgctagccttggagaatacagagataccccctagagacctggttttaccatgttggccaggctgtggtctcaaactcctgacctacggtgatctgcccacctcggcttcctgaagtgctgggattacaggcatgagccactgtgcccggctcataggccatatttatgacccatttactaacaggcaacaagctaagaagtatagaaatgcttactaattacttaacctatgaggtttgcccaaaggaccagccaaaacctcacctcaagccacgcatatgataa

SEQ ID NO: 21998 - DNA, 1521 bp, Homo sapiens
  misc_feature 1..1521: note = ENST00000572158
  source 1..1521: mol_type = unassigned DNA; mol_type = unassigned DNA
atttcctgggcccggccctctggcgctaccatggcgtttggcaagagtcaccgggatccctacgcgacctccgtgggccacctcatagaaaaggctacatttgctggagttcagactgaagattggggccagttcatgcacatctgtgacataattaacactacccaggatgggccaaaagatgcagtgaaagctttgaagaaaaggatttccaaaaactacaatcataaagaaatccaacttaccttgtcaaactgtggtccaagtttccagtctctgattgtgaagaaggaatttgttaaagagaatttagttaagctactgaatcccagatacaacttgccattagacattcagaatagaatcttgaatttcattaagacttggtcacagggcttcccaggaggtgtggatgtaagcgaagtcaaagaagtatacctcgacctggttaagaaaggcgttcagtttcctccctcagaagcagaggctgaaacagcaagacaagagactgctcaaatctcatcaaatcctccaacatctgtccctactgcaccagctctttcttctgtaattgctccaaagaactcgactgttacattggtcccagaacagattggaaaactgcacagtgaattggatatggtgaaaatgaatgtgcgagtgatgtccgccatattgatggagaatactcctgggtctgaaaaccatgaagacatagagcttctgcagaaactctataaaacaggtcgggagatgcaggagaggatcatggacctgcttgtggtggtggagaacgaagatgtaactgttgagctaattcaggtgaatgaggatttgaataatgctatccttggatatgagaggtttactagaaaccaacaaaggattttggagcaaaataagaaccagaaggaagccaccaatactaccagtgagccttctgccccatctcaagatctcctcgacctaagtcccagtccccggatgcctagggccactctgggagaactcaacaccatgaataatcaactttcaggcttaaatttcagccttccaagttctgatgtaacaaacaacttaaaacccagtcttcatccacagatgaacttgctagccttggagaatacagagatacccccgtttgcccaaaggaccagccaaaacctcacctcaagccacgcatatgataattttctggaacattcaaattcagtgtttctacagccagttagtctacaaaccattgcagcagcaccatcaaaccagagtctgccacctttgcccagcaatcatccagcgatgacaaaaagtgatctccagccacctaattactacgaggtaatggagtttgatcccttagctcctgctgtcactacagaagctatttatgaagaaattgatgctcaccagcacaaaggagctcaaaatgatggtgactgagaagaaagtggatgatcagctcactaccacatcaaaggtgccaactctctaaaacgtagactctgtgcagctttgaagcct

SEQ ID NO: 21999 - DNA, 567 bp, Homo sapiens
  misc_feature 1..567: note = ENST00000572298
  source 1..567: mol_type = unassigned DNA; mol_type = unassigned DNA
ctctggcgctaccatggcgtttggcaagagtcaccgggatccctacgcgacctccgtgggccacctcataggctacatttgctggagttcagactgaagattggggccagttcatgcacatctgtgacataattaacactacccaggatgggccaaaagatgcagtgaaagctttgaagaaaaggatttccaaaaactacaatcataaagaaatccaacttaccttgtcatcacgttgcttattgacatgtgtgtgcagaactgtggtccaagtttccagtctctgattgtgaagaaggaatttgttaaagagaatttagttaagctactgaatcccagatacaacttgccattagacattcagaatagaatcttgaatttcattaagacttggtcacagggcttcccaggaggtgtggatgtaagcgaagtcaaagaagtatacctcgacctggttaagaaaggcgttcagtttcctccctcagaagcagaggctgaaacagcaagacaagagactgctcaaatctcatcaaatcctccaacatctgtccctactgcaccagctct

SEQ ID NO: 22000 - DNA, 1522 bp, Homo sapiens
  misc_feature 1..1522: note = ENST00000536554
  source 1..1522: mol_type = unassigned DNA; mol_type = unassigned DNA
ctctggcgctaccatggcgtttggcaagagtcaccgggatccctacgcgacctccgtgggccacctcatagcttattgacatgtgtgtgcagaactgtggtccaagtttccagtctctgattgtgaagaaggaatttgttaaagagaatttagttaagctactgaatcccagatacaacttgccattagacattcagaatagaatcttgaatttcattaagacttggtcacagggcttcccaggaggtgtggatgtaagcgaagtcaaagaagtatacctcgacctggttaagaaaggcgttcagtttcctccctcagaagcagaggctgaaacagcaagacaagagactgctcaaatctcatcaaatcctccaacatctgtccctactgcaccagctctttcttctgtaattgctccaaagaactcgactgttacattggtcccagaacagattggaaaactgcacagtgaattggatatggtgaaaatgaatgtgcgagtgatgtccgccatattgatggagaatactcctgggtctgaaaaccatgaagacatagagcttctgcagaaactctataaaacaggtcgggagatgcaggagaggatcatggacctgcttgtggtggtggagaacgaagatgtaactgttgagctaattcaggtgaatgaggatttgaataatgctatccttggatatgagaggtttactagaaaccaacaaaggattttggagcaaaataagaaccagaaggaagccaccaatactaccagtgagccttctgccccatctcaagatctcctcgacctaagtcccagtccccggatgcctagggccactctgggagaactcaacaccatgaataatcaactttcaggcttaaatttcagccttccaagttctgatgtaacaaacaacttaaaacccagtcttcatccacagatgaacttgctagccttggagaatacagagatacccccgtttgcccaaaggaccagccaaaacctcacctcaagccacgcatatgataattttctggaacattcaaattcagtgtttctacagccagttagtctacaaaccattgcagcagcaccatcaaaccagagtctgccacctttgcccagcaatcatccagcgatgacaaaaagtgatctccagccacctaattactacgaggtaatggagtttgatcccttagctcctgctgtcactacagaagctatttatgaagaaattgatgctcaccagcacaaaggagctcaaaatgatggtgactgagaagaaagtggatgatcagctcactaccacatcaaaggtgccaactctctaaaacgtagactctgtgcagctttgaagcctggaagacaatacctaccaacatgtcaaagccatggtggcacatttctgctataatgaagattaaatagaataacagttccaggataacactgattcctgacaacagcgtgagatttcaacagaacttgtttggaacaaatactcacttaaaacttcagcag

SEQ ID NO: 22001 - DNA, 1524 bp, Homo sapiens
  misc_feature 1..1524: note = ENST00000571319
  source 1..1524: mol_type = unassigned DNA; mol_type = unassigned DNA
ctctggcgctaccatggcgtttggcaagagtcaccgggatccctacgcgacctccgtgggccacctcatagaaaaggctacatttgctggagttcagactgaagattggggccagttcatgcacatctgtgacataattaacactacccaggatggcttattgacatgtgtgtgcagaactgtggtccaagtttccagtctctgattgtgaagaaggaatttgttaaagagaatttagttaagctactgaatcccagatacaacttgccattagacattcagaatagaatcttgaatttcattaagacttggtcacagggcttcccaggaggtgtggatgtaagcgaagtcaaagaagtatacctcgacctggttaagaaaggcgttcagtttcctccctcagaagcagaggctgaaacagcaagacaagagattggaaaactgcacagtgaattggatatggtgaaaatgaatgtgcgagtgatgtccgccatattgatggagaatactcctgggtctgaaaaccatgaagacatagagcttctgcagaaactctataaaacaggtcgggagatgcaggagaggatcatggacctgcttgtggtggtggagaacgaagatgtaactgttgagctaattcaggtgaatgaggatttgaataatgctatccttggatatgagaggtttactagaaaccaacaaaggattttggagcaaaataagaaccagaaggaagccaccaatactaccagtgagccttctgccccatctcaagatctcctcgacctaagtcccagtccccggatgcctagggccactctgggagaactcaacaccatgaataatcaactttcaggcttaaatttcagccttccaagttctgatgtaacaaacaacttaaaacccagtcttcatccacagatgaacttgctagccttggagaatacagagatacccccgtttgcccaaaggaccagccaaaacctcacctcaagccacgcatatgataattttctggaacattcaaattcagtgtttctacagccagttagtctacaaaccattgcagcagcaccatcaaaccagagtctgccacctttgcccagcaatcatccagcgatgacaaaaagtgatctccagccacctaattactacgaggtaatggagtttgatcccttagctcctgctgtcactacagaagctatttatgaagaaattgatgctcaccagcacaaaggagctcaaaatgatggtgactgagaagaaagtggatgatcagctcactaccacatcaaaggtgccaactctctaaaacgtagactctgtgcagctttgaagcctggaagacaatacctaccaacatgtcaaagccatggtggcacatttctgctataatgaagattaaatagaataacagttccaggataacactgattcctgacaacagcgtgagatttcaacagaacttgtttggaacaaatactcacttaaaacttcagcagaagaaaaattacttagtcctta

SEQ ID NO: 22002 - DNA, 1849 bp, Homo sapiens
  misc_feature 1..1849: note = ENST00000575333
  source 1..1849: mol_type = unassigned DNA
ggcgctaccatggcgtttggcaagagtcaccgggatccctacgcgacctccgtgggccacctcatagaaaaggctacatttgctggagttcagactgaagattggggccagttcatgcacatctgtgacataattaacactacccaggatgggccaaaagatgcagtgaaagctttgaagaaaaggatttccaaaaactacaatcataaagaaatccaacttaccttgtcacttattgacatgtgtgtgcagaactgtggtccaagtttccagtctctgattgtgaagaaggaatttgttaaagagaatttagttaagctactgaatcccagatacaacttgccattagacattcagaatagaatcttgaatttcattaagacttggtcacagggcttcccaggaggtgtggatgtaagcgaagtcaaagaagtatacctcgacctggttaagaaaggcgttcagtttcctccctcagaagcagaggctgaaacagcaagacaagagactgctcaaatctcatcaaatcctccaacatctgtccctactgcaccagctctttcttctgtaattgctccaaagaactcgactgttacattggtcccagaacagattggaaaactgcacagtgaattggatatggtgaaaatgaatgtgcgagtgatgtccgccatattgatggagaatactcctgggtctgaaaaccatgaagacatagagcttctgcagaaactctataaaacaggtcgggagatgcaggagaggatcatggacctgcttgtggtggtggagaacgaagatgtaactgttgagctaattcaggtgaatgaggatttgaataatgctatccttggatatgagaggtttactagaaaccaacaaaggattttggagcaaaataagaaccagaaggaagccaccaatactaccagtgagccttctgccccatctcaagatctcctcgacctaagtcccagtccccggatgcctagggccactctgggagaactcaacaccatgaataatcaactttcaggcttaagtaaataaacactcaggtcttttcagaccagcagaagagcttgatgttaaacagttctccttaattacgtgattaaataccacctaagaaggactgaagtcaggttgaatgtcagagcgctatgttaggagatgtgattacttcccggcaaatggttgagtcaaacccagtatagcaatgggatgtgtctgggcgaggaggtccttgaaactcatcctactcacttagaatctcatggaattcacctggcctgctttgtagaagttgttcagcccaatggccaatacttaaagtctactgtgaacctacacactattatcattgggtttttctgctatacctcagcatcaggtaagggagtatctctgatgcaagcggagaaattcagggattacaaggtatgaactgagtggttgtgaaatgtagaaggaaaaacacaggctttaaagtcagagaagtccaagttgaaatgccagttctgccacctctcagccacctaacttttgagagtctcactttataaaatgggaacaatgattgccttaaagggtggttgtcaaggttaacaaactaatgtttataaaatgcattgtagcaaagcttacaatgcattttataaacatttataaaagagttacctatcttacctgttatcttctgctgtccttattcccagcaagggtttggcaaattacaaaataaggatgatgaaaaatgctgaaatccagttttgtcaaattaaaagcagtttgtttttctcatatgtcatctgctgtttccggagtaaaaatattcagtatcactgaa

SEQ ID NO: 22003 - DNA, 576 bp, Homo sapiens
  misc_feature 1..576: note = ENST00000572360
  source 1..576: mol_type = unassigned DNA
accatggcgtttggcaagagtcaccgggatccctacgcgacctccgtgggccacctcatagaaaaggctacatttgctggagttcagactgaagattggggccagttcatgcacatctgtgacataattaacactacccaggatgggccaaaagatgcagtgaaagctttgaagaaaaggatttccaaaaactacaatcataaagaaatccaacttaccttgtcatcacgttgcttattgacatgtgtgtgcagaactgtggtccaagtttccagtctctgattgtgaagaaggaatttgttaaagagaatttagttaagctactgaatcccagatacaacttgccattagacattcagaatagaatcttgaatttcattaagacttggtcacagggcttcccaggaggtgtggatgtaagcgaagtcaaagaagtatacctcgacctggttaagaaaggcgttcagtttcctccctcagaagcagaggctgaaacagcaagacaagagactgctcaaatctcatcaaatcctccaacatctgtccctactgcaccagctctttcttctgtaattg

SEQ ID NO: 22004 - DNA, 596 bp, Homo sapiens
  misc_feature 1..596: note = ENST00000570499
  source 1..596: mol_type = unassigned DNA
cgtttggcaagagtcaccgggatccctacgcgacctccgtgggccacctcatagaaaaggctacatttgctggagttcagactgaagattggggccagttcatgcacatctgtgacataattaacactacccaggatgggccaaaagatgcagtgaaagctttgaagaaaaggatttccaaaaactacaatcataaagaaatccaacttaccttgtcacttattgacatgtgtgtgcagaactgtggtccaagtttccagtctctgattgtgaagaaggaatttgttaaagagaatttagttaagctactgaatcccagatacaacttgccattagacattcagaatagaatcttgaatttcattaagacttggtcacagggcttcccaggaggtgtggatgtaagcgaagtcaaagaagtatacctcgacctggttaagaaaggcgttcagtttcctccctcagaagcagaggctgaaacagcaagacaagagattggaaaactgcacagtgaattggatatggtgaaaatgaatgtgcgagtgatgtccgccatattgatggagaatactcctgggtctgaaaaccatgaagac

SEQ ID NO: 22005 - DNA, 754 bp, Homo sapiens
  misc_feature 1..754: note = ENST00000572576
  source 1..754: mol_type = unassigned DNA
caagagtcaccgggatccctacgcgacctccgtgggccacctcatagaaaaggctacatttgctggagttcagactgaagattggggccagttcatgcacatctgtgacataattaacactacccaggatgggccaaaagatgcagtgaaagctttgaagaaaaggatttccaaaaactacaatcataaagaaatccaacttaccttgtcaacttggtcacagggcttcccaggaggtgtggatgtaagcgaagtcaaagaagtatacctcgacctggttaagaaaggcgttcagtttcctccctcagaagcagaggctgaaacagcaagacaagagactgctcaaatctcatcaaatcctccaacatctgtccctactgcaccagctctttcttctgtaattgctccaaagaactcgactgttacattggtcccagaacagattggaaaactgcacagtgaattggatatggtgaaaatgaatgtgcgagtgatgtccgccatattgatggagaatactcctgggtctgaaaaccatgaagacatagagcttctgcagaaactctataaaacaggtcgggagatgcaggagaggatcatggacctgcttgtggtggtggagaacgaagatgtaactgttgagctaattcaggtgaatgaggatttgaataatgctatccttggatatgagaggtttactagaaaccaacaaaggattttggagcaaaataagaaccagaaggaagccaccaat

SEQ ID NO: 22006 - DNA, 556 bp, Homo sapiens
  misc_feature 1..556: note = ENST00000573607
  source 1..556: mol_type = unassigned DNA
ttggccaactcactgtagaacctcagtcctcaaaaatgtaccttcctttcgatgccgcctggggagtggaaccaaacaggtgaaccgcgggagtcaggcatggagtgtttgggcctccacgaggagacaccagaaacttctcgaaaaggctacatttgctggagttcagactgaagattggggccagttcatgcacatctgtgacataattaacactacccaggatgggccaaaagatgcagtgaaagctttgaagaaaaggatttccaaaaactacaatcataaagaaatccaacttaccttgtcacttattgacatgtgtgtgcagaactgtggtccaagtttccagtctctgattgtgaagaaggaatttgttaaagagaatttagttaagctactgaatcccagatacaacttgccattagacattcagaatagaatcttgaatttcattaagacttggtcacagggcttcccaggaggtgtggatgtaagcgaagtcaaagaagtatacctcgacctggttaagaaaggcgttcagtttcctccctcagaa

SEQ ID NO: 22007 - DNA, 708 bp, Homo sapiens
  misc_feature 1..708: note = ENST00000575909
  source 1..708: mol_type = unassigned DNA
aaaaatgtaccttcctttcgatgccgcctggggagtggaaccaaacagaaaaggctacatttgctggagttcagactgaagattggggccagttcatgcacatctgtgacataattaacactacccaggatgggccaaaagatgcagtgaaagctttgaagaaaaggatttccaaaaactacaatcataaagaaatccaacttaccttgtcacttattgacatgtgtgtgcagaactgtggtccaagtttccagtctctgattgtgaagaaggaatttgttaaagagaatttagttaagctactgaatcccagatacaacttgccattagacattcagaatagaatcttgaatttcattaagacttggtcacagggcttcccaggaggtgtggatgtaagcgaagtcaaagaagtatacctcgacctggttaagaaaggcgttcagtttcctccctcagaagcagaggctgaaacagcaagacaagagactgctcaaatctcatcaaatcctccaacatctgtccctactgcaccagctctttcttctgtaattgctccaaagaactcgactgttacattggtcccagaacagattggaaaactgcacagtgaattggatatggtgaaaatgaatgtgcgagtgatgtccgccatattgatggagaatactcctgggtctgaaaaccatgaagacatagagcttctgc

SEQ ID NO: 22008 - DNA, 584 bp, Homo sapiens
  misc_feature 1..584: note = ENST00000570977
  source 1..584: mol_type = unassigned DNA
gaaaggcgttcagtttcctccctcagaagcagaggctgaaacagcaagacaagagactgctcaaatctcatcaaatcctccaacatctgtccctactgcaccagctctttcttctgtaattgctccaaagaactcgactgttacattggtcccagaacagattggaaaactgcacagtgaattggatatggtgaaaatgaatgtgcgagtgatgtccgccatattgatggagaatactcctgggtctgaaaaccatgaagacatagagcttctgcagaaactctataaaacaggtcgggagatgcaggagaggatcatggacctgcttgtggtggtggagaacgaagatgtaactgttgagctaattcaggtgaatgaggatttgaataatgctatccttggatatgagaggtgagcagatcatgtaccctctttacccctcttccatttctactttcaccaccaattactcagcattcttatcagagtgcctacaagtgacccctctttctagattctccattctcaataggaaaggtattggcatgtggggtgggacagttttcccttgtacagctcctact

SEQ ID NO: 22009 - DNA, 673 bp, Homo sapiens
  misc_feature 1..673: note = ENST00000570623
  source 1..673: mol_type = unassigned DNA; mol_type = unassigned DNA
caatttctgggtgatgagttttttttaaatacttttctattttctcacagttttctctgagggtatgaatactctgtaagctggaaaaaggttattaaaagtattttactgataattgtgtgaggatgaggctgattgtcttcattcctaaatatttgtgtattaataattgttagatttttatagcattttcatatatttttttaaaaacacatgcattttgatcatttaaacaggtttactagaaaccaacaaaggattttggagcaaaataagaaccagaaggaagccaccaatactaccagtgagccttctgccccatctcaagatctcctcgacctaagtcccagtccccggatgcctagggccactctgggagaactcaacaccatgaataatcaactttcaggcttaagtaaataaacactcaggtcttttcagaccagcagaagagcttgatgttaaacagttctccttaattacgtgattaaataccacctaagaaggactgaagtcaggttgaatgtcagagcgctatgttaggagatgtgattacttcccggcaaatggttgagtcaaacccagtatagcaatgggatgtgtctgggcgaggaggtccttgaaactcatcctactcacttagaatctcatggaattcacctggcctgctttg

SEQ ID NO: 22010 - DNA, 537 bp, Homo sapiens
  misc_feature 1..537: note = ENST00000572905
  source 1..537: mol_type = unassigned DNA; mol_type = unassigned DNA
tgtgctaggcagaacaagatgtaaaatcctttgcattctggatcagcttgggattttagaaaatccaatacaataatatttgttacccttacaacaacttcttctcatggcagggaaattctttctctctctacctaccataaatgatgctttttaatttctcttagagctaggaaatctcatgattttagggtgacagaaatatctaaattaatctcttttatttggtgggtttttcttttttttttctttttcttttttctttttttttgtttttactgtagaaaatccagcataactgactgacaaaatgttttaaagccaaacaagtccattttgtgttttagatttcagccttccaagttctgatgtaacaaacaacttaaaacccagtcttcatccacagatgaacttgctagccttggagaatacagagatacccccgtttgcccaaaggaccagccaaaacctcacctcaagccacgcatatgataatgtaagtaacaaaactcttttctagcagtgcatctagtcagc

SEQ ID NO: 22011 - DNA, 721 bp, Homo sapiens
  misc_feature 1..721: note = ENST00000574653
  source 1..721: mol_type = unassigned DNA; mol_type = unassigned DNA
tctaaattaatctcttttatttggtgggtttttcttttttttttctttttcttttttctttttttttgtttttactgtagaaaatccagcataactgactgacaaaatgttttaaagccaaacaagtccattttgtgttttagatttcagccttccaagttctgatgtaacaaacaacttaaaacccagtcttcatccacagatgaacttgctagccttggagaatacagagatacccccgtttgcccaaaggaccagccaaaacctcacctcaagccacgcatatgataattttctggaacattcaaattcagtgtttctacagccagttagtctacaaaccattgcagcagcaccatcaaaccagagtctgccacctttgcccagcaatcatccagcgatgacaaaaagtgatctccagccacctaattactacgaggtaatggagtttgatcccttagctcctgctgtcactacagaagctatttatgaagaaattgatgctcaccagcacaaaggagctcaaaatgatggtgactgagaagaaagtggatgatcagctcactaccacatcaaaggtgccaactctctaaaacgtagactctgtgcagctttgaagcctggaagacaatacctaccaacatgtcaaagccatggtggcacatttctgctataatgaagattaaatagaataacagttccaggataacactgattcctg

SEQ ID NO: 22012 - DNA, 552 bp, Homo sapiens
  misc_feature 1..552: note = ENST00000574318
  source 1..552: mol_type = unassigned DNA; mol_type = unassigned DNA
atttcagccttccaagttctgatgtaacaaacaacttaaaacccagtcttcatccacagatgaacttgctagccttggagaatacagagatacccccgtttgcccaaaggaccagccaaaacctcacctcaagccacgcatatgataattttctggaacattcaaattcagtgtttctacagccagttagtctacaaaccattgcagcagcaccatcaaaccagagtctgccacctttgcccagcaatcatccagcgatgacaaaaagtgatctccagccacctaattactacgaggtaatggagtttgatcccttagctcctgctgtcactacagagtatattttccagctacagacatatgtaagacgcatataaagaattgaatgggcctggcatggtggcttatgcctctaatcccaacattttgagaggctgaagtggaaggatcacttgaacctgggaggtcgaagctgcaataagccatgattgcaccactgcactccagcctgggtgacagtgaccctgtctcaaaaaaaagaaaaaagaaaaa

SEQ ID NO: 22013 - DNA, 3738 bp, Homo sapiens
  misc_feature 1..3738: note = ENST00000361337
  source 1..3738: mol_type = unassigned DNA; mol_type = unassigned DNA
agcccaaatgcgaacttaggctgttacacaactgctggggtctgttctcgccgcccgcccggcagtcaggcagcgtcgccgccgtggtagcagcctcagccgtttctggagtctcgggcccacagtcaccgccgcttacctgcgcctcctcgagcctccggagtccccgtccgcccgcacaggccggttcgccgtctgcgtctcccccacgccgcctcgcctgccgccgcgctcgtccctccgggccgacatgagtggggaccacctccacaacgattcccagatcgaagcggatttccgattgaatgattctcataaacacaaagataaacacaaagatcgagaacaccggcacaaagaacacaagaaggagaaggaccgggaaaagtccaagcatagcaacagtgaacataaagattctgaaaagaaacacaaagagaaggagaagaccaaacacaaagatggaagctcagaaaagcataaagacaaacataaagacagagacaaggaaaaacgaaaagaggaaaaggttcgagcctctggggatgcaaaaataaagaaggagaaggaaaatggcttctctagtccaccacaaattaaagatgaacctgaagatgatggctattttgttcctcctaaagaggatataaagccattaaagagacctcgagatgaggatgatgctgattataaacctaagaaaattaaaacagaagataccaagaaggagaagaaaagaaaactagaagaagaagaggatggtaaattgaaaaaacccaagaataaagataaagataaaaaagttcctgagccagataacaagaaaaagaagccgaagaaagaagaggaacagaagtggaaatggtgggaagaagagcgctatcctgaaggcatcaagtggaaattcctagaacataaaggtccagtatttgccccaccatatgagcctcttccagagaatgtcaagttttattatgatggtaaagtcatgaagctgagccccaaagcagaggaagtagctacgttctttgcaaaaatgctcgaccatgaatatactaccaaggaaatatttaggaaaaatttctttaaagactggagaaaggaaatgactaatgaagagaagaatattatcaccaacctaagcaaatgtgattttacccagatgagccagtatttcaaagcccagacggaagctcggaaacagatgagcaaggaagagaaactgaaaatcaaagaggagaatgaaaaattactgaaagaatatggattctgtattatggataaccacaaagagaggattgctaacttcaagatagagcctcctggacttttccgtggccgcggcaaccaccccaagatgggcatgctgaagagacgaatcatgcccgaggatataatcatcaactgtagcaaagatgccaaggttccttctcctcctccaggacataagtggaaagaagtccggcatgataacaaggttacttggctggtttcctggacagagaacatccaaggttccattaaatacatcatgcttaaccctagttcacgaatcaagggtgagaaggactggcagaaatacgagactgctcggcggctgaaaaaatgtgtggacaagatccggaaccagtatcgagaagactggaagtccaaagagatgaaagtccggcagagagctgtagccctgtacttcatcgacaagcttgctctgagagcaggcaatgaaaaggaggaaggagaaacagcggacactgtgggctgctgctcacttcgtgtggagcacatcaatctacacccagagttggatggtcaggaatatgtggtagagtttgacttcctcgggaaggactccatcagatactataacaaggtccctgttgagaaacgagtttttaagaacctacaactatttatggagaacaagcagcccgaggatgatctttttgatagactcaatactggtattctgaataagcatcttcaggatctcatggagggcttgacagccaaggtattccgtacatacaatgcctccatcacgctacagcagcagctaaaagaactgacagccccggatgagaacatcccagcgaagatcctttcttataaccgtgccaatcgagctgttgcaattctttgtaaccatcagagggcaccaccaaaaacttttgagaagtctatgatgaacttgcaaactaagattgatgccaagaaggaacagctagcagatgcccggagagacctgaaaagtgctaaggctgatgccaaggtcatgaaggatgcaaagacgaagaaggtagtagagtcaaagaagaaggctgttcagagactggaggaacagttgatgaagctggaagttcaagccacagaccgagaggaaaataaacagattgccctgggaacctccaaactcaattatctggaccctaggatcacagtggcttggtgcaagaagtggggtgtcccaattgagaagatttacaacaaaacccagcgggagaagtttgcctgggccattgacatggctgatgaagactatgagttttagccagtctcaagaggcagagttctgtgaagaggaacagtgtggtttgggaaagatggataaactgagcctcacttgccctcgtgcctgggggagagaggcagcaagtcttaacaaaccaacatctttgcgaaaagataaacctggagatattataagggagagctgagccagttgtcctatggacaacttatttaaaaatatttcagatatcaaaattctagctgtatgatttgttttgaattttgtttttattttcaagagggcaagtggatgggaatttgtcagcgttctaccaggcaaattcactgtttcactgaaatgtttggattctcttagctactgtatgcaaagtccgattatattggtgcgtttttacagttagggttttgcaataacttctatattttaatagaaataaattcctaaactcccttccctctctcccatttcaggaatttaaaattaagtagaacaaaaaacccagcgcacctgttagagtcgtcactctctattgtcatggggatcaattttcattaaacttgaagcagtcgtggctttggcagtgttttggttcagacacctgttcacagaaaaagcatgatgggaaaatatttcctgacttgagtgttcctttttaaatgtgaatttttatttctttttaattattttaaaatatttaaacctttttcttgatcttaaagatcgtgtagattggggttggggagggatgaagggcgagtgaatctaaggataatgaaataatcagtgactgaaaccattttcccatcatcctttgttctgagcattcgctgtaccctttaagatatccatctttttctttttaaccctaatctttcacttgaaagattttattgtataaaaagtttcacaggtcaataaacttagaggaaaatgagtatttggtccaaaaaaaggaaaaataatcaagattttagggcttttattttttcttttgtaattgtgtaaaaaatggaaaaaaacataaaaagcagaattttaatgtgaagacattttttgctataatcattagttttagaggcattgttagtttagtgtgtgtgcagagtccatttcccacatctttcctcaagtatcttctatttttatcatgaattcccttttaatcaactgtaggttatttaaaataaattcctacaacttaatggaaa

SEQ ID NO: 22014 - DNA, 1880 bp, Homo sapiens
  misc_feature 1..1880: note = ENST00000341197
  source 1..1880: mol_type = unassigned DNA; mol_type = unassigned DNA
agccgccgccgccgccgccgcgcccgccatggacgtccgcctgtacccctcggcgcccgcggtgggcgcgcggcccggggccgagccggccggcctggcgcacctggactattaccacggcggcaagtttgatggtgacagtgcctacgtggggatgagtgacggaaacccagagctcctgtcaaccagccagacctacaacggccagagcgagaacaacgaagactatgagatccccccgataacacctcccaacctcccggagccatccctcctgcacctgggggaccacgaagccagctaccactcgctgtgccacggcctcacccccaacggtctgctccctgcctactcctatcaggccatggacctcccagccatcatggtgtccaacatgctagcacaggacagccacctgctgtcgggccagctgcccacgatccaggagatggtccactcggaagtggctgcctatgactcgggccggcccgggcccctgctgggtcgcccggcaatgctggccagccacatgagtgccctcagccagtcccagctcatctcgcagatgggcatccggagcagcatcgcccacagctccccatcaccgccggggagcaagtcagcgaccccctctccctccagctccactcaggaagaggagtcggaagtgcatttcaagatctcgggagaaaagagaccttcagccgacccaggaaaaaaggccaagaacccgaagaagaagaaaaagaaggaccccaatgagccgcagaagcctgtgtcggcctacgcactcttcttcagagacactcaggccgccatcaagggtcagaaccccagtgccactttcggtgacgtgtccaaaatcgtggcctccatgtgggacagcctgggagaggaacagaagcaggcctacaagaggaagacagaagcagcaaagaaggaatatctgaaggccctggcagcctaccgggctagcctcgtctccaagagctccccagatcaaggtgagaccaagagcactcaggcaaacccaccagccaaaatgctcccacccaagcagcccatgtatgccatgccaggcctggcctccttcctgacgccgtcggacctgcaggccttccgcagtggggcctcccctgccagcctcgcccggacgctgggctccaagtctctgctgccaggcctcagtgcgtccccgccgccgccaccctccttcccgctcagccccacactgcaccagcagctgtcactgccccctcacgcccagggcgccctcctcagtccacctgttagcatgtccccagccccccagccccctgtcctgcccacccccatggcactccaggtgcagctggcgatgagcccctcacctccagggccacaggacttcccgcacatctctgagttccccagcagctcgggatcctgctcacctggcccatccaaccccaccagcagcggggactgggacagcagctaccccagtggggagtgtggcatcagcacctgcagcctgctccccagggacaaatcgctctacctcacctaatcccgcctccctaccatccctgaggctcgctggaaggcactgctcagagcctgaagggctgacagcagaaaagaggccctggccagaggcagggtggcccatcggagagagcagtgacacacccattgcccgggggctgagtctcttcctcaacctcccaccagactctgcagaggcagcccactgcccaccaccagcccaaagaacctgcaggaaccttccgcccgctgacctgcttgctccagggtaactgtggaccctgtcctcgccctgcgcacggtaccctatgtctggacacccggccccagctccagccccagcccaggtgggc

SEQ ID NO: 22015 - DNA, 1709 bp, Homo sapiens
  misc_feature 1..1709: note = ENST00000423191
  source 1..1709: mol_type = unassigned DNA; mol_type = unassigned DNA
agcgcgcgtgggtttcccgcagccctggcgcagacgcgtgggctccgtggcgatgcgggtttgatggtgacagtgcctacgtggggatgagtgacggaaacccagagctcctgtcaaccagccagacctacaacggccagagcgagaacaacgaagactatgagatccccccgataacacctcccaacctcccggagccatccctcctgcacctgggggaccacgaagccagctaccactcgctgtgccacggcctcacccccaacggtctgctccctgcctactcctatcaggccatggacctcccagccatcatggtgtccaacatgctagcacaggacagccacctgctgtcgggccagctgcccacgatccaggagatggtccactcggaagtggctgcctatgactcgggccggcccgggcccctgctgggtcgcccggcaatgctggccagccacatgagtgccctcagccagtcccagctcatctcgcagatgggcatccggagcagcatcgcccacagctccccatcaccgccggggagcaagtcagcgaccccctctccctccagctccactcaggaagaggagtcggaagtgcatttcaagatctcgggagaaaagagaccttcagccgacccaggaaaaaaggccaagaacccgaagaagaagaaaaagaaggaccccaatgagccgcagaagcctgtgtcggcctacgcactcttcttcagagacactcaggccgccatcaagggtcagaaccccagtgccactttcggtgacgtgtccaaaatcgtggcctccatgtgggacagcctgggagaggaacagaagcaggcctacaagaggaagacagaagcagcaaagaaggaatatctgaaggccctggcagcctaccgggctagcctcgtctccaagagctccccagatcaaggtgagaccaagagcactcaggcaaacccaccagccaaaatgctcccacccaagcagcccatgtatgccatgccaggcctggcctccttcctgacgccgtcggacctgcaggccttccgcagtggggcctcccctgccagcctcgcccggacgctgggctccaagtctctgctgccaggcctcagtgcgtccccgccgccgccaccctccttcccgctcagccccacactgcaccagcagctgtcactgccccctcacgcccagggcgccctcctcagtccacctgttagcatgtccccagccccccagccccctgtcctgcccacccccatggcactccaggtgcagctggcgatgagcccctcacctccagggccacaggacttcccgcacatctctgagttccccagcagctcgggatcctgctcacctggcccatccaaccccaccagcagcggggactgggacagcagctaccccagtggggagtgtggcatcagcacctgcagcctgctccccagggacaaatcgctctacctcacctaatcccgcctccctaccatccctgaggctcgctggaaggcactgctcagagcctgaagggctgacagcagaaaagaggccctggccagaggcagggtggcccatcggagagagcagtgacacacccattgcccgggggctgagtctcttcctcaacctcccaccagactctgcagaggcagcccactgcccaccaccagcccaaagaacctgcaggaaccttccgcccgc

SEQ ID NO: 22016 - DNA, 2519 bp, Homo sapiens
  misc_feature 1..2519: note = ENST00000372999
  source 1..2519: mol_type = unassigned DNA; mol_type = unassigned DNA
cgcagccctggcgcagacgcgtgggctccgtggcgatgcggggtgttgcctgaggctccactgaagctatggcataatttgcagaatttgcacttcattacttttctgaaattcaaacaaattctgaaactgcacgagttctggctgagagctgtggatctgtgcattttgatggtgacagtgcctacgtggggatgagtgacggaaacccagagctcctgtcaaccagccagacctacaacggccagagcgagaacaacgaagactatgagatccccccgataacacctcccaacctcccggagccatccctcctgcacctgggggaccacgaagccagctaccactcgctgtgccacggcctcacccccaacggtctgctccctgcctactcctatcaggccatggacctcccagccatcatggtgtccaacatgctagcacaggacagccacctgctgtcgggccagctgcccacgatccaggagatggtccactcggaagtggctgcctatgactcgggccggcccgggcccctgctgggtcgcccggcaatgctggccagccacatgagtgccctcagccagtcccagctcatctcgcagatgggcatccggagcagcatcgcccacagctccccatcaccgccggggagcaagtcagcgaccccctctccctccagctccactcaggaagaggagtcggaagtgcatttcaagatctcgggagaaaagagaccttcagccgacccaggaaaaaaggccaagaacccgaagaagaagaaaaagaaggaccccaatgagccgcagaagcctgtgtcggcctacgcactcttcttcagagacactcaggccgccatcaagggtcagaaccccagtgccactttcggtgacgtgtccaaaatcgtggcctccatgtgggacagcctgggagaggaacagaagcaggcctacaagaggaagacagaagcagcaaagaaggaatatctgaaggccctggcagcctaccgggctagcctcgtctccaagagctccccagatcaaggtgagaccaagagcactcaggcaaacccaccagccaaaatgctcccacccaagcagcccatgtatgccatgccaggcctggcctccttcctgacgccgtcggacctgcaggccttccgcagtggggcctcccctgccagcctcgcccggacgctgggctccaagtctctgctgccaggcctcagtgcgtccccgccgccgccaccctccttcccgctcagccccacactgcaccagcagctgtcactgccccctcacgcccagggcgccctcctcagtccacctgttagcatgtccccagccccccagccccctgtcctgcccacccccatggcactccaggtgcagctggcgatgagcccctcacctccagggccacaggacttcccgcacatctctgagttccccagcagctcgggatcctgctcacctggcccatccaaccccaccagcagcggggactgggacagcagctaccccagtggggagtgtggcatcagcacctgcagcctgctccccagggacaaatcgctctacctcacctaatcccgcctccctaccatccctgaggctcgctggaaggcactgctcagagcctgaagggctgacagcagaaaagaggccctggccagaggcagggtggcccatcggagagagcagtgacacacccattgcccgggggctgagtctcttcctcaacctcccaccagactctgcagaggcagcccactgcccaccaccagcccaaagaacctgcaggaaccttccgcccgctgacctgcttgctccagggtaactgtggaccctgtcctcgccctgcgcacggtaccctatgtctggacacccggccccagctccagccccagcccaggtgggccgcccctggcggggtcgcttaccaacggacacccaccccagatgcatgggccagagggccggcccccggcatagatgtgcacatcggttttccagtgtgaacaaaagattacgaaacctagaaactgttggttccgtgtaagtagttgactacgtgttttagaactgtgctgaagacatctgtaagactattttgtgggggaaaaaagtagtttcctttaaggtaaaaagcattttatatgatccttagcacatttttaagttttatcttaagggagacgcgcacaaaagcggctgccaaaccgtttcgtcatcctcacagcaaggaccggacgcttgctagccaccccggagcactgctctccttttaatcatgtattcatctattttaaattgccggcgacgacttttgtctatttatgaagaaaccttgagaacgaagttacagcttatcctaccgtgtgtgtggttttggggtttcgtttgggtttgggttcttgacgtcgtttgcagctgtttcctggccctggcgagtgtctgtcttggtgcccagtgcttctctcaaatctctttataataaaacttctgaaaagctgaaaa

SEQ ID NO: 22017 - DNA, 2605 bp, Homo sapiens
  misc_feature 1..2605: note = ENST00000358131
  source 1..2605: mol_type = unassigned DNA; mol_type = unassigned DNA
accaggagctccgaacacgcaggcccaaattggaataggagatggattttgataaaagaggttaaataacaggtttttccatttcaccttatacgaatgggatggggggtgggggtgctgggcctccagccaatagaggaccaagagttgtcaggagggcttataaagcttgctatttctggcattttttcctctttctctgctgattatgcagcagactcgcacagaggctgtcgcgggcgcgttctctcgctgcctgggcttctgtggaatgagactcgggctccttctacttgcaagacactggtgcattgcaggtgtgtttccgcagaagtttgatggtgacagtgcctacgtggggatgagtgacggaaacccagagctcctgtcaaccagccagacctacaacggccagagcgagaacaacgaagactatgagatccccccgataacacctcccaacctcccggagccatccctcctgcacctgggggaccacgaagccagctaccactcgctgtgccacggcctcacccccaacggtctgctccctgcctactcctatcaggccatggacctcccagccatcatggtgtccaacatgctagcacaggacagccacctgctgtcgggccagctgcccacgatccaggagatggtccactcggaagtggctgcctatgactcgggccggcccgggcccctgctgggtcgcccggcaatgctggccagccacatgagtgccctcagccagtcccagctcatctcgcagatgggcatccggagcagcatcgcccacagctccccatcaccgccggggagcaagtcagcgaccccctctccctccagctccactcaggaagaggagtcggaagtgcatttcaagatctcgggagaaaagagaccttcagccgacccaggaaaaaaggccaagaacccgaagaagaagaaaaagaaggaccccaatgagccgcagaagcctgtgtcggcctacgcactcttcttcagagacactcaggccgccatcaagggtcagaaccccagtgccactttcggtgacgtgtccaaaatcgtggcctccatgtgggacagcctgggagaggaacagaagcagagctccccagatcaaggtgagaccaagagcactcaggcaaacccaccagccaaaatgctcccacccaagcagcccatgtatgccatgccaggcctggcctccttcctgacgccgtcggacctgcaggccttccgcagtggggcctcccctgccagcctcgcccggacgctgggctccaagtctctgctgccaggcctcagtgcgtccccgccgccgccaccctccttcccgctcagccccacactgcaccagcagctgtcactgccccctcacgcccagggcgccctcctcagtccacctgttagcatgtccccagccccccagccccctgtcctgcccacccccatggcactccaggtgcagctggcgatgagcccctcacctccagggccacaggacttcccgcacatctctgagttccccagcagctcgggatcctgctcacctggcccatccaaccccaccagcagcggggactgggacagcagctaccccagtggggagtgtggcatcagcacctgcagcctgctccccagggacaaatcgctctacctcacctaatcccgcctccctaccatccctgaggctcgctggaaggcactgctcagagcctgaagggctgacagcagaaaagaggccctggccagaggcagggtggcccatcggagagagcagtgacacacccattgcccgggggctgagtctcttcctcaacctcccaccagactctgcagaggcagcccactgcccaccaccagcccaaagaacctgcaggaaccttccgcccgctgacctgcttgctccagggtaactgtggaccctgtcctcgccctgcgcacggtaccctatgtctggacacccggccccagctccagccccagcccaggtgggccgcccctggcggggtcgcttaccaacggacacccaccccagatgcatgggccagagggccggcccccggcatagatgtgcacatcggttttccagtgtgaacaaaagattacgaaacctagaaactgttggttccgtgtaagtagttgactacgtgttttagaactgtgctgaagacatctgtaagactattttgtgggggaaaaaagtagtttcctttaaggtaaaaagcattttatatgatccttagcacatttttaagttttatcttaagggagacgcgcacaaaagcggctgccaaaccgtttcgtcatcctcacagcaaggaccggacgcttgctagccaccccggagcactgctctccttttaatcatgtattcatctattttaaattgccggcgacgacttttgtctatttatgaagaaaccttgagaacgaagttacagcttatcctaccgtgtgtgtggttttggggtttcgtttgggtttgggttcttgacgtcgtttgcagctgtttcctggccctggcgagtgtctgtcttggtgcccagtgcttctctcaaatctctttataataaaacttctgaaaagctgaaaa

SEQ ID NO: 22018 - DNA, 2262 bp, Homo sapiens
  misc_feature 1..2262: note = ENST00000435864
  source 1..2262: mol_type = unassigned DNA; mol_type = unassigned DNA
gtttccaagagggaagcaggaggctggcttcacttggttcccagacatctcatgagtgccggctgcctgcccagccctctgcctggtgctgggaggcaggtgtctctgcacttgagcagatgccgggaggcaacgtgtggagagctctgccagaggcttggaaagagggtgaggccagaggatggagcaggagagggaaggcttctctgaggaggtgacatttcagatccaggagatggtccactcggaagtggctgcctatgactcgggccggcccgggcccctgctgggtcgcccggcaatgctggccagccacatgagtgccctcagccagtcccagctcatctcgcagatgggcatccggagcagcatcgcccacagctccccatcaccgccggggagcaagtcagcgaccccctctccctccagctccactcaggaagaggagtcggaagtgcatttcaagatctcgggagaaaagagaccttcagccgacccaggaaaaaaggccaagaacccgaagaagaagaaaaagaaggaccccaatgagccgcagaagcctgtgtcggcctacgcactcttcttcagagacactcaggccgccatcaagggtcagaaccccagtgccactttcggtgacgtgtccaaaatcgtggcctccatgtgggacagcctgggagaggaacagaagcaggcctacaagaggaagacagaagcagcaaagaaggaatatctgaaggccctggcagcctaccgggctagcctcgtctccaagagctccccagatcaaggtgagaccaagagcactcaggcaaacccaccagccaaaatgctcccacccaagcagcccatgtatgccatgccaggcctggcctccttcctgacgccgtcggacctgcaggccttccgcagtggggcctcccctgccagcctcgcccggacgctgggctccaagtctctgctgccaggcctcagtgcgtccccgccgccgccaccctccttcccgctcagccccacactgcaccagcagctgtcactgccccctcacgcccagggcgccctcctcagtccacctgttagcatgtccccagccccccagccccctgtcctgcccacccccatggcactccaggtgcagctggcgatgagcccctcacctccagggccacaggacttcccgcacatctctgagttccccagcagctcgggatcctgctcacctggcccatccaaccccaccagcagcggggactgggacagcagctaccccagtggggagtgtggcatcagcacctgcagcctgctccccagggacaaatcgctctacctcacctaatcccgcctccctaccatccctgaggctcgctggaaggcactgctcagagcctgaagggctgacagcagaaaagaggccctggccagaggcagggtggcccatcggagagagcagtgacacacccattgcccgggggctgagtctcttcctcaacctcccaccagactctgcagaggcagcccactgcccaccaccagcccaaagaacctgcaggaaccttccgcccgctgacctgcttgctccagggtaactgtggaccctgtcctcgccctgcgcacggtaccctatgtctggacacccggccccagctccagccccagcccaggtgggccgcccctggcggggtcgcttaccaacggacacccaccccagatgcatgggccagagggccggcccccggcatagatgtgcacatcggttttccagtgtgaacaaaagattacgaaacctagaaactgttggttccgtgtaagtagttgactacgtgttttagaactgtgctgaagacatctgtaagactattttgtgggggaaaaaagtagtttcctttaaggtaaaaagcattttatatgatccttagcacatttttaagttttatcttaagggagacgcgcacaaaagcggctgccaaaccgtttcgtcatcctcacagcaaggaccggacgcttgctagccaccccggagcactgctctccttttaatcatgtattcatctattttaaattgccggcgacgacttttgtctatttatgaagaaaccttgagaacgaagttacagcttatcctaccgtgtgtgtggttttggggtttcgtttgggtttgggttcttgacgtcgtttgcagctgtttcctggccctggcgagtgtctgtcttggtgcccagtgcttctctcaaatctctttataataaaacttctgaaaagctg

SEQ ID NO: 22019 - DNA, 1271 bp, Homo sapiens
  misc_feature 1..1271: note = ENST00000413823
  source 1..1271: mol_type = unassigned DNA; mol_type = unassigned DNA
cgaagaagaagaaaaagaaggaccccaatgagccgcagaagcctgtgtcggcctacgcactcttcttcagagacactcaggccgccatcaagggtcagaaccccagtgccactttcggtgacgtgtccaaaatcgtggcctccatgtgggacagcctgggagaggaacagaagcaggacttcccgcacatctctgagttccccagcagctcgggatcctgctcacctggcccatccaaccccaccagcagcggggactgggacagcagctaccccagtggggagtgtggcatcagcacctgcagcctgctccccagggacaaatcgctctacctcacctaatcccgcctccctaccatccctgaggctcgctggaaggcactgctcagagcctgaagggctgacagcagaaaagaggccctggccagaggcagggtggcccatcggagagagcagtgacacacccattgcccgggggctgagtctcttcctcaacctcccaccagactctgcagaggcagcccactgcccaccaccagcccaaagaacctgcaggaaccttccgcccgctgacctgcttgctccagggtaactgtggaccctgtcctcgccctgcgcacggtaccctatgtctggacacccggccccagctccagccccagcccaggtgggccgcccctggcggggtcgcttaccaacggacacccaccccagatgcatgggccagagggccggcccccggcatagatgtgcacatcggttttccagtgtgaacaaaagattacgaaacctagaaactgttggttccgtgtaagtagttgactacgtgttttagaactgtgctgaagacatctgtaagactattttgtgggggaaaaaagtagtttcctttaaggtaaaaagcattttatatgatccttagcacatttttaagttttatcttaagggagacgcgcacaaaagcggctgccaaaccgtttcgtcatcctcacagcaaggaccggacgcttgctagccaccccggagcactgctctccttttaatcatgtattcatctattttaaattgccggcgacgacttttgtctatttatgaagaaaccttgagaacgaagttacagcttatcctaccgtgtgtgtggttttggggtttcgtttgggtttgggttcttgacgtcgtttgcagctgtttcctggccctggcgagtgtctgtcttggtgcccagtgcttctctcaaatctctttataataaaacttctgaaaagctgaaaa

SEQ ID NO: 22020 - DNA, 3124 bp, Homo sapiens
  misc_feature 1..3124: note = ENST00000407228
  source 1..3124: mol_type = unassigned DNA; mol_type = unassigned DNA
gaaccgacacgaggcttcacctgggaagcttcaagtctgcctacctgtgaaaggtcaggccccaacaccccttctgggaaatcctacagctaggatgcatttctctcactgaaccccatccagcagaggacagaagagtcagaagagggtagagaggatttagatactcatagaagatgtagtggaggatgaagtgccaacctcgctcgggagccaggcgcattgaggagagacttcattacctgataactacctatctgaaatttggaaataataataactatatgaatatggctgaggcgaacaatgcgttcttcgctgccagtgagacattccacacaccaagccttggggacgaggaattcgaaattccaccaatcacgcctcctccagagtcagaccctgccctaggcatgccggatgtactgctaccctttcaagccctcagcgatccattgccttcccagggaagtgaattcacaccccagtttccccctcaaagcctggacctcccttccattacaatctcaagaaatctcgtggaacaagatggcgtgcttcatagcagtgggttgcatatggatcagagccacacacaagtgtcccagtaccggcaggatccctccctgatcatgcggtccatcgtccacatgaccgatgctgcgcgttctggggtcatgcctcctgcccagctcaccaccatcaaccagtctcagctcagcgcccagttggggttgaatttgggaggtgccagtatgcctcacacatctccttcacctccagcaagcaaatcagccactccctccccttccagctccatcaatgaagaggatgctgatgaagccaacagagccattggagagaaaagagctgctccagactctggcaagaagcccaagactccaaagaaaaagaaaaagaaagatcccaatgagccacagaagccagtgtcagcatatgccctgtttttcagagacacacaggctgcaattaaaggtcaaaaccccaatgcaacctttggagaggtctcaaaaattgtagcatctatgtgggacagccttggagaagaacaaaagcaggtatataaaaggaaaacagaagctgccaaaaaagaatacctgaaggccctggcggcatacagggccagcctcgtttctaaggctgctgctgagtcagcagaagcccagaccatccgttctgttcagcagaccctggcgtcgaccaatctaacatcctctctccttctcaacactccactgtctcaacatggaacagtgtcagcatcacctcagactctccagcaatccctccctaggtcaatcgctcccaaacccttaaccatgagactccccatgaaccagattgtcacatcagtcaccattgcagccaacatgccctcgaacattggggctccactgataagctccatgggaacgaccatggttggctcagcaccctccacccaagtgagtccttcggtgcaaacccagcagcatcagatgcaattgcagcagcagcagcagcagcaacaacaacagatgcaacagatgcagcagcagcaactccagcagcaccaaatgcatcagcaaatccagcagcagatgcagcagcagcatttccagcaccacatgcagcagcacctgcagcagcagcagcagcatctccagcagcaaattaatcaacagcagctgcagcagcagctgcagcagcgcctccagctgcagcagctgcaacacatgcagcaccagtctcagccttctcctcggcagcactcccctgtcgcctctcagataacatcccccatccctgccatcgggagcccccagccagcctctcagcagcaccagtcgcaaatacagtctcagacacagactcaagtattatcgcaggtcagtattttctgaagacgcatatggcagacggatttgcgtataccaaggagagtggcataggagggaaaagcatatgtggctgaaacctgtaagttggtgttggttatgcagaaatgtgtaacagatcaaacggtcctctcaagtgtctattagataggcaataagaactgcagtgtagctgagtaacatcttttagctgactataaatcactttgtttttaaacaagaaaagctgtgctcttttatgtgatgccttttttatttattcaggctatacctacaatatgtgaatcaaactgtttaatgaatcctgggacatactgatgactataaactggcctctctgagtcatagaaaaatggccttatttctccagaagtgagtaaaccacacttccaggctatctgaactcctgaagccctaaaaataaaaagcacagttgtaactacctgaaatatgaagatccagtttcatacaaacatttgtatgacgtgaatagttgatggcatttttttgtcatgaaaaaaataatgtaaatcacagacttttgccaaagctcttattttttttcctaaatctctccagaaaaaaaatgcaagtgactaaattcaattattgactaatttccactttttatccatgacttctccaaatcaaaccacagtatatgttgtaacaatatctatgaccactgttagcccattatattcattccaattagaagaaatgtgaatactatattccgtgttttgagtgacaagtttcgaaaaataaaaacactgtatttttaaaagggaaatgcacttaaatgaaaacagttattacaaaagttaagatttaaaaagaaaaagcaagagtttttattatgatgtaataccagtagaatatttaaaaggcacaccacatctgaataatcaatgtaaatattttctttcaaagttgtaagttttcatatcatgtgctgtaaagttttcctaaatgaggctttaacgtaaacactggtgacataaaccattcattgctacgttgcttattgtgtttttatgctgttttatacttttttatgagttatgatagcagcaattaagttgtttgtattttgcttaactaaaacaaaaatgcttttatcttgctatagaataaacacatttcagtaaaaactgtggactgtattttgatgcaacaacaaagaaactgttcacttttcaaataaaatgatatgtcagatttca

SEQ ID NO: 22021 - DNA, 3414 bp, Homo sapiens
  misc_feature 1..3414: note = ENST00000566696
  source 1..3414: mol_type = unassigned DNA; mol_type = unassigned DNA
tttgatgataatcttttcattttaaataatgtggaattttttcccctttgttcaaaaagggcactacaaagggattaggtccatcctgcttgcctttccattgatcatctttctgaacccttgtgctgtcctggtgggtttccaaactttgaagctgcctctgcgtgtctcattattgtcaccgggcatttgaaattttattccaagttcattttaaagcaaggcagtatgagaggtattcagaaattagccatgcttgtgggagatacttccttaggggcttcgtctcctctccttccccttgcaactcctccacacaaatgaagggaagaatgggttccttgggggtcgatcccccccttactccttgcatgaaactccaattaccattaaaagaagttaacttttacatatccacagaagaatagatcaactcctatgagtgataaaatagaataattgttttcaagaatgaagagtggaaagtccttgattttgtttacaaatcatgaacttatttcaggaactcattcctagaagcttgttttgttgggaaggtgcaacattagaaatttctttttagtttgcactgagtttattactgtagatagcagactgattttctgtcccagaaatataattctgagggactggaaaagtgctgcacctaacttttaaactctggagagaaagatgcatgttgactgaacacccagccatcagaccacttaggaaaaggagaagcccaaatcatgtttaatatgctggaattttatttatgtaactcagtggggtcactaatggaaatctcctagcttggatgatttctgacttttaattttgctccaaaagaaaaccaacattgaaatgctttgctcttttctcttctgtcttcatcattttacctgttgtttttatcctcttgtttggtatagtttagaaaggtatctgagggaaagaagacattgatggagaaactcattattttctctaaagtaagccatttgcagcaaagcttattcttcttgctaccttatttattgccttagcatgaggttttcagctgttctcaagaaaaagtgattctcaagtaatctgtattgcatccagaaatctttttcttatttgcaatagtaaatataaaaattgtgctccagtgagggtggcagggttctgttttgttttaatatccgtgtgtgtgtgtgtgtgtgtgtgtgtgtgtgtgtgcatgcgctaacatttaaaaatcaaagccaaggagaccaacctttttatgtgagttgtgtttatgtgacctaatttgtgcagcagctattttatagctgagaatttatacgctaaaggtggtgctaattgtggtcttttaataggtatataaaaggaaaacagaagctgccaaaaaagaatacctgaaggccctggcggcatacagggccagcctcgtttctaaggctgctgctgagtcagcagaagcccagaccatccgttctgttcagcagaccctggcgtcgaccaatctaacatcctctctccttctcaacactccactgtctcaacatggaacagtgtcagcatcacctcagactctccagcaatccctccctaggtcaatcgctcccaaacccttaaccatgagactccccatgaaccagattgtcacatcagtcaccattgcagccaacatgccctcgaacattggggctccactgataagctccatgggaacgaccatggttggctcagcaccctccacccaagtgagtccttcggtgcaaacccagcagcatcagatgcaattgcagcagcagcagcagcagcaacaacaacagatgcaacagatgcagcagcagcaactccagcagcaccaaatgcatcagcaaatccagcagcagatgcagcagcagcatttccagcaccacatgcagcagcacctgcagcagcagcagcagcatctccagcagcaaattaatcaacagcagctgcagcagcagctgcagcagcgcctccagctgcagcagctgcaacacatgcagcaccagtctcagccttctcctcggcagcactcccctgtcgcctctcagataacatcccccatccctgccatcgggagcccccagccagcctctcagcagcaccagtcgcaaatacagtctcagacacagactcaagtattatcgcaggtcagtattttctgaagacgcatatggcagacggatttgcgtataccaaggagagtggcataggagggaaaagcatatgtggctgaaacctgtaagttggtgttggttatgcagaaatgtgtaacagatcaaacggtcctctcaagtgtctattagataggcaataagaactgcagtgtagctgagtaacatcttttagctgactataaatcactttgtttttaaacaagaaaagctgtgctcttttatgtgatgccttttttatttattcaggctatacctacaatatgtgaatcaaactgtttaatgaatcctgggacatactgatgactataaactggcctctctgagtcatagaaaaatggccttatttctccagaagtgagtaaaccacacttccaggctatctgaactcctgaagccctaaaaataaaaagcacagttgtaactacctgaaatatgaagatccagtttcatacaaacatttgtatgacgtgaatagttgatggcatttttttgtcatgaaaaaaataatgtaaatcacagacttttgccaaagctcttattttttttcctaaatctctccagaaaaaaaatgcaagtgactaaattcaattattgactaatttccactttttatccatgacttctccaaatcaaaccacagtatatgttgtaacaatatctatgaccactgttagcccattatattcattccaattagaagaaatgtgaatactatattccgtgttttgagtgacaagtttcgaaaaataaaaacactgtatttttaaaagggaaatgcacttaaatgaaaacagttattacaaaagttaagatttaaaaagaaaaagcaagagtttttattatgatgtaataccagtagaatatttaaaaggcacaccacatctgaataatcaatgtaaatattttctttcaaagttgtaagttttcatatcatgtgctgtaaagttttcctaaatgaggctttaacgtaaacactggtgacataaaccattcattgctacgttgcttattgtgtttttatgctgttttatacttttttatgagttatgatagcagcaattaagttgtttgtattttgcttaactaaaacaaaaatgcttttatcttgctatagaataaacacatttcagtaaaaactgtggactgtattttgatgcaacaacaaagaaactgttcacttttcaaataaaatgatatgtcagatttc

SEQ ID NO: 22022 - DNA, 3233 bp, Homo sapiens
  misc_feature 1..3233: note = ENST00000219746
  source 1..3233: mol_type = unassigned DNA; mol_type = unassigned DNA
ccgcgcccccggcgcccggcccgcgcgcagcgctgcctcggtgccccggcggggcgcgtccccccggccgcctcccgctctcccgcggctcgcgtggccgcgcctttgtgtgcggcggccgcggctcccgagctcctcgggctctgggtcccggcgcccctccggccgcgagtcccacgcgccacccccgggcgccctcgacggtggatctagcggcggcgaggaggcgggtcccggccccggcgaaccccagtcccggcccccggccccgggcccagcttcggcatggatgtgaggttctaccccgcggcggccggggaccctgccagcctggacttcgcgcagtgcctggggtactacggctacagcaagtttggaaataataataactatatgaatatggctgaggcgaacaatgcgttcttcgctgccagtgagcagacattccacacaccaagccttggggacgaggaattcgaaattccaccaatcacgcctcctccagagtcagaccctgccctaggcatgccggatgtactgctaccctttcaagccctcagcgatccattgccttcccagggaagtgaattcacaccccagtttccccctcaaagcctggacctcccttccattacaatctcaagaaatctcgtggaacaagatggcgtgcttcatagcagtgggttgcatatggatcagagccacacacaagtgtcccagtaccggcaggatccctccctgatcatgcggtccatcgtccacatgaccgatgctgcgcgttctggggtcatgcctcctgcccagctcaccaccatcaaccagtctcagctcagcgcccagttggggttgaatttgggaggtgccagtatgcctcacacatctccttcacctccagcaagcaaatcagccactccctccccttccagctccatcaatgaagaggatgctgatgaagccaacagagccattggagagaaaagagctgctccagactctggcaagaagcccaagactccaaagaaaaagaaaaagaaagatcccaatgagccacagaagccagtgtcagcatatgccctgtttttcagagacacacaggctgcaattaaaggtcaaaaccccaatgcaacctttggagaggtctcaaaaattgtagcatctatgtgggacagccttggagaagaacaaaagcaggtatataaaaggaaaacagaagctgccaaaaaagaatacctgaaggccctggcggcatacagggccagcctcgtttctaaggctgctgctgagtcagcagaagcccagaccatccgttctgttcagcagaccctggcgtcgaccaatctaacatcctctctccttctcaacactccactgtctcaacatggaacagtgtcagcatcacctcagactctccagcaatccctccctaggtcaatcgctcccaaacccttaaccatgagactccccatgaaccagattgtcacatcagtcaccattgcagccaacatgccctcgaacattggggctccactgataagctccatgggaacgaccatggttggctcagcaccctccacccaagtgagtccttcggtgcaaacccagcagcatcagatgcaattgcagcagcagcagcagcagcaacaacaacagatgcaacagatgcagcagcagcaactccagcagcaccaaatgcatcagcaaatccagcagcagatgcagcagcagcatttccagcaccacatgcagcagcacctgcagcagcagcagcagcatctccagcagcaaattaatcaacagcagctgcagcagcagctgcagcagcgcctccagctgcagcagctgcaacacatgcagcaccagtctcagccttctcctcggcagcactcccctgtcgcctctcagataacatcccccatccctgccatcgggagcccccagccagcctctcagcagcaccagtcgcaaatacagtctcagacacagactcaagtattatcgcaggtcagtattttctgaagacgcatatggcagacggatttgcgtataccaaggagagtggcataggagggaaaagcatatgtggctgaaacctgtaagttggtgttggttatgcagaaatgtgtaacagatcaaacggtcctctcaagtgtctattagataggcaataagaactgcagtgtagctgagtaacatcttttagctgactataaatcactttgtttttaaacaagaaaagctgtgctcttttatgtgatgccttttttatttattcaggctatacctacaatatgtgaatcaaactgtttaatgaatcctgggacatactgatgactataaactggcctctctgagtcatagaaaaatggccttatttctccagaagtgagtaaaccacacttccaggctatctgaactcctgaagccctaaaaataaaaagcacagttgtaactacctgaaatatgaagatccagtttcatacaaacatttgtatgacgtgaatagttgatggcatttttttgtcatgaaaaaaataatgtaaatcacagacttttgccaaagctcttattttttttcctaaatctctccagaaaaaaaatgcaagtgactaaattcaattattgactaatttccactttttatccatgacttctccaaatcaaaccacagtatatgttgtaacaatatctatgaccactgttagcccattatattcattccaattagaagaaatgtgaatactatattccgtgttttgagtgacaagtttcgaaaaataaaaacactgtatttttaaaagggaaatgcacttaaatgaaaacagttattacaaaagttaagatttaaaaagaaaaagcaagagtttttattatgatgtaataccagtagaatatttaaaaggcacaccacatctgaataatcaatgtaaatattttctttcaaagttgtaagttttcatatcatgtgctgtaaagttttcctaaatgaggctttaacgtaaacactggtgacataaaccattcattgctacgttgcttattgtgtttttatgctgttttatacttttttatgagttatgatagcagcaattaagttgtttgtattttgcttaactaaaacaaaaatgcttttatcttgctatagaataaacacatttcagtaaaaactgtggactgtattttgatgcaacaacaaagaaactgttcacttttcaaataaaatgatatgtcagatt

SEQ ID NO: 22023 - DNA, 572 bp, Homo sapiens
  misc_feature 1..572: note = ENST00000563091
  source 1..572: mol_type = unassigned DNA; mol_type = unassigned DNA
agcgctccgaggcagtggggacaaagaggaccggagcgggaaggggggcgagtttggaaataataataactatatgaatatggctgaggcgaacaatgcgttcttcgctgccagtgagcagacattccacacaccaagccttggggacgaggaattcgaaattccaccaatcacgcctcctccagagtcagaccctgccctaggcatgccggatgtactgctaccctttcaagccctcagcgatccattgccttcccagggaagtgaattcacaccccagtttccccctcaaagcctggacctcccttccattacaatctcaagaaatctcgtggaacaagatggcgtgcttcatagcagtgggttgcatatggatcagagccacacacaagtgtcccagtaccggcaggatccctccctgatcatgcggtccatcgtccacatgaccgatgctgcgcgttctggggtcatgcctcctgcccagctcaccaccatcaaccagtctcagctcagcgcccagttggggttgaatttgggaggtgccagtatgcctcacacatctccttcacctc

SEQ ID NO: 22024 - DNA, 548 bp, Homo sapiens
  misc_feature 1..548: note = ENST00000568436
  source 1..548: mol_type = unassigned DNA; mol_type = unassigned DNA
cgagtcccacgcgccacccccgggcgccctcgacggtggatctagcggcggcgaggaggcgggtcccggccccggcgaaccccagtcccggcccccggccccgggcccagcttcggcatggatgtgaggttctaccccgcggcggccggggaccctgccagcctggacttcgcgcagtgcctggggtactacggctacagcaagcattttgcctgcaggctagaatctgtgttgttcattgcagtttgtgctcagccacggaaggcacctatccctagcacccaacccccatccacctagggctctataaaaagtttggaaataataataactatatgaatatggctgaggcgaacaatgcgttcttcgctgccagtgagacattccacacaccaagccttggggacgaggaattcgaaattccaccaatcacgcctcctccagagtcagaccctgccctaggcatgccggatgtactgctaccctttcaagccctcagcgatccattgccttcccagggaagtgaattcacaccccagtttccccct

SEQ ID NO: 22025 - DNA, 4184 bp, Homo sapiens
  misc_feature 1..4184: note = ENST00000374810
  source 1..4184: mol_type = unassigned DNA; mol_type = unassigned DNA
acaatcagctgtttgaacgttccaatttgtgccgtgagccccgccgcagcggccgcacagactcaaagccccgcgggcgagctcagcagcccggagcgaccgcggccccgccgcctcccccgcgagtcccggcgatgcggcccggcctgtgagcggccggcgaccctgggacgccccgccgcacaactacctcaacgccgtgccgcccccctcccgcccccagggaatctctggagattggttcaccttttgtggtcctgaccccttctgtcctcactgtaccttgaagtcctagagtccaataaaatcgctgcctcccagctgtttggatcacagagaggtttttgcactgccatagggcgcccccgtgaggcgcttcgccccccaccatgttccagcgcctctccagcctcttcttcagcaccccctcgccccccgaagaccccgactgcccccgcgccttcgtgtcggaggaggatgaagtggacggctggctcatcattgacctgccggacagctacgcggctccacccagccccggggccgcccctgcccccgcgggccgccctccgcccgcgccctccttgatggacgagagctggtttgttacccctcccgcctgttttacggcagaggggcctggactcggtcccgcccgcctccagagcagtcccctggaggacctcctcatcgagcaccccagcatgtccgtttacgtcaccggcagcaccatagtgctagagcccgggtccccttccccgctcccggacgcggccctgcctgacggcgacctcagcgaaggggaattgacgcccgcccgccgcgagccgcgggccgcgcgccacgccgctcctctcccagcgcgggcggcgctgctggagaaggcgggccaggtgcggcggctgcagcgggcccggcagcgggcagagcgccacgcgctgagcgccaaggcggtgcagcggcagaaccgagcccgcgagagccgtccgcgccggtccaagaaccagagcagcttcatctaccagccgtgccagcgccagttcaactactgagcgtccaccggccgcgccacgaaccccttgccgatcccgatccctgtcgggctcctccgactcctcgggctggacaccgaaacctcccttcttaaagcgtgtgaggttgggtgatagccgttccttccccgacaccctcaatttccccatctctgatcctctaatctgcctctgaacccattcacccttcaccctcactcctggtccccatacccagcatctaatcatccatgccccctactcctggcccctccatcctttcttctctggtccccatccctgtctctccctttcacccttgccctccagtcctctacctctggcctgcccctatttctgaaagcttcttccagtccctgatctggctcattccccaccttcaactcccaccttacatgtctcacactatcccatggttggcattacactcactcctgttcccttattcttcattcccagtaattccctaccaaatggtggggaccctgagcccagctctgaccaggtagagcctgtgcagcctgggctgctgtcattgccctccagtaagggctcagggttttgcttttagtctccccttccttctgccttgggggcggtactctgtggagctgcttaggcctggaaaggtacagtatgtagaagaggactgtgagacgtgagttagagggagaagatggagggaatctagggaacgaggcagcctattggagatgcggacaggacagacacgttgagaagctgcagggagcagggcaccaagggagtgtgcactgtgcttgctcagagaggccaaaccctgctcccaggctgaagcctggagtctgcccccacttcccttttctataatccacccttctgcaggccctgaaatctgaagggcttagttagtaccttgccactctacccccaacacgtcacccgagtagaagctgggcaaggccctaccatcctggccgtctgttcacaagcccaaggtgctagaactagcttaggagacatgcaggccacagggcttctaggcagggaaagggcacacaccctaggtcagcgtgcagagcagtgatgctggaggacacaccatggggtgaagccatcccaaggctgacagctcagtcttcaccttgcctctggccttgtatttcacaccctgctcagtatggctagccagcagtcctgagtaggagtccaggactcccactgtctcaatctgcaaattgttcctatccaggttcagggccttcagggggcctcttttcattttctcccacaggcctctctttctttctaggttgctggggagaaatgggtaccctatgatccccctccccttctcctccagtaaatacctggaagagggaacctgaatccctgggggagacagaaggggcaggggccaccagcctccccttcttgtggtgagactgaattttgggctcagacaccagcaacagcctcttgggatgccctgagttgcttcccatttcctctttctagccgtccttttctagtgtgtgctcactcttcctaggaacttttaagacttcttggtacctatgaacataggtcctcccctcaccccaactctaggtttccaggcctcacagccaagctgaagcttggagaaaactctgcattcccatgagggcaaaggcagctgccctccctgaccctatagccccaggcctcatggggggtatgtggggaagggatggggtatccccatggatgctgggatgaggacagaggaagacctgatggggtctcctattccagggaataagccaaattaacactaaaaacggatcaaagctcccacgccagtccactagggccccagtagttgacagccttgctcctctcccaagttctccttcagaacctagttgcttttattcttccagctaccacttgggcacttcacagccagcctagggtcttcggcacctccaagagctgaatctccctccaacccttcttgcctactcctcactgccagctgggacctaggctcagtcctgtgtggtgcccatgatccttctggtgggggaagagtttaagttatagggcatttggctcaaattttaaaaggccttttgtttacctatatttctggaggctcctgtattctagaacccaatctctcacctgcttggttgcaaggctcatatttttttgtacctttcctatagattctgtagcatttgagtgtggcaatattttaattgtgtatagatttctaagaaccaacactactcagtctcctgctagtctgactcctgaagcatcagcccttgtcatactgtattgactgtgtacgtgcctttcaccttgagcatgcttcaggatttttttttaaaccacagaacttgaatacatgagggaaccagagttcaaagtcctatgcaaccttaggagggggttagagagtctgttttgattgatgttttctgaggccctagaggagtttgtatcaatttgtgagtattaatgtcagtactaccagcactttgccaaaactgtcagagggacccgtttctagagtgagtcccagttacatcaaacagtgacttccagttattccccagtaagtctgagtggttccttcaagctgggtgtctttccagcctttgccagtctagccccagcagggcaccgtgtatgaatgcagtttggtgctgttttagagtatgcctgctccccagccccctgcctggaaccctctgagcaacttgctctgacctataatgtcttaggtgcaacacggaccccaccagagctcttggatacccccctagatccatgtggctttatgtgaggggactgaatgcagacacaccatagcccccttctactactttccctctcgccctgccacctagttccacatggaaccaacaagttgagtgcatccctgttgggtgttttgtgttgagactggctgaaatgaggagactttgaccatgtgacgtgtcaacagactcaaggagacaaccacctcaactgggtcatgtggcatgcctgtgtatgtgtgtaacagaattctgattgttagactgtaatgctattcctctatgggagaaaaaaattaatataaagaaaaacaaataaaaatatatttaaagcacatga

SEQ ID NO: 22026 - DNA, 4018 bp, Homo sapiens
  misc_feature 1..4018: note = ENST00000374809
  source 1..4018: mol_type = unassigned DNA; mol_type = unassigned DNA
cggccgcacagactcaaagccccgcgggcgagctcagcagcccggagcgaccgcggccccgccgcctcccccgcgagtcccggcgatgcggcccggcctgtgagcggccggcgaccctgggacgccccgccgcacaactacctcaacgccgtgccgcccccctcccgcccccaggtttttgcactgccatagggcgcccccgtgaggcgcttcgccccccaccatgttccagcgcctctccagcctcttcttcagcaccccctcgccccccgaagaccccgactgcccccgcgccttcgtgtcggaggaggatgaagtggacggctggctcatcattgacctgccggacagctacgcggctccacccagccccggggccgcccctgcccccgcgggccgccctccgcccgcgccctccttgatggacgagagctggtttgttacccctcccgcctgttttacggcagaggggcctggactcggtcccgcccgcctccagagcagtcccctggaggacctcctcatcgagcaccccagcatgtccgtttacgtcaccggcagcaccatagtgctagagcccgggtccccttccccgctcccggacgcggccctgcctgacggcgacctcagcgaaggggaattgacgcccgcccgccgcgagccgcgggccgcgcgccacgccgctcctctcccagcgcgggcggcgctgctggagaaggcgggccaggtgcggcggctgcagcgggcccggcagcgggcagagcgccacgcgctgagcgccaaggcggtgcagcggcagaaccgagcccgcgagagccgtccgcgccggtccaagaaccagagcagcttcatctaccagccgtgccagcgccagttcaactactgagcgtccaccggccgcgccacgaaccccttgccgatcccgatccctgtcgggctcctccgactcctcgggctggacaccgaaacctcccttcttaaagcgtgtgaggttgggtgatagccgttccttccccgacaccctcaatttccccatctctgatcctctaatctgcctctgaacccattcacccttcaccctcactcctggtccccatacccagcatctaatcatccatgccccctactcctggcccctccatcctttcttctctggtccccatccctgtctctccctttcacccttgccctccagtcctctacctctggcctgcccctatttctgaaagcttcttccagtccctgatctggctcattccccaccttcaactcccaccttacatgtctcacactatcccatggttggcattacactcactcctgttcccttattcttcattcccagtaattccctaccaaatggtggggaccctgagcccagctctgaccaggtagagcctgtgcagcctgggctgctgtcattgccctccagtaagggctcagggttttgcttttagtctccccttccttctgccttgggggcggtactctgtggagctgcttaggcctggaaaggtacagtatgtagaagaggactgtgagacgtgagttagagggagaagatggagggaatctagggaacgaggcagcctattggagatgcggacaggacagacacgttgagaagctgcagggagcagggcaccaagggagtgtgcactgtgcttgctcagagaggccaaaccctgctcccaggctgaagcctggagtctgcccccacttcccttttctataatccacccttctgcaggccctgaaatctgaagggcttagttagtaccttgccactctacccccaacacgtcacccgagtagaagctgggcaaggccctaccatcctggccgtctgttcacaagcccaaggtgctagaactagcttaggagacatgcaggccacagggcttctaggcagggaaagggcacacaccctaggtcagcgtgcagagcagtgatgctggaggacacaccatggggtgaagccatcccaaggctgacagctcagtcttcaccttgcctctggccttgtatttcacaccctgctcagtatggctagccagcagtcctgagtaggagtccaggactcccactgtctcaatctgcaaattgttcctatccaggttcagggccttcagggggcctcttttcattttctcccacaggcctctctttctttctaggttgctggggagaaatgggtaccctatgatccccctccccttctcctccagtaaatacctggaagagggaacctgaatccctgggggagacagaaggggcaggggccaccagcctccccttcttgtggtgagactgaattttgggctcagacaccagcaacagcctcttgggatgccctgagttgcttcccatttcctctttctagccgtccttttctagtgtgtgctcactcttcctaggaacttttaagacttcttggtacctatgaacataggtcctcccctcaccccaactctaggtttccaggcctcacagccaagctgaagcttggagaaaactctgcattcccatgagggcaaaggcagctgccctccctgaccctatagccccaggcctcatggggggtatgtggggaagggatggggtatccccatggatgctgggatgaggacagaggaagacctgatggggtctcctattccagggaataagccaaattaacactaaaaacggatcaaagctcccacgccagtccactagggccccagtagttgacagccttgctcctctcccaagttctccttcagaacctagttgcttttattcttccagctaccacttgggcacttcacagccagcctagggtcttcggcacctccaagagctgaatctccctccaacccttcttgcctactcctcactgccagctgggacctaggctcagtcctgtgtggtgcccatgatccttctggtgggggaagagtttaagttatagggcatttggctcaaattttaaaaggccttttgtttacctatatttctggaggctcctgtattctagaacccaatctctcacctgcttggttgcaaggctcatatttttttgtacctttcctatagattctgtagcatttgagtgtggcaatattttaattgtgtatagatttctaagaaccaacactactcagtctcctgctagtctgactcctgaagcatcagcccttgtcatactgtattgactgtgtacgtgcctttcaccttgagcatgcttcaggatttttttttaaaccacagaacttgaatacatgagggaaccagagttcaaagtcctatgcaaccttaggagggggttagagagtctgttttgattgatgttttctgaggccctagaggagtttgtatcaatttgtgagtattaatgtcagtactaccagcactttgccaaaactgtcagagggacccgtttctagagtgagtcccagttacatcaaacagtgacttccagttattccccagtaagtctgagtggttccttcaagctgggtgtctttccagcctttgccagtctagccccagcagggcaccgtgtatgaatgcagtttggtgctgttttagagtatgcctgctccccagccccctgcctggaaccctctgagcaacttgctctgacctataatgtcttaggtgcaacacggaccccaccagagctcttggatacccccctagatccatgtggctttatgtgaggggactgaatgcagacacaccatagcccccttctactactttccctctcgccctgccacctagttccacatggaaccaacaagttgagtgcatccctgttgggtgttttgtgttgagactggctgaaatgaggagactttgaccatgtgacgtgtcaacagactcaaggagacaaccacctcaactgggtcatgtggcatgcctgtgtatgtgtgtaacagaattctgattgttagactgtaatgctattcctctatgggagaaaaaaattaatataaagaaaaacaaataaaaatatatttaaagcacatga

SEQ ID NO: 22027 - DNA, 477 bp, Homo sapiens
  misc_feature 1..477: note = ENST00000451665
  source 1..477: mol_type = unassigned DNA; mol_type = unassigned DNA
actcaaagccccgcgggcgagctcagcagcccggagcgaccgcggccccgccgcctcccccgcgagtcccggcgatgcggcccggcctgtgagcggccggcgaccctgggacgccccgccgcacaactacctcaacgccgtgccgcccccctcccgcccccaggtttttgcactgccatagggcgcccccgtgaggcgcttcgccccccaccatgttccagcgcctctccagcctcttcttcagcaccccctcgccccccgaagaccccgactgcccccgcgccttcgtgtcggaggaggatgaagtggacggctggctcatcattgacctgccggaggggcctggactcggtcccgcccgcctccagagcagtcccctggaggacctcctcatcgagcaccccagcatgtccgtttacgtcaccggcagcaccatagtgctagagcccgggtccccttccccgctcccggacgcgg

SEQ ID NO: 22028 - DNA, 442 bp, Homo sapiens
  misc_feature 1..442: note = ENST00000414082
  source 1..442: mol_type = unassigned DNA; mol_type = unassigned DNA
tcctcccgtgacccggtagccgctgtgtcggggctgggccctggggaatctctggagattggttcaccttttgtggtcctgaccccttctgtcctcactgtaccttgaagtcctagagtccaataaaatcgctgcctcccagctgtttggatcacagagaggtttttgcactgccatagggcgcccccgtgaggcgcttcgccccccaccatgttccagcgcctctccagcctcttcttcagcaccccctcgccccccgaagaccccgactgcccccgcgccttcgtgtcggaggaggatgaagtggacggctggctcatcattgacctgccggacagctacgcggctccacccagccccggggccgcccctgcccccgcgggccgccctccgcccgcgccctccttgatggacgagagctggtttgttacccctcccgcct

SEQ ID NO: 22029 - DNA, 5188 bp, Homo sapiens
  misc_feature 1..5188: note = ENST00000378295
  source 1..5188: mol_type = unassigned DNA; mol_type = unassigned DNA
tgcctccccgcccgcgcacccgcccggaggctcgcgcgcccgcgaaggggacgcagcgaaaccggggcccgcgccaggccagccgggacggacgccgatgcccggggctgcgacggctgcagagcgagctgccctcggaggccggcgtggggaagatggcccagtccaccgccacctcccctgatgggggcaccacgtttgagcacctctggagctctctggaaccagacagcacctacttcgaccttccccagtcaagccgggggaataatgaggtggtgggcggaacggattccagcatggacgtcttccacctggagggcatgactacatctgtcatggcccagttcaatctgctgagcagcaccatggaccagatgagcagccgcgcggcctcggccagcccctacaccccagagcacgccgccagcgtgcccacccactcgccctacgcacaacccagctccaccttcgacaccatgtcgccggcgcctgtcatcccctccaacaccgactaccccggaccccaccactttgaggtcactttccagcagtccagcacggccaagtcagccacctggacgtactccccgctcttgaagaaactctactgccagatcgccaagacatgccccatccagatcaaggtgtccaccccgccacccccaggcaccgccatccgggccatgcctgtttacaagaaagcggagcacgtgaccgacgtcgtgaaacgctgccccaaccacgagctcgggagggacttcaacgaaggacagtctgctccagccagccacctcatccgcgtggaaggcaataatctctcgcagtatgtggatgaccctgtcaccggcaggcagagcgtcgtggtgccctatgagccaccacaggtggggacggaattcaccaccatcctgtacaacttcatgtgtaacagcagctgtgtagggggcatgaaccggcggcccatcctcatcatcatcaccctggagatgcgggatgggcaggtgctgggccgccggtcctttgagggccgcatctgcgcctgtcctggccgcgaccgaaaagctgatgaggaccactaccgggagcagcaggccctgaacgagagctccgccaagaacggggccgccagcaagcgtgccttcaagcagagcccccctgccgtccccgcccttggtgccggtgtgaagaagcggcggcatggagacgaggacacgtactaccttcaggtgcgaggccgggagaactttgagatcctgatgaagctgaaagagagcctggagctgatggagttggtgccgcagccactggtggactcctatcggcagcagcagcagctcctacagaggccgagtcacctacagcccccgtcctacgggccggtcctctcgcccatgaacaaggtgcacgggggcatgaacaagctgccctccgtcaaccagctggtgggccagcctcccccgcacagttcggcagctacacccaacctggggcccgtgggccccgggatgctcaacaaccatggccacgcagtgccagccaacggcgagatgagcagcagccacagcgcccagtccatggtctcggggtcccactgcactccgccacccccctaccacgccgaccccagcctcgtcagttttttaacaggattggggtgtccaaactgcatcgagtatttcacctcccaagggttacagagcatttaccacctgcagaacctgaccattgaggacctgggggccctgaagatccccgagcagtaccgcatgaccatctggcggggcctgcaggacctgaagcagggccacgactacagcaccgcgcagcagctgctccgctctagcaacgcggccaccatctccatcggcggctcaggggaactgcagcgccagcgggtcatggaggccgtgcacttccgcgtgcgccacaccatcaccatccccaaccgcggcggcccaggcggcggccctgacgagtgggcggacttcggcttcgacctgcccgactgcaaggcccgcaagcagcccatcaaggaggagttcacggaggccgagatccactgagggcctcgcctggctgcagcctgcgccaccgcccagagacccaagctgcctcccctctccttcctgtgtgtccaaaactgcctcaggaggcaggaccttcgggctgtgcccggggaaaggcaaggtccggcccatccccaggcacctcacaggccccaggaaaggcccagccaccgaagccgcctgtggacagcctgagtcacctgcagaaccttctggagctgccctagtgctgggcttgtggggcgggggctggcccactctcagccctgccactgccccggcgtgctccatggcaggcgtgggtggggaccgcagcgtcggctccgacttccaggcttcatcctagagactgtcatctcccaaccaggcgaggtccttccaaaggaaaggatcctctttgctgatggactgccaaaaagtattttgcgacatcttttggttctggatagtagtgagcagccaagtgactgtgtctgaaacaccagtgtattttcagggaatgtccctaactgcgtcttgcccgcgccgggggctggggactctctctgctggacttgggactggcctctgcccccagcacgctgtattctgcaggaccgcctccttcctgcccctaacaacaaccacagtgttgctgaaattggagaaaactggggagggcgcaaccccccccaggcgcggggaagcatgtggtaccgcctcagccagtgcccctcagcctggccacagtcgcctctcctcggggacccctcagcagaaagggacagcctgtccttagaggactggaaattgtcaatatttgataaaatgatacccttttctacatggtgggtcagcttttttttttttttttttaactttctttctcagcattctctttggagttcaacctagcgcccatgagccaggctgaggaagctgagtgagaagccaggtgggcgggacttgttcccaggaaggccgggtggggaggaagcctagagggaaccccaggaagggcaaatccaggcaaatctgcaggaatgctctgccatgggagcagctcctcccttgccacggccaccttctctagcactgcaaggtccacagggcattgctttcctttctaggcggtggcagtcagggaacagactgaggtaggtgtaggggggtctaggccttcgtggagcaccccagggagttagtaggccccggggagacagagtctgcacaggccctttctggggccacctccatccacgaggagcagcctgagccttggtggccgaaccttgaccgtcccggagcacagcttcagggcagggaaccggagcccctggggggcctcacgggtgtgacgaggcccttcattgcaggcaggtgggccaatgggagccctcacccacgcaagccgagacaccacccagagtgcaggctgcctggccccttctggcacggccagctccacaccccctgcctagggtatgtgtggtcctaagggctaggagcttcccctactaacatctcccagaaaaagcagttaagcccctcagggcacagcaaggttagacacagcccccatccccagatcaggactccatcttgctaagtggcatcaccgtcaccagcctccccttatttaaaagcagcgactggtgttgccgcaggtacctggtctacgaagacgcaggcatccctctcccaccgtccacctccccgggggccgctgacagcacagtcgcctgggtgcacgcttgtgggggcagcaggaacggggctgtcggctctcaggggatctggctgcagccagggcgagggcctggcccttccttccagctccttccggctccttccagctgaagggcaggaagctctggccgcttagcttctagggttccatctccctagaaaggtgcccacgcccagggcatcagtcagtagcggcagcagcagcagactcggggctttcccagggtggcgcagccaccccagctgcatgtcacctcagctctccatcttattgccattttgtagatgaggaagctgagaccagaaaggctaagacccatgccccaggcaccacacccatctcttgggggctgggcacctgctacccgaggccacctcctgaagcccccactcttcccccatgttccacttcaggagccgcgggggcccatcctgacacccggggttcctcagcccagcgcagatgtgcttcagttccagagggcttgttgatttgtttcttaggtacgttacctgtccaccctgagtccagtgaggctgtcccaagagcccctgtagtgtgctcctgggaagggctgggggggctgggggggctgggagaggcccaggggcagctgtcactggaaccccagccagatgtccaaggaagccggccagaacacggagcagccagatggccccagctgcacctgtctagggagcccatgcagcctccttgcactggagaagcagctgtgaaagtagacagagttgagacttcgccgtggtcaggagaaaatgcaaattcccaggaacaagaatcctttaagtgatatgtttttataaaactaaacaaatcaacaaataaatcttgaaggcggatggttttcccagcagtgcaggggttggagggaggctgctggcactcctggggccaagggggacaggcagtggtcctgagtctgctcagagaggcaaggcagaaggagctcgccaggcaggtcagctcacatctgtccaagtcgctctggtcagaaacagcgactctcccccattcccccagcgttcccaccaggcctgggctgctgggaagcccttgctgtacccaggagcccgacccgcagtatcctggcacagagccacttgtcactcagaacagtcagtgtctccaacgcacaaacatccactcctctgttaccagttaaagcactttaatgctttaaggtgaaaacgaaatcccatccgtgtttttcgtgtaagatcgtgcttctccgagcagtattaatggacgccctccaatgacataacaactgtttttggtaatgtaatcttgggaaaatgtgttatttttttagctgtgtttcagtggggatttttgtttttgtaacataataaagtgtatgttccaatga

SEQ ID NO: 22030 - DNA, 4806 bp, Homo sapiens
  misc_feature 1..4806: note = ENST00000604074
  source 1..4806: mol_type = unassigned DNA; mol_type = unassigned DNA
tgcctccccgcccgcgcacccgcccggaggctcgcgcgcccgcgaaggggacgcagcgaaaccggggcccgcgccaggccagccgggacggacgccgatgcccggggctgcgacggctgcagagcgagctgccctcggaggccggcgtggggaagatggcccagtccaccgccacctcccctgatgggggcaccacgtttgagcacctctggagctctctggaaccagacagcacctacttcgaccttccccagtcaagccgggggaataatgaggtggtgggcggaacggattccagcatggacgtcttccacctggagggcatgactacatctgtcatggcccagttcaatctgctgagcagcaccatggaccagatgagcagccgcgcggcctcggccagcccctacaccccagagcacgccgccagcgtgcccacccactcgccctacgcacaacccagctccaccttcgacaccatgtcgccggcgcctgtcatcccctccaacaccgactaccccggaccccaccactttgaggtcactttccagcagtccagcacggccaagtcagccacctggacgtactccccgctcttgaagaaactctactgccagatcgccaagacatgccccatccagatcaaggtgtccaccccgccacccccaggcaccgccatccgggccatgcctgtttacaagaaagcggagcacgtgaccgacgtcgtgaaacgctgccccaaccacgagctcgggagggacttcaacgaaggacagtctgctccagccagccacctcatccgcgtggaaggcaataatctctcgcagtatgtggatgaccctgtcaccggcaggcagagcgtcgtggtgccctatgagccaccacaggtggggacggaattcaccaccatcctgtacaacttcatgtgtaacagcagctgtgtagggggcatgaaccggcggcccatcctcatcatcatcaccctggagatgcgggatgggcaggtgctgggccgccggtcctttgagggccgcatctgcgcctgtcctggccgcgaccgaaaagctgatgaggaccactaccgggagcagcaggccctgaacgagagctccgccaagaacggggccgccagcaagcgtgccttcaagcagagcccccctgccgtccccgcccttggtgccggtgtgaagaagcggcggcatggagacgaggacacgtactaccttcaggtgcgaggccgggagaactttgagatcctgatgaagctgaaagagagcctggagctgatggagttggtgccgcagccactggtggactcctatcggcagcagcagcagctcctacagaggccgacctgggggccctgaagatccccgagcagtaccgcatgaccatctggcggggcctgcaggacctgaagcagggccacgactacagcaccgcgcagcagctgctccgctctagcaacgcggccaccatctccatcggcggctcaggggaactgcagcgccagcgggtcatggaggccgtgcacttccgcgtgcgccacaccatcaccatccccaaccgcggcggcccaggcggcggccctgacgagtgggcggacttcggcttcgacctgcccgactgcaaggcccgcaagcagcccatcaaggaggagttcacggaggccgagatccactgagggcctcgcctggctgcagcctgcgccaccgcccagagacccaagctgcctcccctctccttcctgtgtgtccaaaactgcctcaggaggcaggaccttcgggctgtgcccggggaaaggcaaggtccggcccatccccaggcacctcacaggccccaggaaaggcccagccaccgaagccgcctgtggacagcctgagtcacctgcagaaccttctggagctgccctagtgctgggcttgtggggcgggggctggcccactctcagccctgccactgccccggcgtgctccatggcaggcgtgggtggggaccgcagcgtcggctccgacttccaggcttcatcctagagactgtcatctcccaaccaggcgaggtccttccaaaggaaaggatcctctttgctgatggactgccaaaaagtattttgcgacatcttttggttctggatagtagtgagcagccaagtgactgtgtctgaaacaccagtgtattttcagggaatgtccctaactgcgtcttgcccgcgccgggggctggggactctctctgctggacttgggactggcctctgcccccagcacgctgtattctgcaggaccgcctccttcctgcccctaacaacaaccacagtgttgctgaaattggagaaaactggggagggcgcaaccccccccaggcgcggggaagcatgtggtaccgcctcagccagtgcccctcagcctggccacagtcgcctctcctcggggacccctcagcagaaagggacagcctgtccttagaggactggaaattgtcaatatttgataaaatgatacccttttctacatggtgggtcagcttttttttttttttttttaactttctttctcagcattctctttggagttcaacctagcgcccatgagccaggctgaggaagctgagtgagaagccaggtgggcgggacttgttcccaggaaggccgggtggggaggaagcctagagggaaccccaggaagggcaaatccaggcaaatctgcaggaatgctctgccatgggagcagctcctcccttgccacggccaccttctctagcactgcaaggtccacagggcattgctttcctttctaggcggtggcagtcagggaacagactgaggtaggtgtaggggggtctaggccttcgtggagcaccccagggagttagtaggccccggggagacagagtctgcacaggccctttctggggccacctccatccacgaggagcagcctgagccttggtggccgaaccttgaccgtcccggagcacagcttcagggcagggaaccggagcccctggggggcctcacgggtgtgacgaggcccttcattgcaggcaggtgggccaatgggagccctcacccacgcaagccgagacaccacccagagtgcaggctgcctggccccttctggcacggccagctccacaccccctgcctagggtatgtgtggtcctaagggctaggagcttcccctactaacatctcccagaaaaagcagttaagcccctcagggcacagcaaggttagacacagcccccatccccagatcaggactccatcttgctaagtggcatcaccgtcaccagcctccccttatttaaaagcagcgactggtgttgccgcaggtacctggtctacgaagacgcaggcatccctctcccaccgtccacctccccgggggccgctgacagcacagtcgcctgggtgcacgcttgtgggggcagcaggaacggggctgtcggctctcaggggatctggctgcagccagggcgagggcctggcccttccttccagctccttccggctccttccagctgaagggcaggaagctctggccgcttagcttctagggttccatctccctagaaaggtgcccacgcccagggcatcagtcagtagcggcagcagcagcagactcggggctttcccagggtggcgcagccaccccagctgcatgtcacctcagctctccatcttattgccattttgtagatgaggaagctgagaccagaaaggctaagacccatgccccaggcaccacacccatctcttgggggctgggcacctgctacccgaggccacctcctgaagcccccactcttcccccatgttccacttcaggagccgcgggggcccatcctgacacccggggttcctcagcccagcgcagatgtgcttcagttccagagggcttgttgatttgtttcttaggtacgttacctgtccaccctgagtccagtgaggctgtcccaagagcccctgtagtgtgctcctgggaagggctgggggggctgggggggctgggagaggcccaggggcagctgtcactggaaccccagccagatgtccaaggaagccggccagaacacggagcagccagatggccccagctgcacctgtctagggagcccatgcagcctccttgcactggagaagcagctgtgaaagtagacagagttgagacttcgccgtggtcaggagaaaatgcaaattcccaggaacaagaatcctttaagtgatatgtttttataaaactaaacaaatcaacaaataaatcttgaaggcggatggttttcccagcagtgcaggggttggagggaggctgctggcactcctggggccaagggggacaggcagtggtcctgagtctgctcagagaggcaaggcagaaggagctcgccaggcaggtcagctcacatctgtccaagtcgctctggtcagaaacagcgactctcccccattcccccagcgttcccaccaggcctgggctgctgggaagcccttgctgtacccaggagcccgacccgcagtatcctggcacagagccacttgtcactcagaacagtcagtgtctccaacgcacaaacatccactcctctgttaccagttaaagcactttaatgctttaaggtgaaaacgaaatcccatccgtgtttttcgtgtaagatcgtgcttctccgagcagtattaatggacgccctccaatgacataacaactgtttttggtaatgtaatcttgggaaaatgtgttatttttttagctgtgtttcagtggggatttttgtttttgtaacataataaagtgtatgttccaatga

SEQ ID NO: 22031 - DNA, 2140 bp, Homo sapiens
  misc_feature 1..2140: note = ENST00000354437
  source 1..2140: mol_type = unassigned DNA; mol_type = unassigned DNA
aggggacgcagcgaaaccggggcccgcgccaggccagccgggacggacgccgatgcccggggctgcgacggctgcagagcgagctgccctcggaggccggcgtggggaagatggcccagtccaccgccacctcccctgatgggggcaccacgtttgagcacctctggagctctctggaaccagacagcacctacttcgaccttccccagtcaagccgggggaataatgaggtggtgggcggaacggattccagcatggacgtcttccacctggagggcatgactacatctgtcatggcccagttcaatctgctgagcagcaccatggaccagatgagcagccgcgcggcctcggccagcccctacaccccagagcacgccgccagcgtgcccacccactcgccctacgcacaacccagctccaccttcgacaccatgtcgccggcgcctgtcatcccctccaacaccgactaccccggaccccaccactttgaggtcactttccagcagtccagcacggccaagtcagccacctggacgtactccccgctcttgaagaaactctactgccagatcgccaagacatgccccatccagatcaaggtgtccaccccgccacccccaggcaccgccatccgggccatgcctgtttacaagaaagcggagcacgtgaccgacgtcgtgaaacgctgccccaaccacgagctcgggagggacttcaacgaaggacagtctgctccagccagccacctcatccgcgtggaaggcaataatctctcgcagtatgtggatgaccctgtcaccggcaggcagagcgtcgtggtgccctatgagccaccacaggtggggacggaattcaccaccatcctgtacaacttcatgtgtaacagcagctgtgtagggggcatgaaccggcggcccatcctcatcatcatcaccctggagatgcgggatgggcaggtgctgggccgccggtcctttgagggccgcatctgcgcctgtcctggccgcgaccgaaaagctgatgaggaccactaccgggagcagcaggccctgaacgagagctccgccaagaacggggccgccagcaagcgtgccttcaagcagagcccccctgccgtccccgcccttggtgccggtgtgaagaagcggcggcatggagacgaggacacgtactaccttcaggtgcgaggccgggagaactttgagatcctgatgaagctgaaagagagcctggagctgatggagttggtgccgcagccactggtggactcctatcggcagcagcagcagctcctacagaggccgagtcacctacagcccccgtcctacgggccggtcctctcgcccatgaacaaggtgcacgggggcatgaacaagctgccctccgtcaaccagctggtgggccagcctcccccgcacagttcggcagctacacccaacctggggcccgtgggccccgggatgctcaacaaccatggccacgcagtgccagccaacggcgagatgagcagcagccacagcgcccagtccatggtctcggggtcccactgcactccgccacccccctaccacgccgaccccagcctcgtcaggacctgggggccctgaagatccccgagcagtaccgcatgaccatctggcggggcctgcaggacctgaagcagggccacgactacagcaccgcgcagcagctgctccgctctagcaacgcggccaccatctccatcggcggctcaggggaactgcagcgccagcgggtcatggaggccgtgcacttccgcgtgcgccacaccatcaccatccccaaccgcggcggcccaggcggcggccctgacgagtgggcggacttcggcttcgacctgcccgactgcaaggcccgcaagcagcccatcaaggaggagttcacggaggccgagatccactgagggcctcgcctggctgcagcctgcgccaccgcccagagacccaagctgcctcccctctccttcctgtgtgtccaaaactgcctcaggaggcaggaccttcgggctgtgcccggggaaaggcaaggtccggcccatccccaggcacctcacaggccccaggaaaggcccagccaccgaagccgcctgtggacagcctgagtcacctgcagaacc

SEQ ID NO: 22032 - DNA, 1668 bp, Homo sapiens
  misc_feature 1..1668: note = ENST00000603362
  source 1..1668: mol_type = unassigned DNA; mol_type = unassigned DNA
atggcccagtccaccgccacctcccctgatgggggcaccacgtttgagcacctctggagctctctggaaccagacagcacctacttcgaccttccccagtcaagccgggggaataatgaggtggtgggcggaacggattccagcatggacgtcttccacctggagggcatgactacatctgtcatggcccagttcaatctgctgagcagcaccatggaccagatgagcagccgcgcggcctcggccagcccctacaccccagagcacgccgccagcgtgcccacccactcgccctacgcacaacccagctccaccttcgacaccatgtcgccggcgcctgtcatcccctccaacaccgactaccccggaccccaccactttgaggtcactttccagcagtccagcacggccaagtcagccacctggacgtactccccgctcttgaagaaactctactgccagatcgccaagacatgccccatccagatcaaggtgtccaccccgccacccccaggcaccgccatccgggccatgcctgtttacaagaaagcggagcacgtgaccgacgtcgtgaaacgctgccccaaccacgagctcgggagggacttcaacgaaggacagtctgctccagccagccacctcatccgcgtggaaggcaataatctctcgcagtatgtggatgaccctgtcaccggcaggcagagcgtcgtggtgccctatgagccaccacaggtggggacggaattcaccaccatcctgtacaacttcatgtgtaacagcagctgtgtagggggcatgaaccggcggcccatcctcatcatcatcaccctggagatgcgggatgggcaggtgctgggccgccggtcctttgagggccgcatctgcgcctgtcctggccgcgaccgaaaagctgatgaggaccactaccgggagcagcaggccctgaacgagagctccgccaagaacggggccgccagcaagcgtgccttcaagcagagcccccctgccgtccccgcccttggtgccggtgtgaagaagcggcggcatggagacgaggacacgtactaccttcaggtgcgaggccgggagaactttgagatcctgatgaagctgaaagagagcctggagctgatggagttggtgccgcagccactggtggactcctatcggcagcagcagcagctcctacagaggccgccccgggatgctcaacaaccatggccacgcagtgccagccaacggcgagatgagcagcagccacagcgcccagtccatggtctcggggtcccactgcactccgccacccccctaccacgccgaccccagcctcgtcaggacctgggggccctgaagatccccgagcagtaccgcatgaccatctggcggggcctgcaggacctgaagcagggccacgactacagcaccgcgcagcagctgctccgctctagcaacgcggccaccatctccatcggcggctcaggggaactgcagcgccagcgggtcatggaggccgtgcacttccgcgtgcgccacaccatcaccatccccaaccgcggcggcccaggcggcggccctgacgagtgggcggacttcggcttcgacctgcccgactgcaaggcccgcaagcagcccatcaaggaggagttcacggaggccgagatccactga

SEQ ID NO: 22033 - DNA, 1623 bp, Homo sapiens
  misc_feature 1..1623: note = ENST00000604479
  source 1..1623: mol_type = unassigned DNA; mol_type = unassigned DNA
atggcccagtccaccgccacctcccctgatgggggcaccacgtttgagcacctctggagctctctggaaccagacagcacctacttcgaccttccccagtcaagccgggggaataatgaggtggtgggcggaacggattccagcatggacgtcttccacctggagggcatgactacatctgtcatggcccagttcaatctgctgagcagcaccatggaccagatgagcagccgcgcggcctcggccagcccctacaccccagagcacgccgccagcgtgcccacccactcgccctacgcacaacccagctccaccttcgacaccatgtcgccggcgcctgtcatcccctccaacaccgactaccccggaccccaccactttgaggtcactttccagcagtccagcacggccaagtcagccacctggacgtactccccgctcttgaagaaactctactgccagatcgccaagacatgccccatccagatcaaggtgtccaccccgccacccccaggcaccgccatccgggccatgcctgtttacaagaaagcggagcacgtgaccgacgtcgtgaaacgctgccccaaccacgagctcgggagggacttcaacgaaggacagtctgctccagccagccacctcatccgcgtggaaggcaataatctctcgcagtatgtggatgaccctgtcaccggcaggcagagcgtcgtggtgccctatgagccaccacaggtggggacggaattcaccaccatcctgtacaacttcatgtgtaacagcagctgtgtagggggcatgaaccggcggcccatcctcatcatcatcaccctggagatgcgggatgggcaggtgctgggccgccggtcctttgagggccgcatctgcgcctgtcctggccgcgaccgaaaagctgatgaggaccactaccgggagcagcaggccctgaacgagagctccgccaagaacggggccgccagcaagcgtgccttcaagcagagcccccctgccgtccccgcccttggtgccggtgtgaagaagcggcggcatggagacgaggacacgtactaccttcaggtgcgaggccgggagaactttgagatcctgatgaagctgaaagagagcctggagctgatggagttggtgccgcagccactggtggactcctatcggcagcagcagcagctcctacagaggccttttttaacaggattggggtgtccaaactgcatcgagtatttcacctcccaagggttacagagcatttaccacctgcagaacctgaccattgaggacctgggggccctgaagatccccgagcagtaccgcatgaccatctggcggggcctgcaggacctgaagcagggccacgactacagcaccgcgcagcagctgctccgctctagcaacgcggccaccatctccatcggcggctcaggggaactgcagcgccagcgggtcatggaggccgtgcacttccgcgtgcgccacaccatcaccatccccaaccgcggcggcccaggcggcggccctgacgagtgggcggacttcggcttcgacctgcccgactgcaaggcccgcaagcagcccatcaaggaggagttcacggaggccgagatccactga

SEQ ID NO: 22034 - DNA, 2117 bp, Homo sapiens
  misc_feature 1..2117: note = ENST00000378285
  source 1..2117: mol_type = unassigned DNA; mol_type = unassigned DNA
ggattcagccagttgacagaactaagggagatgggaaaagcgaaaatgccaacaaacggcccgcatgttccccagcatcctcggctcctgcctcactagctgcggagcctctcccgctcggtccacgctgccgggcggccacgaccgtgacccttcccctcgggccgcccagatccatgcctcgtcccacgggacaccagttccctggcgtgtgcagaccccccggcgcctaccatgctgtacgtcggtgaccccgcacggcacctcgccacggcccagttcaatctgctgagcagcaccatggaccagatgagcagccgcgcggcctcggccagcccctacaccccagagcacgccgccagcgtgcccacccactcgccctacgcacaacccagctccaccttcgacaccatgtcgccggcgcctgtcatcccctccaacaccgactaccccggaccccaccactttgaggtcactttccagcagtccagcacggccaagtcagccacctggacgtactccccgctcttgaagaaactctactgccagatcgccaagacatgccccatccagatcaaggtgtccaccccgccacccccaggcaccgccatccgggccatgcctgtttacaagaaagcggagcacgtgaccgacgtcgtgaaacgctgccccaaccacgagctcgggagggacttcaacgaaggacagtctgctccagccagccacctcatccgcgtggaaggcaataatctctcgcagtatgtggatgaccctgtcaccggcaggcagagcgtcgtggtgccctatgagccaccacaggtggggacggaattcaccaccatcctgtacaacttcatgtgtaacagcagctgtgtagggggcatgaaccggcggcccatcctcatcatcatcaccctggagatgcgggatgggcaggtgctgggccgccggtcctttgagggccgcatctgcgcctgtcctggccgcgaccgaaaagctgatgaggaccactaccgggagcagcaggccctgaacgagagctccgccaagaacggggccgccagcaagcgtgccttcaagcagagcccccctgccgtccccgcccttggtgccggtgtgaagaagcggcggcatggagacgaggacacgtactaccttcaggtgcgaggccgggagaactttgagatcctgatgaagctgaaagagagcctggagctgatggagttggtgccgcagccactggtggactcctatcggcagcagcagcagctcctacagaggccgagtcacctacagcccccgtcctacgggccggtcctctcgcccatgaacaaggtgcacgggggcatgaacaagctgccctccgtcaaccagctggtgggccagcctcccccgcacagttcggcagctacacccaacctggggcccgtgggccccgggatgctcaacaaccatggccacgcagtgccagccaacggcgagatgagcagcagccacagcgcccagtccatggtctcggggtcccactgcactccgccacccccctaccacgccgaccccagcctcgtcaggacctgggggccctgaagatccccgagcagtaccgcatgaccatctggcggggcctgcaggacctgaagcagggccacgactacagcaccgcgcagcagctgctccgctctagcaacgcggccaccatctccatcggcggctcaggggaactgcagcgccagcgggtcatggaggccgtgcacttccgcgtgcgccacaccatcaccatccccaaccgcggcggcccaggcggcggccctgacgagtgggcggacttcggcttcgacctgcccgactgcaaggcccgcaagcagcccatcaaggaggagttcacggaggccgagatccactgagggcctcgcctggctgcagcctgcgccaccgcccagagacccaagctgcctcccctctccttcctgtgtgtccaaaactgcctcaggaggcaggaccttcgggctgtgcccggggaaaggcaaggtccggcccatccccaggcacctcacaggccccaggaaaggcccagccaccgaagccgcctgtggacagcctgagtcacctgcagaacc

SEQ ID NO: 22035 - DNA, 2062 bp, Homo sapiens
  misc_feature 1..2062: note = ENST00000378280
  source 1..2062: mol_type = unassigned DNA; mol_type = unassigned DNA
ggattcagccagttgacagaactaagggagatgggaaaagcgaaaatgccaacaaacggcccgcatgttccccagcatcctcggctcctgcctcactagctgcggagcctctcccgctcggtccacgctgccgggcggccacgaccgtgacccttcccctcgggccgcccagatccatgcctcgtcccacgggacaccagttccctggcgtgtgcagaccccccggcgcctaccatgctgtacgtcggtgaccccgcacggcacctcgccacggcccagttcaatctgctgagcagcaccatggaccagatgagcagccgcgcggcctcggccagcccctacaccccagagcacgccgccagcgtgcccacccactcgccctacgcacaacccagctccaccttcgacaccatgtcgccggcgcctgtcatcccctccaacaccgactaccccggaccccaccactttgaggtcactttccagcagtccagcacggccaagtcagccacctggacgtactccccgctcttgaagaaactctactgccagatcgccaagacatgccccatccagatcaaggtgtccaccccgccacccccaggcaccgccatccgggccatgcctgtttacaagaaagcggagcacgtgaccgacgtcgtgaaacgctgccccaaccacgagctcgggagggacttcaacgaaggacagtctgctccagccagccacctcatccgcgtggaaggcaataatctctcgcagtatgtggatgaccctgtcaccggcaggcagagcgtcgtggtgccctatgagccaccacaggtggggacggaattcaccaccatcctgtacaacttcatgtgtaacagcagctgtgtagggggcatgaaccggcggcccatcctcatcatcatcaccctggagatgcgggatgggcaggtgctgggccgccggtcctttgagggccgcatctgcgcctgtcctggccgcgaccgaaaagctgatgaggaccactaccgggagcagcaggccctgaacgagagctccgccaagaacggggccgccagcaagcgtgccttcaagcagagcccccctgccgtccccgcccttggtgccggtgtgaagaagcggcggcatggagacgaggacacgtactaccttcaggtgcgaggccgggagaactttgagatcctgatgaagctgaaagagagcctggagctgatggagttggtgccgcagccactggtggactcctatcggcagcagcagcagctcctacagaggccgccccgggatgctcaacaaccatggccacgcagtgccagccaacggcgagatgagcagcagccacagcgcccagtccatggtctcggggtcccactgcactccgccacccccctaccacgccgaccccagcctcgtcagttttttaacaggattggggtgtccaaactgcatcgagtatttcacctcccaagggttacagagcatttaccacctgcagaacctgaccattgaggacctgggggccctgaagatccccgagcagtaccgcatgaccatctggcggggcctgcaggacctgaagcagggccacgactacagcaccgcgcagcagctgctccgctctagcaacgcggccaccatctccatcggcggctcaggggaactgcagcgccagcgggtcatggaggccgtgcacttccgcgtgcgccacaccatcaccatccccaaccgcggcggcccaggcggcggccctgacgagtgggcggacttcggcttcgacctgcccgactgcaaggcccgcaagcagcccatcaaggaggagttcacggaggccgagatccactgagggcctcgcctggctgcagcctgcgccaccgcccagagacccaagctgcctcccctctccttcctgtgtgtccaaaactgcctcaggaggcaggaccttcgggctgtgcccggggaaaggcaaggtccggcccatccccaggcacctcacaggccccaggaaaggcccagccaccgaagccgcctgtggacagcctgagtcacctgcagaacc

SEQ ID NO: 22036 - DNA, 5120 bp, Homo sapiens
  misc_feature 1..5120: note = ENST00000378288
  source 1..5120: mol_type = unassigned DNA; mol_type = unassigned DNA
ggattcagccagttgacagaactaagggagatgggaaaagcgaaaatgccaacaaacggcccgcatgttccccagcatcctcggctcctgcctcactagctgcggagcctctcccgctcggtccacgctgccgggcggccacgaccgtgacccttcccctcgggccgcccagatccatgcctcgtcccacgggacaccagttccctggcgtgtgcagaccccccggcgcctaccatgctgtacgtcggtgaccccgcacggcacctcgccacggcccagttcaatctgctgagcagcaccatggaccagatgagcagccgcgcggcctcggccagcccctacaccccagagcacgccgccagcgtgcccacccactcgccctacgcacaacccagctccaccttcgacaccatgtcgccggcgcctgtcatcccctccaacaccgactaccccggaccccaccactttgaggtcactttccagcagtccagcacggccaagtcagccacctggacgtactccccgctcttgaagaaactctactgccagatcgccaagacatgccccatccagatcaaggtgtccaccccgccacccccaggcaccgccatccgggccatgcctgtttacaagaaagcggagcacgtgaccgacgtcgtgaaacgctgccccaaccacgagctcgggagggacttcaacgaaggacagtctgctccagccagccacctcatccgcgtggaaggcaataatctctcgcagtatgtggatgaccctgtcaccggcaggcagagcgtcgtggtgccctatgagccaccacaggtggggacggaattcaccaccatcctgtacaacttcatgtgtaacagcagctgtgtagggggcatgaaccggcggcccatcctcatcatcatcaccctggagatgcgggatgggcaggtgctgggccgccggtcctttgagggccgcatctgcgcctgtcctggccgcgaccgaaaagctgatgaggaccactaccgggagcagcaggccctgaacgagagctccgccaagaacggggccgccagcaagcgtgccttcaagcagagcccccctgccgtccccgcccttggtgccggtgtgaagaagcggcggcatggagacgaggacacgtactaccttcaggtgcgaggccgggagaactttgagatcctgatgaagctgaaagagagcctggagctgatggagttggtgccgcagccactggtggactcctatcggcagcagcagcagctcctacagaggccgagtcacctacagcccccgtcctacgggccggtcctctcgcccatgaacaaggtgcacgggggcatgaacaagctgccctccgtcaaccagctggtgggccagcctcccccgcacagttcggcagctacacccaacctggggcccgtgggccccgggatgctcaacaaccatggccacgcagtgccagccaacggcgagatgagcagcagccacagcgcccagtccatggtctcggggtcccactgcactccgccacccccctaccacgccgaccccagcctcgtcagttttttaacaggattggggtgtccaaactgcatcgagtatttcacctcccaagggttacagagcatttaccacctgcagaacctgaccattgaggacctgggggccctgaagatccccgagcagtaccgcatgaccatctggcggggcctgcaggacctgaagcagggccacgactacagcaccgcgcagcagctgctccgctctagcaacgcggccaccatctccatcggcggctcaggggaactgcagcgccagcgggtcatggaggccgtgcacttccgcgtgcgccacaccatcaccatccccaaccgcggcggcccaggcggcggccctgacgagtgggcggacttcggcttcgacctgcccgactgcaaggcccgcaagcagcccatcaaggaggagttcacggaggccgagatccactgagggcctcgcctggctgcagcctgcgccaccgcccagagacccaagctgcctcccctctccttcctgtgtgtccaaaactgcctcaggaggcaggaccttcgggctgtgcccggggaaaggcaaggtccggcccatccccaggcacctcacaggccccaggaaaggcccagccaccgaagccgcctgtggacagcctgagtcacctgcagaaccttctggagctgccctagtgctgggcttgtggggcgggggctggcccactctcagccctgccactgccccggcgtgctccatggcaggcgtgggtggggaccgcagcgtcggctccgacttccaggcttcatcctagagactgtcatctcccaaccaggcgaggtccttccaaaggaaaggatcctctttgctgatggactgccaaaaagtattttgcgacatcttttggttctggatagtagtgagcagccaagtgactgtgtctgaaacaccagtgtattttcagggaatgtccctaactgcgtcttgcccgcgccgggggctggggactctctctgctggacttgggactggcctctgcccccagcacgctgtattctgcaggaccgcctccttcctgcccctaacaacaaccacagtgttgctgaaattggagaaaactggggagggcgcaaccccccccaggcgcggggaagcatgtggtaccgcctcagccagtgcccctcagcctggccacagtcgcctctcctcggggacccctcagcagaaagggacagcctgtccttagaggactggaaattgtcaatatttgataaaatgatacccttttctacatggtgggtcagcttttttttttttttttttaactttctttctcagcattctctttggagttcaacctagcgcccatgagccaggctgaggaagctgagtgagaagccaggtgggcgggacttgttcccaggaaggccgggtggggaggaagcctagagggaaccccaggaagggcaaatccaggcaaatctgcaggaatgctctgccatgggagcagctcctcccttgccacggccaccttctctagcactgcaaggtccacagggcattgctttcctttctaggcggtggcagtcagggaacagactgaggtaggtgtaggggggtctaggccttcgtggagcaccccagggagttagtaggccccggggagacagagtctgcacaggccctttctggggccacctccatccacgaggagcagcctgagccttggtggccgaaccttgaccgtcccggagcacagcttcagggcagggaaccggagcccctggggggcctcacgggtgtgacgaggcccttcattgcaggcaggtgggccaatgggagccctcacccacgcaagccgagacaccacccagagtgcaggctgcctggccccttctggcacggccagctccacaccccctgcctagggtatgtgtggtcctaagggctaggagcttcccctactaacatctcccagaaaaagcagttaagcccctcagggcacagcaaggttagacacagcccccatccccagatcaggactccatcttgctaagtggcatcaccgtcaccagcctccccttatttaaaagcagcgactggtgttgccgcaggtacctggtctacgaagacgcaggcatccctctcccaccgtccacctccccgggggccgctgacagcacagtcgcctgggtgcacgcttgtgggggcagcaggaacggggctgtcggctctcaggggatctggctgcagccagggcgagggcctggcccttccttccagctccttccggctccttccagctgaagggcaggaagctctggccgcttagcttctagggttccatctccctagaaaggtgcccacgcccagggcatcagtcagtagcggcagcagcagcagactcggggctttcccagggtggcgcagccaccccagctgcatgtcacctcagctctccatcttattgccattttgtagatgaggaagctgagaccagaaaggctaagacccatgccccaggcaccacacccatctcttgggggctgggcacctgctacccgaggccacctcctgaagcccccactcttcccccatgttccacttcaggagccgcgggggcccatcctgacacccggggttcctcagcccagcgcagatgtgcttcagttccagagggcttgttgatttgtttcttaggtacgttacctgtccaccctgagtccagtgaggctgtcccaagagcccctgtagtgtgctcctgggaagggctgggggggctgggggggctgggagaggcccaggggcagctgtcactggaaccccagccagatgtccaaggaagccggccagaacacggagcagccagatggccccagctgcacctgtctagggagcccatgcagcctccttgcactggagaagcagctgtgaaagtagacagagttgagacttcgccgtggtcaggagaaaatgcaaattcccaggaacaagaatcctttaagtgatatgtttttataaaactaaacaaatcaacaaataaatcttgaaggcggatggttttcccagcagtgcaggggttggagggaggctgctggcactcctggggccaagggggacaggcagtggtcctgagtctgctcagagaggcaaggcagaaggagctcgccaggcaggtcagctcacatctgtccaagtcgctctggtcagaaacagcgactctcccccattcccccagcgttcccaccaggcctgggctgctgggaagcccttgctgtacccaggagcccgacccgcagtatcctggcacagagccacttgtcactcagaacagtcagtgtctccaacgcacaaacatccactcctctgttaccagttaaagcactttaatgctttaaggtgaaaacgaaatcccatccgtgtttttcgtgtaagatcgtgcttctccgagcagtattaatggacgccctccaatgacataacaactgtttttggtaatgtaatcttgggaaaatgtgttatttttttagctgtgtttcagtggggatttttgtttttgtaacataataaagtgtatgttccaatga

SEQ ID NO: 22037 - DNA, 1551 bp, Homo sapiens
  misc_feature 1..1551: note = ENST00000603364
  source 1..1551: mol_type = unassigned DNA; mol_type = unassigned DNA
aaaagcgaaaatgccaacaaacggcccgcatgttccccagcatcctcggctcctgcctcactagctgcggagcctctcccgctcggtccacgctgccgggcggccacgaccgtgacccttcccctcgggccgcccagatccatgcctcgtcccacgggacaccagttccctggcgtgtgcagaccccccggcgcctaccatgctgtacgtcggtgaccccgcacggcacctcgccacggcccagttcaatctgctgagcagcaccatggaccagatgagcagccgcgcggcctcggccagcccctacaccccagagcacgccgccagcgtgcccacccactcgccctacgcacaacccagctccaccttcgacaccatgtcgccggcgcctgtcatcccctccaacaccgactaccccggaccccaccactttgaggtcactttccagcagtccagcacggccaagtcagccacctggacgtactccccgctcttgaagaaactctactgccagatcgccaagacatgccccatccagatcaaggtgtccaccccgccacccccaggcaccgccatccgggccatgcctgtttacaagaaagcggagcacgtgaccgacgtcgtgaaacgctgccccaaccacgagctcgggagggacttcaacgaaggacagtctgctccagccagccacctcatccgcgtggaaggcaataatctctcgcagtatgtggatgaccctgtcaccggcaggcagagcgtcgtggtgccctatgagccaccacaggtggggacggaattcaccaccatcctgtacaacttcatgtgtaacagcagctgtgtagggggcatgaaccggcggcccatcctcatcatcatcaccctggagatgcgggatgggcaggtgctgggccgccggtcctttgagggccgcatctgcgcctgtcctggccgcgaccgaaaagctgatgaggaccactaccgggagcagcaggccctgaacgagagctccgccaagaacggggccgccagcaagcgtgccttcaagcagagcccccctgccgtccccgcccttggtgccggtgtgaagaagcggcggcatggagacgaggacacgtactaccttcaggtgcgaggccgggagaactttgagatcctgatgaagctgaaagagagcctggagctgatggagttggtgccgcagccactggtggactcctatcggcagcagcagcagctcctacagaggccgtgagtcagccctagcccaccatcagtgtggggaaggaggacatggcttaaccccccaggagaaggccaggaggaccagaaacccctccagaaggcatcatctgccagggacaggcagcagggtccagagcagagcccaccccacatctcctcctccaggaagccttctagcacttggggctgccctgggaccctgggtcatggcccttgctatgcctctgccactgaggggccttgtaaatgtctgctgagtggaaaggccaggaggggtggccagagtgaccatgacccaccaagaccaga

SEQ ID NO: 22038 - DNA, 1092 bp, Homo sapiens
  misc_feature 1..1092: note = ENST00000604194
  source 1..1092: mol_type = unassigned DNA; mol_type = unassigned DNA
aatgtgtgctggaaggtgtccaggaagccctgctaagcatctgtcagtgtctccagcacagcaggaggctgttacaggtggcgcctgattcacatctgcaggacaggcccagttcaatctgctgagcagcaccatggaccagatgagcagccgcgcggcctcggccagcccctacaccccagagcacgccgccagcgtgcccacccactcgccctacgcacaacccagctccaccttcgacaccatgtcgccggcgcctgtcatcccctccaacaccgactaccccggaccccaccactttgaggtcactttccagcagtccagcacggccaagtcagccacctggacggtgagttcccctagtccctgagggctgcgggctgcgggctgcgggctggagaggaggtggctgcgttccccgcacctcaagaggtctgagctcgccccactgtctgctcggggttcccacctggcccgggccaggaggagcatcgggcaggaggcgggtctcagggccgggcagtctgggtgtgcccacccctctagacgtgagtggccagagccagtcagcctccaaagggccacagaggggacggacttggccctgctggtgagatctctgccaagactggccagcggcttccccatgctcaggtgggatctttggtttgaaatcctgtcctggacagaggcacgggctctgctgccaagagttgtctgtccgagacaggcccacagccctagggtctgcagaacctgcctcctccaggcagcgagacgcatctgcgggtgggtggatttgggctttgctggcactgtctctggagtgtcatttccaggaattggcatgcaccaaggagatggggtggaaccaccgtgccaagggctcaggtcctcactgcggtgcccctggagacagactggcccacggtggggatcttgctaattctgataacatcacctgtgcacaaggccagtctcctcgagccaggcaccatgctcagggctttgagttgagctaactcttgcacccaccaacaacgcacagggctgactccatcactgctccccttttacagccaaggaggctga

SEQ ID NO: 22039 - DNA, 1831 bp, Homo sapiens
  misc_feature 1..1831: note = ENST00000378290
  source 1..1831: mol_type = unassigned DNA; mol_type = unassigned DNA
aaggtgtccaggaagccctgctaagcatctgtcagtgtctccagcacagcaggaggctgttacaggtggcgcctgattcacatctgcaggacaggcccagttcaatctgctgagcagcaccatggaccagatgagcagccgcgcggcctcggccagcccctacaccccagagcacgccgccagcgtgcccacccactcgccctacgcacaacccagctccaccttcgacaccatgtcgccggcgcctgtcatcccctccaacaccgactaccccggaccccaccactttgaggtcactttccagcagtccagcacggccaagtcagccacctggacgtactccccgctcttgaagaaactctactgccagatcgccaagacatgccccatccagatcaaggtgtccaccccgccacccccaggcaccgccatccgggccatgcctgtttacaagaaagcggagcacgtgaccgacgtcgtgaaacgctgccccaaccacgagctcgggagggacttcaacgaaggacagtctgctccagccagccacctcatccgcgtggaaggcaataatctctcgcagtatgtggatgaccctgtcaccggcaggcagagcgtcgtggtgccctatgagccaccacaggtggggacggaattcaccaccatcctgtacaacttcatgtgtaacagcagctgtgtagggggcatgaaccggcggcccatcctcatcatcatcaccctggagatgcgggatgggcaggtgctgggccgccggtcctttgagggccgcatctgcgcctgtcctggccgcgaccgaaaagctgatgaggaccactaccgggagcagcaggccctgaacgagagctccgccaagaacggggccgccagcaagcgtgccttcaagcagagcccccctgccgtccccgcccttggtgccggtgtgaagaagcggcggcatggagacgaggacacgtactaccttcaggtgcgaggccgggagaactttgagatcctgatgaagctgaaagagagcctggagctgatggagttggtgccgcagccactggtggactcctatcggcagcagcagcagctcctacagaggccgagtcacctacagcccccgtcctacgggccggtcctctcgcccatgaacaaggtgcacgggggcatgaacaagctgccctccgtcaaccagctggtgggccagcctcccccgcacagttcggcagctacacccaacctggggcccgtgggccccgggatgctcaacaaccatggccacgcagtgccagccaacggcgagatgagcagcagccacagcgcccagtccatggtctcggggtcccactgcactccgccacccccctaccacgccgaccccagcctcgtcagttttttaacaggattggggtgtccaaactgcatcgagtatttcacctcccaagggttacagagcatttaccacctgcagaacctgaccattgaggacctgggggccctgaagatccccgagcagtaccgcatgaccatctggcggggcctgcaggacctgaagcagggccacgactacagcaccgcgcagcagctgctccgctctagcaacgcggccaccatctccatcggcggctcaggggaactgcagcgccagcgggtcatggaggccgtgcacttccgcgtgcgccacaccatcaccatccccaaccgcggcggcccaggcggcggccctgacgagtgggcggacttcggcttcgacctgcccgactgcaaggcccgcaagcagcccatcaaggaggagttcacggaggccgagatccactgagggcctcgcctg

SEQ ID NO: 22040 - DNA, 1358 bp, Homo sapiens
  misc_feature 1..1358: note = ENST00000604566
  source 1..1358: mol_type = unassigned DNA; mol_type = unassigned DNA
agcgggaacactcgctgccggcactgggtgctctgtggtgaccgagggctctcaaggccggtcctgcagggtccgaggtgggtggggaaggtgggcaggttgagggtgggcagggttgagctcacaattctggctgtgcccacccgacagtgggcaggtgctgggccgccggtcctttgagggccgcatctgcgcctgtcctggccgcgaccgaaaagctgatgaggaccactaccgggagcagcaggccctgaacgagagctccgccaagaacggggccgccagcaagcgtgccttcaagcagagcccccctgccgtccccgcccttggtgccggtgtgaagaagcggcggcatggagacgaggacacgtactaccttcaggtgcgaggccgggagaactttgagatcctgatgaagctgaaagagagcctggagctgatggagttggtgccgcagccactggtggactcctatcggcagcagcagcagctcctacagaggccgccccgggatgctcaacaaccatggccacgcagtgccagccaacggcgagatgagcagcagccacagcgcccagtccatggtctcggggtcccactgcactccgccacccccctaccacgccgaccccagcctcgtcagttttttaacaggattggggtgtccaaactgcatcgagtatttcacctcccaagggttacagagcatttaccacctgcagaacctgaccattgaggacctgggggccctgaagatccccgagcagtaccgcatgaccatctggcggggcctgcaggacctgaagcagggccacgactacagcaccgcgcagcagctgctccgctctagcaacgcggccaccatctccatcggcggctcaggggaactgcagcgccagcgggtcatggaggccgtgcacttccgcgtgcgccacaccatcaccatccccaaccgcggcggcccaggcggcggccctgacgagtgggcggacttcggcttcgacctgcccgactgcaaggcccgcaagcagcccatcaaggaggagttcacggaggccgagatccactgagggcctcgcctggctgcagcctgcgccaccgcccagagacccaagctgcctcccctctccttcctgtgtgtccaaaactgcctcaggaggcaggaccttcgggctgtgcccggggaaaggcaaggtccggcccatccccaggcacctcacaggccccaggaaaggcccagccaccgaagccgcctgtggacagcctgagtcacctgcagaaccttctggagctgccctagtgctgggcttgtggggcgggggctggcccactctcagccctgccactgccccggcgtg

SEQ ID NO: 22041 - DNA, 4899 bp, Homo sapiens
  misc_feature 1..4899: note = ENST00000357733
  source 1..4899: mol_type = unassigned DNA; mol_type = unassigned DNA
aggggacgcagcgaaaccggggcccgcgccaggccagccgggacggacgccgatgcccggggctgcgacggctgcagagcgagctgccctcggaggccggcgtggggaagatggcccagtccaccgccacctcccctgatgggggcaccacgtttgagcacctctggagctctctggaaccagacagcacctacttcgaccttccccagtcaagccgggggaataatgaggtggtgggcggaacggattccagcatggacgtcttccacctggagggcatgactacatctgtcatggcccagttcaatctgctgagcagcaccatggaccagatgagcagccgcgcggcctcggccagcccctacaccccagagcacgccgccagcgtgcccacccactcgccctacgcacaacccagctccaccttcgacaccatgtcgccggcgcctgtcatcccctccaacaccgactaccccggaccccaccactttgaggtcactttccagcagtccagcacggccaagtcagccacctggacgtactccccgctcttgaagaaactctactgccagatcgccaagacatgccccatccagatcaaggtgtccaccccgccacccccaggcaccgccatccgggccatgcctgtttacaagaaagcggagcacgtgaccgacgtcgtgaaacgctgccccaaccacgagctcgggagggacttcaacgaaggacagtctgctccagccagccacctcatccgcgtggaaggcaataatctctcgcagtatgtggatgaccctgtcaccggcaggcagagcgtcgtggtgccctatgagccaccacaggtggggacggaattcaccaccatcctgtacaacttcatgtgtaacagcagctgtgtagggggcatgaaccggcggcccatcctcatcatcatcaccctggagatgcgggatgggcaggtgctgggccgccggtcctttgagggccgcatctgcgcctgtcctggccgcgaccgaaaagctgatgaggaccactaccgggagcagcaggccctgaacgagagctccgccaagaacggggccgccagcaagcgtgccttcaagcagagcccccctgccgtccccgcccttggtgccggtgtgaagaagcggcggcatggagacgaggacacgtactaccttcaggtgcgaggccgggagaactttgagatcctgatgaagctgaaagagagcctggagctgatggagttggtgccgcagccactggtggactcctatcggcagcagcagcagctcctacagaggccgccccgggatgctcaacaaccatggccacgcagtgccagccaacggcgagatgagcagcagccacagcgcccagtccatggtctcggggtcccactgcactccgccacccccctaccacgccgaccccagcctcgtcaggacctgggggccctgaagatccccgagcagtaccgcatgaccatctggcggggcctgcaggacctgaagcagggccacgactacagcaccgcgcagcagctgctccgctctagcaacgcggccaccatctccatcggcggctcaggggaactgcagcgccagcgggtcatggaggccgtgcacttccgcgtgcgccacaccatcaccatccccaaccgcggcggcccaggcggcggccctgacgagtgggcggacttcggcttcgacctgcccgactgcaaggcccgcaagcagcccatcaaggaggagttcacggaggccgagatccactgagggcctcgcctggctgcagcctgcgccaccgcccagagacccaagctgcctcccctctccttcctgtgtgtccaaaactgcctcaggaggcaggaccttcgggctgtgcccggggaaaggcaaggtccggcccatccccaggcacctcacaggccccaggaaaggcccagccaccgaagccgcctgtggacagcctgagtcacctgcagaaccttctggagctgccctagtgctgggcttgtggggcgggggctggcccactctcagccctgccactgccccggcgtgctccatggcaggcgtgggtggggaccgcagcgtcggctccgacttccaggcttcatcctagagactgtcatctcccaaccaggcgaggtccttccaaaggaaaggatcctctttgctgatggactgccaaaaagtattttgcgacatcttttggttctggatagtagtgagcagccaagtgactgtgtctgaaacaccagtgtattttcagggaatgtccctaactgcgtcttgcccgcgccgggggctggggactctctctgctggacttgggactggcctctgcccccagcacgctgtattctgcaggaccgcctccttcctgcccctaacaacaaccacagtgttgctgaaattggagaaaactggggagggcgcaaccccccccaggcgcggggaagcatgtggtaccgcctcagccagtgcccctcagcctggccacagtcgcctctcctcggggacccctcagcagaaagggacagcctgtccttagaggactggaaattgtcaatatttgataaaatgatacccttttctacatggtgggtcagcttttttttttttttttttaactttctttctcagcattctctttggagttcaacctagcgcccatgagccaggctgaggaagctgagtgagaagccaggtgggcgggacttgttcccaggaaggccgggtggggaggaagcctagagggaaccccaggaagggcaaatccaggcaaatctgcaggaatgctctgccatgggagcagctcctcccttgccacggccaccttctctagcactgcaaggtccacagggcattgctttcctttctaggcggtggcagtcagggaacagactgaggtaggtgtaggggggtctaggccttcgtggagcaccccagggagttagtaggccccggggagacagagtctgcacaggccctttctggggccacctccatccacgaggagcagcctgagccttggtggccgaaccttgaccgtcccggagcacagcttcagggcagggaaccggagcccctggggggcctcacgggtgtgacgaggcccttcattgcaggcaggtgggccaatgggagccctcacccacgcaagccgagacaccacccagagtgcaggctgcctggccccttctggcacggccagctccacaccccctgcctagggtatgtgtggtcctaagggctaggagcttcccctactaacatctcccagaaaaagcagttaagcccctcagggcacagcaaggttagacacagcccccatccccagatcaggactccatcttgctaagtggcatcaccgtcaccagcctccccttatttaaaagcagcgactggtgttgccgcaggtacctggtctacgaagacgcaggcatccctctcccaccgtccacctccccgggggccgctgacagcacagtcgcctgggtgcacgcttgtgggggcagcaggaacggggctgtcggctctcaggggatctggctgcagccagggcgagggcctggcccttccttccagctccttccggctccttccagctgaagggcaggaagctctggccgcttagcttctagggttccatctccctagaaaggtgcccacgcccagggcatcagtcagtagcggcagcagcagcagactcggggctttcccagggtggcgcagccaccccagctgcatgtcacctcagctctccatcttattgccattttgtagatgaggaagctgagaccagaaaggctaagacccatgccccaggcaccacacccatctcttgggggctgggcacctgctacccgaggccacctcctgaagcccccactcttcccccatgttccacttcaggagccgcgggggcccatcctgacacccggggttcctcagcccagcgcagatgtgcttcagttccagagggcttgttgatttgtttcttaggtacgttacctgtccaccctgagtccagtgaggctgtcccaagagcccctgtagtgtgctcctgggaagggctgggggggctgggggggctgggagaggcccaggggcagctgtcactggaaccccagccagatgtccaaggaagccggccagaacacggagcagccagatggccccagctgcacctgtctagggagcccatgcagcctccttgcactggagaagcagctgtgaaagtagacagagttgagacttcgccgtggtcaggagaaaatgcaaattcccaggaacaagaatcctttaagtgatatgtttttataaaactaaacaaatcaacaaataaatcttgaaggcggatggttttcccagcagtgcaggggttggagggaggctgctggcactcctggggccaagggggacaggcagtggtcctgagtctgctcagagaggcaaggcagaaggagctcgccaggcaggtcagctcacatctgtccaagtcgctctggtcagaaacagcgactctcccccattcccccagcgttcccaccaggcctgggctgctgggaagcccttgctgtacccaggagcccgacccgcagtatcctggcacagagccacttgtcactcagaacagtcagtgtctccaacgcacaaacatccactcctctgttaccagttaaagcactttaatgctttaaggtgaaaacgaaatcccatccgtgtttttcgtgtaagatcgtgcttctccgagcagtattaatggacgccctccaatgacataacaactgtttttggtaatgtaatcttgggaaaatgtgttatttttttagctgtgtttcagtggggatttttgtttttgtaacataataaagtgtatgttccaatg

SEQ ID NO: 22042 - DNA, 4854 bp, Homo sapiens
  misc_feature 1..4854: note = ENST00000346387
  source 1..4854: mol_type = unassigned DNA; mol_type = unassigned DNA
aggggacgcagcgaaaccggggcccgcgccaggccagccgggacggacgccgatgcccggggctgcgacggctgcagagcgagctgccctcggaggccggcgtggggaagatggcccagtccaccgccacctcccctgatgggggcaccacgtttgagcacctctggagctctctggaaccagacagcacctacttcgaccttccccagtcaagccgggggaataatgaggtggtgggcggaacggattccagcatggacgtcttccacctggagggcatgactacatctgtcatggcccagttcaatctgctgagcagcaccatggaccagatgagcagccgcgcggcctcggccagcccctacaccccagagcacgccgccagcgtgcccacccactcgccctacgcacaacccagctccaccttcgacaccatgtcgccggcgcctgtcatcccctccaacaccgactaccccggaccccaccactttgaggtcactttccagcagtccagcacggccaagtcagccacctggacgtactccccgctcttgaagaaactctactgccagatcgccaagacatgccccatccagatcaaggtgtccaccccgccacccccaggcaccgccatccgggccatgcctgtttacaagaaagcggagcacgtgaccgacgtcgtgaaacgctgccccaaccacgagctcgggagggacttcaacgaaggacagtctgctccagccagccacctcatccgcgtggaaggcaataatctctcgcagtatgtggatgaccctgtcaccggcaggcagagcgtcgtggtgccctatgagccaccacaggtggggacggaattcaccaccatcctgtacaacttcatgtgtaacagcagctgtgtagggggcatgaaccggcggcccatcctcatcatcatcaccctggagatgcgggatgggcaggtgctgggccgccggtcctttgagggccgcatctgcgcctgtcctggccgcgaccgaaaagctgatgaggaccactaccgggagcagcaggccctgaacgagagctccgccaagaacggggccgccagcaagcgtgccttcaagcagagcccccctgccgtccccgcccttggtgccggtgtgaagaagcggcggcatggagacgaggacacgtactaccttcaggtgcgaggccgggagaactttgagatcctgatgaagctgaaagagagcctggagctgatggagttggtgccgcagccactggtggactcctatcggcagcagcagcagctcctacagaggccttttttaacaggattggggtgtccaaactgcatcgagtatttcacctcccaagggttacagagcatttaccacctgcagaacctgaccattgaggacctgggggccctgaagatccccgagcagtaccgcatgaccatctggcggggcctgcaggacctgaagcagggccacgactacagcaccgcgcagcagctgctccgctctagcaacgcggccaccatctccatcggcggctcaggggaactgcagcgccagcgggtcatggaggccgtgcacttccgcgtgcgccacaccatcaccatccccaaccgcggcggcccaggcggcggccctgacgagtgggcggacttcggcttcgacctgcccgactgcaaggcccgcaagcagcccatcaaggaggagttcacggaggccgagatccactgagggcctcgcctggctgcagcctgcgccaccgcccagagacccaagctgcctcccctctccttcctgtgtgtccaaaactgcctcaggaggcaggaccttcgggctgtgcccggggaaaggcaaggtccggcccatccccaggcacctcacaggccccaggaaaggcccagccaccgaagccgcctgtggacagcctgagtcacctgcagaaccttctggagctgccctagtgctgggcttgtggggcgggggctggcccactctcagccctgccactgccccggcgtgctccatggcaggcgtgggtggggaccgcagcgtcggctccgacttccaggcttcatcctagagactgtcatctcccaaccaggcgaggtccttccaaaggaaaggatcctctttgctgatggactgccaaaaagtattttgcgacatcttttggttctggatagtagtgagcagccaagtgactgtgtctgaaacaccagtgtattttcagggaatgtccctaactgcgtcttgcccgcgccgggggctggggactctctctgctggacttgggactggcctctgcccccagcacgctgtattctgcaggaccgcctccttcctgcccctaacaacaaccacagtgttgctgaaattggagaaaactggggagggcgcaaccccccccaggcgcggggaagcatgtggtaccgcctcagccagtgcccctcagcctggccacagtcgcctctcctcggggacccctcagcagaaagggacagcctgtccttagaggactggaaattgtcaatatttgataaaatgatacccttttctacatggtgggtcagcttttttttttttttttttaactttctttctcagcattctctttggagttcaacctagcgcccatgagccaggctgaggaagctgagtgagaagccaggtgggcgggacttgttcccaggaaggccgggtggggaggaagcctagagggaaccccaggaagggcaaatccaggcaaatctgcaggaatgctctgccatgggagcagctcctcccttgccacggccaccttctctagcactgcaaggtccacagggcattgctttcctttctaggcggtggcagtcagggaacagactgaggtaggtgtaggggggtctaggccttcgtggagcaccccagggagttagtaggccccggggagacagagtctgcacaggccctttctggggccacctccatccacgaggagcagcctgagccttggtggccgaaccttgaccgtcccggagcacagcttcagggcagggaaccggagcccctggggggcctcacgggtgtgacgaggcccttcattgcaggcaggtgggccaatgggagccctcacccacgcaagccgagacaccacccagagtgcaggctgcctggccccttctggcacggccagctccacaccccctgcctagggtatgtgtggtcctaagggctaggagcttcccctactaacatctcccagaaaaagcagttaagcccctcagggcacagcaaggttagacacagcccccatccccagatcaggactccatcttgctaagtggcatcaccgtcaccagcctccccttatttaaaagcagcgactggtgttgccgcaggtacctggtctacgaagacgcaggcatccctctcccaccgtccacctccccgggggccgctgacagcacagtcgcctgggtgcacgcttgtgggggcagcaggaacggggctgtcggctctcaggggatctggctgcagccagggcgagggcctggcccttccttccagctccttccggctccttccagctgaagggcaggaagctctggccgcttagcttctagggttccatctccctagaaaggtgcccacgcccagggcatcagtcagtagcggcagcagcagcagactcggggctttcccagggtggcgcagccaccccagctgcatgtcacctcagctctccatcttattgccattttgtagatgaggaagctgagaccagaaaggctaagacccatgccccaggcaccacacccatctcttgggggctgggcacctgctacccgaggccacctcctgaagcccccactcttcccccatgttccacttcaggagccgcgggggcccatcctgacacccggggttcctcagcccagcgcagatgtgcttcagttccagagggcttgttgatttgtttcttaggtacgttacctgtccaccctgagtccagtgaggctgtcccaagagcccctgtagtgtgctcctgggaagggctgggggggctgggggggctgggagaggcccaggggcagctgtcactggaaccccagccagatgtccaaggaagccggccagaacacggagcagccagatggccccagctgcacctgtctagggagcccatgcagcctccttgcactggagaagcagctgtgaaagtagacagagttgagacttcgccgtggtcaggagaaaatgcaaattcccaggaacaagaatcctttaagtgatatgtttttataaaactaaacaaatcaacaaataaatcttgaaggcggatggttttcccagcagtgcaggggttggagggaggctgctggcactcctggggccaagggggacaggcagtggtcctgagtctgctcagagaggcaaggcagaaggagctcgccaggcaggtcagctcacatctgtccaagtcgctctggtcagaaacagcgactctcccccattcccccagcgttcccaccaggcctgggctgctgggaagcccttgctgtacccaggagcccgacccgcagtatcctggcacagagccacttgtcactcagaacagtcagtgtctccaacgcacaaacatccactcctctgttaccagttaaagcactttaatgctttaaggtgaaaacgaaatcccatccgtgtttttcgtgtaagatcgtgcttctccgagcagtattaatggacgccctccaatgacataacaactgtttttggtaatgtaatcttgggaaaatgtgttatttttttagctgtgtttcagtggggatttttgtttttgtaacataataaagtgtatgttccaatg

SEQ ID NO: 22043 - DNA, 3293 bp, Homo sapiens
  misc_feature 1..3293: note = ENST00000552077
  source 1..3293: mol_type = unassigned DNA; mol_type = unassigned DNA
ggcagtggctgaagtggcggcggcttcggcggctgcggcggctgcaacagcttcgggctcggggttttggcggcggcgccggcgggctaggctgcgcggtgcggaccccggcgcgcggtccgggttgctggggcggcgcgtaagatgcctctaatggaggagtttctgagcagcacccctggcccagtggctttgaaagggagctcaaaccagagactatttcaagccctggatatcatatcctgagggccacaggagaagagaacatggctgtgagtttggatgacgacgtgccgctcatcctgaccttggatgagggtggcagtgccccactggctccctccaacggcctgggccaagaagagctacctagcaaaaatggcggcagctatgccatccacgactcccaggcccccagtctcagctctgggggtgagagttccccctccagccccgcacacaactgggagatgaattaccaagaggcagcaatctacctccaggaaggcgagaacaacgacaagttcttcacccaccccaaggatgccaaggcgctggcggcctacctctttgcacacaatcacctcttctacctgatggagctggccacggccctgctgctgctgctgctctccctgtgcgaggcccccgccgtccccgcactccggcttggcatctatgtccacgccaccctggagctgtttgccctgatggtggtagtgtttgaactctgcatgaagttacgctggctgggcctccacaccttcatccggcacaagcggaccatggtcaagacctcggtgctggtggtgcagtttgtcgaggccatcgtggtgttggtacggcagatgtcccatgtgcgggtgacccgagcactgcgctgcattttcctggtggactgtcggtattgcggtggcgtccggcgcaacctgcggcagatcttccagtccctgccgcccttcatggacatcctcctgctgctgctgttcttcatgatcatctttgccatcctcggtttctacttgttctcccctaacccttcagacccctacttcagcaccctggagaacagcatcgtcagtctgtttgtccttctgaccacagccaatttcccagatgtgatgatgccctcctactcccggaacccctggtcctgcgtcttcttcatcgtgtacctctccatcgagctgtatttcatcatgaacctgcttctggctgtggtgttcgacaccttcaatgacattgagaaacgcaagttcaagtctttgctactgcacaagcgaaccgctatccagcatgcctaccgcctgctcatcagccagaggaggcctgccggcatctcctacaggcagtttgaaggcctcatgcgcttctacaagccccggatgagtgccagggagcgctatcttaccttcaaggccctgaatcagaacaacacacccctgctcagcctaaaggacttttacgatatctacgaagttgctgctttgaagtggaaggccaagaaaaacagagagcactggtttgatgagcttcccaggacggcgctcctcatcttcaaaggtattaatatccttgtgaagtccaaggccttccagtatttcatgtacttggtggtggcagtcaacggggtctggatcctcgtggagacatttatgctgaaaggtgggaacttcttctccaagcacgtgccctggagttacctcgtctttctaactatctatggggtggagctgttcctgaaggttgccggcctgggccctgtggagtacttgtcttccggatggaacttgtttgacttctccgtgacagtgttcgccttcctgggactgctggcgctggccctcaacatggagcccttctatttcatcgtggtcctgcgccccctccagctgctgaggttgtttaagttgaaggagcgctaccgcaacgtgctggacaccatgttcgagctgctgccccggatggccaggtactgccagcccccaccctggcctgcaggtccaggtgccgtgtggcagtgccccgtgggggcgggagccgagtggcagtcgggggaaaggagttccacaaaggactgcaatcgagggcctgacggggctccaaggagcctggaatcttgaccaccacaggtctcctgggcaccatttttctccactgacctgtctgacatatttagtagggagggcagggagctgtcaactcgcttaccacctgtgtctacattcacaggtaaggggtcacctgtgagtctaccttcacaggtaaggggtgaatctctgggaaaggggcatttgttcatagcgtcctgacttgagctgtttttcaccccagagctgccccacgaggccccttccccgcaggcactttccagttggtgaaccgaccaggggcatggccctgcagtcagccccacgggtccgaggaggccggggctgcagaggagccgttccctcctgccggccccgcgtcaccctgcccctgtcgccccacagcctgggcctcaccctgctcatcttttactactccttcgccatcgtgggcatggagttcttctgcgggatcgtcttccccaactgctgcaacacgagtacagtggcagatgcctaccgctggcgcaaccacaccgtgggcaacaggaccgtggtggaggaaggctactattatctcaataattttgacaacatcctcaacagctttgtgaccctgtttgagctcacagttgtcaacaactggtacatcatcatggaaggcgtcacctctcagacctcccactggagccgcctctacttcatgaccttttacattgtgaccatggtggtgatgacgatcattgtcgcctttatcctcgaggccttcgtcttccgaatgaactacagccgcaagaaccaggactcggaagttgatggtggcatcacccttgagaaggaaatctccaaagaagagctggttgccgtcctggagctctaccgggaggcacggggggcctcctcggatgtcaccaggctgctggagaccctctcccagatggagagataccagcaacattccatggtgtttctgggacggcgatcaaggaccaagagcgacctgagcctgaagatgtaccaggaggagatccaggagtggtatgaggagcatgccagggagcaagagcagcagcgacaactcagcagcagtgcagcccccgccgcccagcagcccccaggcagccgccagcgctcccagaccgttacctagcccagcgcccgaaagccgtctcttctatgcaataacacaatagtattactcta

SEQ ID NO: 22044 - DNA, 2558 bp, Homo sapiens
  misc_feature 1..2558: note = ENST00000392569
  source 1..2558: mol_type = unassigned DNA; mol_type = unassigned DNA
ccctttcctcctttggcttaagcctttggcaggacagattttgggctggaggccagcaattcaactgggagggctctgtgccagttcttgcctttctgaagatggcggcagctatgccatccacgactcccaggcccccagtctcagctctgggggtgagagttccccctccagccccgcacacaactgggagatgaattaccaagaggcagcaatctacctccaggaaggcgagaacaacgacaagttcttcacccaccccaaggatgccaaggcgctggcggcctacctctttgcacacaatcacctcttctacctgatggagctggccacggccctgctgctgctgctgctctccctgtgcgaggcccccgccgtccccgcactccggcttggcatctatgtccacgccaccctggagctgtttgccctgatggtggtagtgtttgaactctgcatgaagttacgctggctgggcctccacaccttcatccggcacaagcggaccatggtcaagacctcggtgctggtggtgcagtttgtcgaggccatcgtggtgttggtacggcagatgtcccatgtgcgggtgacccgagcactgcgctgcattttcctggtggactgtcggtattgcggtggcgtccggcgcaacctgcggcagatcttccagtccctgccgcccttcatggacatcctcctgctgctgctgttcttcatgatcatctttgccatcctcggtttctacttgttctcccctaacccttcagacccctacttcagcaccctggagaacagcatcgtcagtctgtttgtccttctgaccacagccaatttcccagatgtgatgatgccctcctactcccggaacccctggtcctgcgtcttcttcatcgtgtacctctccatcgagctgtatttcatcatgaacctgcttctggctgtggtgttcgacaccttcaatgacattgagaaacgcaagttcaagtctttgctactgcacaagcgaaccgctatccagcatgcctaccgcctgctcatcagccagaggaggcctgccggcatctcctacaggcagtttgaaggcctcatgcgcttctacaagccccggatgagtgccagggagcgctatcttaccttcaaggccctgaatcagaacaacacacccctgctcagcctaaaggacttttacgatatctacgaagttgctgctttgaagtggaaggccaagaaaaacagagagcactggtttgatgagcttcccaggacggcgctcctcatcttcaaaggtattaatatccttgtgaagtccaaggccttccagtatttcatgtacttggtggtggcagtcaacggggtctggatcctcgtggagacatttatgctgaaaggtgggaacttcttctccaagcacgtgccctggagttacctcgtctttctaactatctatggggtggagctgttcctgaaggttgccggcctgggccctgtggagtacttgtcttccggatggaacttgtttgacttctccgtgacagtgttcgccttcctgggactgctggcgctggccctcaacatggagcccttctatttcatcgtggtcctgcgccccctccagctgctgaggttgtttaagttgaaggagcgctaccgcaacgtgctggacaccatgttcgagctgctgccccggatggccagcctgggcctcaccctgctcatcttttactactccttcgccatcgtgggcatggagttcttctgcgggatcgtcttccccaactgctgcaacacgagtacagtggcagatgcctaccgctggcgcaaccacaccgtgggcaacaggaccgtggtggaggaaggctactattatctcaataattttgacaacatcctcaacagctttgtgaccctgtttgagctcacagttgtcaacaactggtacatcatcatggaaggcgtcacctctcagacctcccactggagccgcctctacttcatgaccttttacattgtgaccatggtggtgatgacgatcattgtcgcctttatcctcgaggccttcgtcttccgaatgaactacagccgcaagaaccaggactcggaagttgatggtggcatcacccttgagaaggaaatctccaaagaagagctggttgccgtcctggagctctaccgggaggcacggggggcctcctcggatgtcaccaggctgctggagaccctctcccagatggagagataccagcaacattccatggtgtttctgggacggcgatcaaggaccaagagcgacctgagcctgaagatgtaccaggaggagatccaggagtggtatgaggagcatgccagggagcaagagcagcagcgacaactcagcagcagtgcagcccccgccgcccagcagcccccaggcagccgccagcgctcccagaccgttacctagcccagcgcccgaaagccgtctcttctatgcaataacacaatagtattactctactgcgatgtacggaactgcggtgtgtgtacacatactcacgtatatgcacatatttatatacagg

SEQ ID NO: 22045 - DNA, 828 bp, Homo sapiens
  misc_feature 1..828: note = ENST00000552542
  source 1..828: mol_type = unassigned DNA; mol_type = unassigned DNA
acatttgcccagggctctgcttgggtttggagcctttactaacgtgtgtcaataatgcgggtccaccttccataccatcttgcaaccaattatcagaaagagaaggcctgagcagggggatgtgcattttgctttctttcggcgtagcatctcatgctagatttttatctgggggcctttgaagagccagccggcacagaagcatggtggcaacgctgtgcctggaaaactcatcagtgtcactctggtttattttcctctcctctttgagctctttcccatggtgtggggctctcagtgacaactggcaagcggcggggcggttgctcgttgtcattctggtaggcgctggtttccggagggctccgagtgctttatggcggcagctatgccatccacgactcccaggcccccagtctcagctctgggggtgagagttccccctccagccccgcacacaactgggagatgaattaccaagaggcagcaatctacctccaggaaggcgagaacaacgacaagttcttcacccaccccaaggatgccaaggcgctggcggcctacctctttgcacacaatcacctcttctacctgatggagctggccacggccctgctgctgctgctgctctccctgtgcgaggcccccgccgtccccgcactccggcttggcatctatgtccacgccaccctggagctgtttgccctgatggtggtagtgtttgaactctgcatgaagttacgctggctgggcctccacaccttcatccggcacaagcggaccatggtcaagacctcggtgctggtggtgcagtttgtcgaggccatc

SEQ ID NO: 22046 - DNA, 2296 bp, Homo sapiens
  misc_feature 1..2296: note = ENST00000428632
  source 1..2296: mol_type = unassigned DNA; mol_type = unassigned DNA
ctttcggcgtagcatctcatgctagatttttatctgggggcctttgaagagccagccggcacagaagcatggtggcaacgctgtgcctggaaaactcatcagtgtcactctggtttattttcctctcctctttgagctctttcccatggtgtggggctctcagtgacaactggcaagcggcggggcggttgctcgttgtcattctggtaggcgctggtttccggagggctccgagtgctttatggcggcagctatgccatccacgactcccaggcccccagtctcagctctgggggtgagagttccccctccagccccgcacacaactgggagatgaattaccaagaggcagcaatctacctccaggaaggcgagaacaacgacaagttcttcacccaccccaaggatgccaaggcgctggcggcctacctctttgcacacaatcacctcttctacctgatggagctggccacggccctgctgctgctgctgctctccctgtgcgaggcccccgccgtccccgcactccggcttggcatctatgtccacgccaccctggagctgtttgccctgatggtggtagtgtttgaactctgcatgaagttacgctggctgggcctccacaccttcatccggcacaagcggaccatggtcaagacctcggtgctggtggtgcagtttgtcgaggccatcgtggtgttggtacggcagatgtcccatgtgcgggtgacccgagcactgcgctgcattttcctggtggactgtcggtattgcggtggcgtccggcgcaacctgcggcagatcttccagtccctgccgcccttcatggacatcctcctgctgctgctgttcttcatgatcatctttgccatcctcggtttctacttgttctcccctaacccttcagacccctacttcagcaccctggagaacagcatcgtcagtctgtttgtccttctgaccacagccaatttcccagatgtgatgatgccctcctactcccggaacccctggtcctgcgtcttcttcatcgtgtacctctccatcgagctgtatttcatcatgaacctgcttctggctgtggtgttcgacaccttcaatgacattgagaaacgcaagttcaagtctttgctactgcacaagcgaaccgctatccagcatgcctaccgcctgctcatcagccagaggaggcctgccggcatctcctacaggcagtttgaaggcctcatgcgcttctacaagccccggatgagtgccagggagcgctatcttaccttcaaggccctgaatcagaacaacacacccctgctcagcctaaaggacttttacgatatctacgaagttgctgctttgaagtggaaggccaagaaaaacagagagcactggtttgatgagcttcccaggacggcgctcctcatcttcaaaggtattaatatccttgtgaagtccaaggccttccagtatttcatgtacttggtggtggcagtcaacggggtctggatcctcgtggagacatttatgctgaaaggtgggaacttcttctccaagcacgtgccctggagttacctcgtctttctaactatctatggggtggagctgttcctgaaggttgccggcctgggccctgtggagtacttgtcttccggatggaacttgtttgacttctccgtgacagtgttcgccttcctgggactgctggcgctggccctcaacatggagcccttctatttcatcgtggtcctgcgccccctccagctgctgaggttgtttaagttgaaggagcgctaccgcaacgtgctggacaccatgttcgagctgctgccccggatggccaggtactgccagcccccaccctggcctgcaggtccaggtgccgtgtggcagtgccccgtgggggcgggagccgagtggcagtcgggggaaaggagttccacaaaggactgcaatcgagggcctgacggggctccaaggagcctggaatcttgaccaccacaggtctcctgggcaccatttttctccactgacctgtctgacatatttagtagggagggcagggagctgtcaactcgcttaccacctgtgtctacattcacaggtaaggggtcacctgtgagtctaccttcacaggtaaggggtgaatctctgggaaaggggcatttgttcatagcgtcctgacttgagctgtttttcaccccagagctgccccacgaggccccttccccgcaggcactttccagttggtgaaccgaccaggggcatggccctgcagtcagccccacgggtccgaggaggccgg

SEQ ID NO: 22047 - DNA, 593 bp, Homo sapiens
  misc_feature 1..593: note = ENST00000548465
  source 1..593: mol_type = unassigned DNA; mol_type = unassigned DNA
gccaaacggtgtctttttgctcttaagcctgggtgccaagtgaatctctctcctcttccaatgcagatggcggcagctatgccatccacgactcccaggcccccagtctcagctctgggggtgagagttccccctccagccccgcacacaactgggagatgaattaccaagaggcagcaatctacctccaggaaggcgagaacaacgacaagttcttcacccaccccaaggatgccaaggcgctggcggcctacctctttgcacacaatcacctcttctacctgatggagctggccacggccctgctgctgctgctgctctccctgtgcgaggcccccgccgtccccgcactccggcttggcatctatgtccacgccaccctggagctgtttgccctgatggtggtagtgtttgaactctgcatgaagttacgctggctgggcctccacaccttcatccggcacaagcggaccatggtcaagacctcggtgctggtggtgcagtttgtcgaggccatcgtggtgttggtacggcagatgtcccatgtgcgggtgacccgagcactgcgctgcattttcctggtggactgtcgg

SEQ ID NO: 22048 - DNA, 610 bp, Homo sapiens
  misc_feature 1..610: note = ENST00000546781
  source 1..610: mol_type = unassigned DNA; mol_type = unassigned DNA
gcttctggctgtggtgttcgacaccttcaatgacattgagaaacgcaagttcaagtctttgctactgcacaagcgaaccgctatccagcatgcctaccgcctgctcatcagccagaggaggcctgccggcatctcctacaggcagtttgaaggcctcatgcgcttctacaagccccggatgagtgccagggagcgctatcttaccttcaaggccctgaatcagaacaacacacccctgctcagcctaaaggacttttacgatatctacgaagttgctgctttgaagtggaaggccaagaaaaacagagagcactggtttgatgagcttcccaggacggcgctcctcatcttcaaaggtattaatatccttgtgaagtccaaggccttccagtatttcatgtacttggtggtggcagtcaacggggtctggatcctcgtggagacatttatgctgaaagtctatggggtggagctgttcctgaaggttgccggcctgggccctgtggagtacttgtcttccggatggaacttgtttgacttctccgtgacagtgttcgccttcctgggactgctggcgctggccctcaacatggagcccttctatttcatc

SEQ ID NO: 22049 - DNA, 2975 bp, Homo sapiens
  misc_feature 1..2975: note = ENST00000551127
  source 1..2975: mol_type = unassigned DNA; mol_type = unassigned DNA
cagcatgcctaccgcctgctcatcagccagaggaggcctgccggcatctcctacaggcagtttgaaggcctcatgcgcttctacaagccccggatgagtgccagggagcgctatcttaccttcaaggccctgaatcagaacaacacacccctgctcagcctaaaggacttttacgatatctacgaagttgctgctttgaagtggaaggccaagaaaaacagagagcactggtttgatgagcttcccaggacggcgctcctcatcttcaaaggtattaatatccttgtgaagtccaaggccttccagtatttcatgtacttggtggtggcagtcaacggggtctggatcctcgtggagacatttatgctgaaaggtgggaacttcttctccaagcacgtgccctggagttacctcgtctttctaactatctatggggtggagctgttcctgaaggttgccggcctgggccctgtggagtacttgtcttccggatggaacttgtttgacttctccgtgacagtgttcgccttcctgggactgctggcgctggccctcaacatggagcccttctatttcatcgtggtcctgcgccccctccagctgctgaggttgtttaagttgaaggagcgctaccgcaacgtgctggacaccatgttcgagctgctgccccggatggccaggtactgccagcccccaccctggcctgcaggtccaggtgccgtgtggcagtgccccgtgggggcgggagccgagtggcagtcgggggaaaggagttccacaaaggactgcaatcgagggcctgacggggctccaaggagcctggaatcttgaccaccacaggtctcctgggcaccatttttctccactgacctgtctgacatatttagtagggagggcagggagctgtcaactcgcttaccacctgtgtctacattcacaggtaaggggtcacctgtgagtctaccttcacaggtaaggggtgaatctctgggaaaggggcatttgttcatagcgtcctgacttgagctgtttttcaccccagagctgccccacgaggccccttccccgcaggcactttccagttggtgaaccgaccaggggcatggccctgcagtcagccccacgggtccgaggaggccggggctgcagaggagccgttccctcctgccggccccgcgtcaccctgcccctgtcgccccacagcctgggcctcaccctgctcatcttttactactccttcgccatcgtgggcatggagttcttctgcgggatcgtcttccccaactgctgcaacacgagtacagtggcagatgcctaccgctggcgcaaccacaccgtgggcaacaggaccgtggtggaggaaggctactattatctcaataattttgacaacatcctcaacagctttgtgaccctgtttgagctcacagttgtcaacaactggtacatcatcatggaaggcgtcacctctcagacctcccactggagccgcctctacttcatgaccttttacattgtgaccatggtggtgatgacgatcattgtcgcctttatcctcgaggccttcgtcttccgaatgaactacagccgcaagaaccaggactcggaaggtctgtgcagggatgatgccttgggcatttgatatctgccgcctacccagctctgtctgtctgtctgggtggctgtccagccagccatcaggctgtcatttttctgctgtctggctgtccagcttatctatctggcttgtctttctagatcttgtatttgcattgattttcaaatatttaatgtcagaaaacgtaatctaactttaaaataagacagagcatgtcatagttggagaaaaatcaagaagtagagaaaggcttatgtggcagcagcagcccctgccctgcctttccctcccgtcctccagaggcttctccttcttggctatttcttctgttagtcatctccacgtttctcaataataggttcacactacggttcttgatttaaatggtgtaaatattgcttatggcacaggcgaatcgtattcctgctgcaactggatggtgctggctttagtgactgcctcactcttcccagattgcacagctttctgtgtgctgaccctcccttcttcccaaattctccatcaaaactgtctgcacttgatctcttgagcccaggaggtcaagactgcagtgagccatgatcacaccactgcactccagcctgggcagcggagtgagaccctgtctcttaaaagaaacagaaaaccctgtgcccacacttgttacctctcatcctcagatctctgtgctatcagaccatctgaccattttctctgtgcttagaggccccttcctgaaaccctctggccctgtaacagctgccagctagacctgcgctcctgacatcacagcagagggaggggaagggaaaggagggccaacgaggagagcaggacaccaatgcagtgtcggtttagagagagaaccttaagaccccctgcggaagggggcaaggaggtacgagacccagccaggttggcagctgcagccccgggcccttcccacacctgccttccatccctgcagttgatggtggcatcacccttgagaaggaaatctccaaagaagagctggttgccgtcctggagctctaccgggaggcacggggggcctcctcggatgtcaccaggctgctggagaccctctcccagatggagagataccagcaacattccatggtgtttctgggacggcgatcaaggaccaagagcgacctgagcctgaagatgtaccaggaggagatccaggagtggtatgaggagcatgccagggagcaagagcagcagcgacaactcagcagcagtgcagcccccgccgcccagcagcccccaggcagccgccagcgctcccagaccgttacctagcccagcgcccgaaagccgtctcttctatgcaataacacaatagtattactct

SEQ ID NO: 22050 - DNA, 389 bp, Homo sapiens
  misc_feature 1..389: note = ENST00000546503
  source 1..389: mol_type = unassigned DNA; mol_type = unassigned DNA
tctcctacaggcagtttgaaggcctcatgcgcttctacaagccccggatgagtgccagggagcgctatcttaccttcaaggccctgaatcagaacaacacacccctgctcagcctaaaggacttttacgatatctacgaagttgctgctttgaagtggaaggccaagaaaaacagagagcactggtttgatgagcttcccaggacggcgctcctcatcttcaaaggtattaatatccttgtgaagtccaaggccttccagtatttcatgtgtaagtgtgaaatatctccactctaggccactttccccctgagtcctttgctgttctagaagcgggagaggcaagagattggtcctagagtcctgtgtttgactttttattgtggggaa

SEQ ID NO: 22051 - DNA, 558 bp, Homo sapiens
  misc_feature 1..558: note = ENST00000550543
  source 1..558: mol_type = unassigned DNA; mol_type = unassigned DNA
tttatgctgaaaggtgggaacttcttctccaagcacgtgccctggagttacctcgtctttctaactatctatggggtggagctgttcctgaaggttgccggcctgggccctgtggagtacttgtcttccggatggaacttgtttgacttctccgtgacagtgttcgccttcctgggactgctggcgctggccctcaacatggagcccttctatttcatcgtggtcctgcgccccctccagctgctgaggtgatgggcagggcagagccggagacagggagaaagagagggaggacgggaatgccccaggattgatccgggaagtgacccagaatgagccagaaggttcacaagccagagtcacagatgtcaccccctggagaatcaccatggggtcaacatccccacccctgagggtgtgcaggctgcctgtgcccttcccctcactgcaccaggtgcctctgggcagagaaacccagcccatgactcatgtgcaccccacctgaggtggcattgcaccagcgacaggagcccatatgctcaagtcacagatcacaga

SEQ ID NO: 22052 - DNA, 609 bp, Homo sapiens
  misc_feature 1..609: note = ENST00000547955
  source 1..609: mol_type = unassigned DNA; mol_type = unassigned DNA
aggtgggaacttcttctccaagcacgtgccctggagttacctcgtctttctaactatctatggggtggagctgttcctgaaggttgccggcctgggccctgtggagtacttgtcttccggatggaacttgtttgacttctccgtgacagtgttcgccttcctgggactgctggcgctggccctcaacatggagcccttctatttcatcgtggtcctgcgccccctccagctgctgaggttgtttaagttgaaggagcgctaccgcaacgtgctggacaccatgttcgagctgctgccccggatggccaggtaaggggtcacctgtgagtctaccttcacagcctgggcctcaccctgctcatcttttactactccttcgccatcgtgggcatggagttcttctgcgggatcgtcttccccaactgctgcaacacgagtacagtggcagatgcctaccgctggcgcaaccacaccgtgggcaacaggaccgtggtggaggaaggctactattatctcaataattttgacaacatcctcaacagctttgtgaccctgtttgagctcacagttgtcaacaactggtacatcatcatggaaggcgtcacctct

SEQ ID NO: 22053 - DNA, 565 bp, Homo sapiens
  misc_feature 1..565: note = ENST00000546907
  source 1..565: mol_type = unassigned DNA; mol_type = unassigned DNA
tgtttcagacttctgtcctctctggaggtgactgatcgccttgtgaccctccctcctttctcccttgtgctccggccagcacgagtacagtggcagatgcctaccgctggcgcaaccacaccgtgggcaacaggaccgtggtggaggaaggctactattatctcaataattttgacaacatcctcaacagctttgtgaccctgtttgagctcacagttgtcaacaactggtacatcatcatggaaggcgtcacctctcagacctcccactggagccgcctctacttcatgaccttttacattgtgaccatggtaggtcccggaccacagaacgctctttgtccttcgtcttccacatcaccagctgcccctgctcttcagcctgcagcgtcagggagtggggctgggtcccatctggccggactctgttgggcgtgggctgcgcagccacggacacctacccaccctcctcccctgcctctgcccctccctccctatccctggccaggtggtgatgacgatcattgtcgcctttatcctcgaggccttcgtcttccgaatgaact

SEQ ID NO: 22054 - DNA, 312 bp, Homo sapiens
  misc_feature 1..312: note = ENST00000546787
  source 1..312: mol_type = unassigned DNA; mol_type = unassigned DNA
ctcctcggatgtcaccaggctgctggagaccctctcccagatggagagataccagcaacattccatggtgtttctgggacggcgatcaaggaccaagagcgacctgagcctgaagatgtaccaggaggagatccagagatggtatcgctctgtcacctgggctggagtccagtggcgtgatcatagctcactgtagcctccaacccctgggctcaagtgatcctccccactcagcctacccaagcagctggaactacaggagtggtatgaggagcatgccagggagcaagagcagcagcgacaactcagcag

SEQ ID NO: 22055 - DNA, 5173 bp, Homo sapiens
  misc_feature 1..5173: note = ENST00000541517
  source 1..5173: mol_type = unassigned DNA; mol_type = unassigned DNA
atggagtcttgctacattgcccaggctggtcttgaactgctaggctcaagcagttctcccaccttgacctcccaaagcgctgagattacagaagatgcctctaatggaggagtttctgagcagcacccctggcccagtggctttgaaagggagctcaaaccagagactatttcaagccctggatatcatatcctgagggccacaggagaagagaacatggctgtgagtttggatgacgacgtgccgctcatcctgaccttggatgagggtggcagtgccccactggctccctccaacggcctgggccaagaagagctacctagcaaaaatggcggcagctatgccatccacgactcccaggcccccagtctcagctctgggggtgagagttccccctccagccccgcacacaactgggagatgaattaccaagaggcagcaatctacctccaggaaggcgagaacaacgacaagttcttcacccaccccaaggatgccaaggcgctggcggcctacctctttgcacacaatcacctcttctacctgatggagctggccacggccctgctgctgctgctgctctccctgtgcgaggcccccgccgtccccgcactccggcttggcatctatgtccacgccaccctggagctgtttgccctgatggtggtagtgtttgaactctgcatgaagttacgctggctgggcctccacaccttcatccggcacaagcggaccatggtcaagacctcggtgctggtggtgcagtttgtcgaggccatcgtggtgttggtacggcagatgtcccatgtgcgggtgacccgagcactgcgctgcattttcctggtggactgtcggtattgcggtggcgtccggcgcaacctgcggcagatcttccagtccctgccgcccttcatggacatcctcctgctgctgctgttcttcatgatcatctttgccatcctcggtttctacttgttctcccctaacccttcagacccctacttcagcaccctggagaacagcatcgtcagtctgtttgtccttctgaccacagccaatttcccagatgtgatgatgccctcctactcccggaacccctggtcctgcgtcttcttcatcgtgtacctctccatcgagctgtatttcatcatgaacctgcttctggctgtggtgttcgacaccttcaatgacattgagaaacgcaagttcaagtctttgctactgcacaagcgaaccgctatccagcatgcctaccgcctgctcatcagccagaggaggcctgccggcatctcctacaggcagtttgaaggcctcatgcgcttctacaagccccggatgagtgccagggagcgctatcttaccttcaaggccctgaatcagaacaacacacccctgctcagcctaaaggacttttacgatatctacgaagttgctgctttgaagtggaaggccaagaaaaacagagagcactggtttgatgagcttcccaggacggcgctcctcatcttcaaaggtattaatatccttgtgaagtccaaggccttccagtatttcatgtacttggtggtggcagtcaacggggtctggatcctcgtggagacatttatgctgaaaggtgggaacttcttctccaagcacgtgccctggagttacctcgtctttctaactatctatggggtggagctgttcctgaaggttgccggcctgggccctgtggagtacttgtcttccggatggaacttgtttgacttctccgtgacagtgttcgccttcctgggactgctggcgctggccctcaacatggagcccttctatttcatcgtggtcctgcgccccctccagctgctgaggttgtttaagttgaaggagcgctaccgcaacgtgctggacaccatgttcgagctgctgccccggatggccagcctgggcctcaccctgctcatcttttactactccttcgccatcgtgggcatggagttcttctgcgggatcgtcttccccaactgctgcaacacgagtacagtggcagatgcctaccgctggcgcaaccacaccgtgggcaacaggaccgtggtggaggaaggctactattatctcaataattttgacaacatcctcaacagctttgtgaccctgtttgagctcacagttgtcaacaactggtacatcatcatggaaggcgtcacctctcagacctcccactggagccgcctctacttcatgaccttttacattgtgaccatggtggtgatgacgatcattgtcgcctttatcctcgaggccttcgtcttccgaatgaactacagccgcaagaaccaggactcggaagttgatggtggcatcacccttgagaaggaaatctccaaagaagagctggttgccgtcctggagctctaccgggaggcacggggggcctcctcggatgtcaccaggctgctggagaccctctcccagatggagagataccagcaacattccatggtgtttctgggacggcgatcaaggaccaagagcgacctgagcctgaagatgtaccaggaggagatccaggagtggtatgaggagcatgccagggagcaagagcagcagcgacaactcagcagcagtgcagcccccgccgcccagcagcccccaggcagccgccagcgctcccagaccgttacctagcccagcgcccgaaagccgtctcttctatgcaataacacaatagtattactctactgcgatgtacggaactgcggtgtgtgtacacatactcacgtatatgcacatatttatatacaggaagaaaaaagacagacaagatggggcttggtttataaccaccttgccctgtcttccttaactccagaagccagtttggtgaggggtgggggtgcggccaccaggtctgagctcttcctactgtggaaggctccagaaggcccttcacaaggagacccctcacctggatccagtcgactgcggggcttgcccctcatgtgggctggcctccatcggccacgtccaaagctgtcactgctactgcttcaggctcacatccccccgacctgatggcgtgcccgccccctctccctgcggcccatgccacaggtttctgtgttttgctttagggacagaaccacttaggaaggaaagaactcccggtctccagggtggtatttcagtgtctgtgataatgtcacgcaacacctcttcggggaccagtgcccaggatctaatggaagcggaattggggcaactgggcccatgtggccagagctcagttagccagtgccgggcggccacagattacactgaccaatctcctcccttggctctgcaagcctcccacccagccttctctggcttaacccttgttggcgaaaactcttccacagtggcctccttggggacccagaacccggaggaaggggcatgaggcaggaagtggggccgatgtctgcaacccagaccacttcgtggaatgggctcttgaccaaatccctttttttgcgatttacccgttcaagcaaaacaacgttttggttaactaaggattgtgctaaagccgataccaggtccttcacacgtgtgcactaggaacaggagcgaacagcacagagagacgctccctgtgggacgcagcagccccgtggccccggcccagttcccagccaccctccctggctctgctcacaccagagatttccatagcaggagcggttggtgcagaagtaggttcagatgaacctcagttaacgtcgccacccctcctcccaccatggtaccctgtaggagccctgtatgacatctgagcgtggtggaggtaggagggttgccagctgcagtgaccctgccacagaggcagggtcagtgcagaggtcgctttggttccgcttccctgggccacagaacggaacacagcataggttctgcagcaggagccgcagtggcaggatggagggtgcgaagggcaaggagtgcactgctgggcattcctggccagccccggccctctggtgcctgcttcctgtgacttcagaaggcaggtggacagagcctccctctggccttgtcctcttcccagccacagaacgggcagggtggcacccgaccccaggggagcagtacctggtcccccaccccctcctcccaaccacctccaaggccaagctgggtcccatagccagcacggcatggttctccccttccccccttcccaggtcaggggagttggacaagtagcaggtgtttgtttttaaagcacagccctttgggaaagcaacacattattgagactcactgtgattcccccgggagtcagactggctttgtcctcttcctctctggagggccatgggccatcagcaggagctccacatcgagccccaggccagaaccccctccctttcacagagagggaactttattgcacaattgggtgccttttagcttttgtgtgttgaaatgggcgttttggaagcaagggtcaggggacagcttctaaaggtgtgagtctctgacctgagcatctgggcctcgcctgggcccttcttcctccccaggggtggaaacgtggaggggccagcagcaccccggggtctgcccaggggagtcaaggccccgaggtgggggggcctattccaggaggagtgggatctcggccctgtccagagcgagttaatgtgtccatctgcccaaccctgtcctgagaaaggacctggttttggccaggacctgacaaatacccaatggcagcagtgtcaacagacgggagtccagccagggtgggtgcccttgtcattgaggttagggacagctatccccaggttatgcctggccccacccagcagggagttggggtccccccacaggctgtgagctctgtgggccctgggatgtgatctagctcagatgccctctcatccttgatgtcatagttgagtgcacccaagtggcacccactggcggccaggggcacagcctggtggtggtggcaatagaactgtgcccctcctcagctcctcgcttcccctcccacagccccagccttactccaccatgcggacaatcattttgtacggatcacgggagcaatgctgtacggttttgtacactggtggtttgtttcctagaaaacccattgtgtctctggatttctagcacattactaaaagagcctctgctttgt

SEQ ID NO: 22056 - DNA, 544 bp, Homo sapiens
  misc_feature 1..544: note = ENST00000549279
  source 1..544: mol_type = unassigned DNA; mol_type = unassigned DNA
gagctggcgcagctgccctggtggcagtggctgaagtggcggcggcttcggcggctgcggcggctgcaacagcttcgggctcggggttttggcggcggcgccggcgggctaggctgcgcgaagatgcctctaatggaggagtttctgagcagcacccctggcccagtggctttgaaagggagctcaaaccagagactatttcaagccctggatatcatatcctgagggccacaggagaagagaacatggctgtgagtttggatgacgacgtgccgctcatcctgaccttggatgagggtggcagtgccccactggctccctccaacggcctgggccaagaagagctacctagcaaaagacgctgctgcatgctgtgctccagcaaacagaaaccttggattccctgcagggtcatttccgatgtggcgtgcaaagcagccagctgtttcgagggagcgtctgggccctgtgacatcagcatgtgggagtgttaccgtgtgtgcaaacagatggcggcagctatgccatccacgactcccaggcc

SEQ ID NO: 22057 - DNA, 5274 bp, Homo sapiens
  misc_feature 1..5274: note = ENST00000335509
  source 1..5274: mol_type = unassigned DNA; mol_type = unassigned DNA
gagaggacggtaggcggtggataggagagctggcgcagctgccctggtggcagtggctgaagtggcggcggcttcggcggctgcggcggctgcaacagcttcgggctcggggttttggcggcggcgccggcgggctaggctgcgcggtgcggaccccggcgcgcggtccgggttgctggggcggcgcgtaagatgcctctaatggaggagtttctgagcagcacccctggcccagtggctttgaaagggagctcaaaccagagactatttcaagccctggatatcatatcctgagggccacaggagaagagaacatggctgtgagtttggatgacgacgtgccgctcatcctgaccttggatgagggtggcagtgccccactggctccctccaacggcctgggccaagaagagctacctagcaaaaatggcggcagctatgccatccacgactcccaggcccccagtctcagctctgggggtgagagttccccctccagccccgcacacaactgggagatgaattaccaagaggcagcaatctacctccaggaaggcgagaacaacgacaagttcttcacccaccccaaggatgccaaggcgctggcggcctacctctttgcacacaatcacctcttctacctgatggagctggccacggccctgctgctgctgctgctctccctgtgcgaggcccccgccgtccccgcactccggcttggcatctatgtccacgccaccctggagctgtttgccctgatggtggtagtgtttgaactctgcatgaagttacgctggctgggcctccacaccttcatccggcacaagcggaccatggtcaagacctcggtgctggtggtgcagtttgtcgaggccatcgtggtgttggtacggcagatgtcccatgtgcgggtgacccgagcactgcgctgcattttcctggtggactgtcggtattgcggtggcgtccggcgcaacctgcggcagatcttccagtccctgccgcccttcatggacatcctcctgctgctgctgttcttcatgatcatctttgccatcctcggtttctacttgttctcccctaacccttcagacccctacttcagcaccctggagaacagcatcgtcagtctgtttgtccttctgaccacagccaatttcccagatgtgatgatgccctcctactcccggaacccctggtcctgcgtcttcttcatcgtgtacctctccatcgagctgtatttcatcatgaacctgcttctggctgtggtgttcgacaccttcaatgacattgagaaacgcaagttcaagtctttgctactgcacaagcgaaccgctatccagcatgcctaccgcctgctcatcagccagaggaggcctgccggcatctcctacaggcagtttgaaggcctcatgcgcttctacaagccccggatgagtgccagggagcgctatcttaccttcaaggccctgaatcagaacaacacacccctgctcagcctaaaggacttttacgatatctacgaagttgctgctttgaagtggaaggccaagaaaaacagagagcactggtttgatgagcttcccaggacggcgctcctcatcttcaaaggtattaatatccttgtgaagtccaaggccttccagtatttcatgtacttggtggtggcagtcaacggggtctggatcctcgtggagacatttatgctgaaaggtgggaacttcttctccaagcacgtgccctggagttacctcgtctttctaactatctatggggtggagctgttcctgaaggttgccggcctgggccctgtggagtacttgtcttccggatggaacttgtttgacttctccgtgacagtgttcgccttcctgggactgctggcgctggccctcaacatggagcccttctatttcatcgtggtcctgcgccccctccagctgctgaggttgtttaagttgaaggagcgctaccgcaacgtgctggacaccatgttcgagctgctgccccggatggccagcctgggcctcaccctgctcatcttttactactccttcgccatcgtgggcatggagttcttctgcgggatcgtcttccccaactgctgcaacacgagtacagtggcagatgcctaccgctggcgcaaccacaccgtgggcaacaggaccgtggtggaggaaggctactattatctcaataattttgacaacatcctcaacagctttgtgaccctgtttgagctcacagttgtcaacaactggtacatcatcatggaaggcgtcacctctcagacctcccactggagccgcctctacttcatgaccttttacattgtgaccatggtggtgatgacgatcattgtcgcctttatcctcgaggccttcgtcttccgaatgaactacagccgcaagaaccaggactcggaagttgatggtggcatcacccttgagaaggaaatctccaaagaagagctggttgccgtcctggagctctaccgggaggcacggggggcctcctcggatgtcaccaggctgctggagaccctctcccagatggagagataccagcaacattccatggtgtttctgggacggcgatcaaggaccaagagcgacctgagcctgaagatgtaccaggaggagatccaggagtggtatgaggagcatgccagggagcaagagcagcagcgacaactcagcagcagtgcagcccccgccgcccagcagcccccaggcagccgccagcgctcccagaccgttacctagcccagcgcccgaaagccgtctcttctatgcaataacacaatagtattactctactgcgatgtacggaactgcggtgtgtgtacacatactcacgtatatgcacatatttatatacaggaagaaaaaagacagacaagatggggcttggtttataaccaccttgccctgtcttccttaactccagaagccagtttggtgaggggtgggggtgcggccaccaggtctgagctcttcctactgtggaaggctccagaaggcccttcacaaggagacccctcacctggatccagtcgactgcggggcttgcccctcatgtgggctggcctccatcggccacgtccaaagctgtcactgctactgcttcaggctcacatccccccgacctgatggcgtgcccgccccctctccctgcggcccatgccacaggtttctgtgttttgctttagggacagaaccacttaggaaggaaagaactcccggtctccagggtggtatttcagtgtctgtgataatgtcacgcaacacctcttcggggaccagtgcccaggatctaatggaagcggaattggggcaactgggcccatgtggccagagctcagttagccagtgccgggcggccacagattacactgaccaatctcctcccttggctctgcaagcctcccacccagccttctctggcttaacccttgttggcgaaaactcttccacagtggcctccttggggacccagaacccggaggaaggggcatgaggcaggaagtggggccgatgtctgcaacccagaccacttcgtggaatgggctcttgaccaaatccctttttttgcgatttacccgttcaagcaaaacaacgttttggttaactaaggattgtgctaaagccgataccaggtccttcacacgtgtgcactaggaacaggagcgaacagcacagagagacgctccctgtgggacgcagcagccccgtggccccggcccagttcccagccaccctccctggctctgctcacaccagagatttccatagcaggagcggttggtgcagaagtaggttcagatgaacctcagttaacgtcgccacccctcctcccaccatggtaccctgtaggagccctgtatgacatctgagcgtggtggaggtaggagggttgccagctgcagtgaccctgccacagaggcagggtcagtgcagaggtcgctttggttccgcttccctgggccacagaacggaacacagcataggttctgcagcaggagccgcagtggcaggatggagggtgcgaagggcaaggagtgcactgctgggcattcctggccagccccggccctctggtgcctgcttcctgtgacttcagaaggcaggtggacagagcctccctctggccttgtcctcttcccagccacagaacgggcagggtggcacccgaccccaggggagcagtacctggtcccccaccccctcctcccaaccacctccaaggccaagctgggtcccatagccagcacggcatggttctccccttccccccttcccaggtcaggggagttggacaagtagcaggtgtttgtttttaaagcacagccctttgggaaagcaacacattattgagactcactgtgattcccccgggagtcagactggctttgtcctcttcctctctggagggccatgggccatcagcaggagctccacatcgagccccaggccagaaccccctccctttcacagagagggaactttattgcacaattgggtgccttttagcttttgtgtgttgaaatgggcgttttggaagcaagggtcaggggacagcttctaaaggtgtgagtctctgacctgagcatctgggcctcgcctgggcccttcttcctccccaggggtggaaacgtggaggggccagcagcaccccggggtctgcccaggggagtcaaggccccgaggtgggggggcctattccaggaggagtgggatctcggccctgtccagagcgagttaatgtgtccatctgcccaaccctgtcctgagaaaggacctggttttggccaggacctgacaaatacccaatggcagcagtgtcaacagacgggagtccagccagggtgggtgcccttgtcattgaggttagggacagctatccccaggttatgcctggccccacccagcagggagttggggtccccccacaggctgtgagctctgtgggccctgggatgtgatctagctcagatgccctctcatccttgatgtcatagttgagtgcacccaagtggcacccactggcggccaggggcacagcctggtggtggtggcaatagaactgtgcccctcctcagctcctcgcttcccctcccacagccccagccttactccaccatgcggacaatcattttgtacggatcacgggagcaatgctgtacggttttgtacactggtggtttgtttcctagaaaacccattgtgtctctggatttctagcacattactaaaagagcctctgctttgtaaa

SEQ ID NO: 22058 - DNA, 596 bp, Homo sapiens
  misc_feature 1..596: note = ENST00000552897
  source 1..596: mol_type = unassigned DNA; mol_type = unassigned DNA
ggtaggcggtggataggagagctggcgcagctgccctggtggcagtggctgaagtggcggcggcttcggcggctgcggcggctgcaacagcttcgggctcggggttttggcggcggcgccggcgggctaggctgcgcggtgcggaccccggcgcgcggtccgggttgctggggcggcgcgtatggcggcagctatgccatccacgactcccaggcccccagtctcagctctgggggtgagagttccccctccagccccgcacacaactgggagatgaattaccaagaggcagcaatctacctccaggaaggcgagaacaacgacaagttcttcacccaccccaaggatgccaaggcgctggcggcctacctctttgcacacaatcacctcttctacctgatggagctggccacggccctgctgctgctgctgctctccctgtgcgaggcccccgccgtccccgcactccggcttggcatctatgtccacgccaccctggagctgtttgccctgatggtggtagtgtttgaactctgcatgaagttacgctggctgggcctccacaccttcatccggcacaagcggaccatggtcaa

SEQ ID NO: 22059 - DNA, 5345 bp, Homo sapiens
  misc_feature 1..5345: note = ENST00000550785
  source 1..5345: mol_type = unassigned DNA; mol_type = unassigned DNA
aggagagctggcgcagctgccctggtggcagtggctgaagtggcggcggcttcggcggctgcggcggctgcaacagcttcgggctcggggttttggcggcggcgccggcgggctaggctgcgcggtgcggaccccggcgcgcggtccgggttgctggggcggcgcgtagatggagtcttgctacattgcccaggctggtcttgaactgctaggctcaagcagttctcccaccttgacctcccaaagcgctgagattacagaagatgcctctaatggaggagtttctgagcagcacccctggcccagtggctttgaaagggagctcaaaccagagactatttcaagccctggatatcatatcctgagggccacaggagaagagaacatggctgtgagtttggatgacgacgtgccgctcatcctgaccttggatgagggtggcagtgccccactggctccctccaacggcctgggccaagaagagctacctagcaaaaatggcggcagctatgccatccacgactcccaggcccccagtctcagctctgggggtgagagttccccctccagccccgcacacaactgggagatgaattaccaagaggcagcaatctacctccaggaaggcgagaacaacgacaagttcttcacccaccccaaggatgccaaggcgctggcggcctacctctttgcacacaatcacctcttctacctgatggagctggccacggccctgctgctgctgctgctctccctgtgcgaggcccccgccgtccccgcactccggcttggcatctatgtccacgccaccctggagctgtttgccctgatggtggtagtgtttgaactctgcatgaagttacgctggctgggcctccacaccttcatccggcacaagcggaccatggtcaagacctcggtgctggtggtgcagtttgtcgaggccatcgtggtgttggtacggcagatgtcccatgtgcgggtgacccgagcactgcgctgcattttcctggtggactgtcggtattgcggtggcgtccggcgcaacctgcggcagatcttccagtccctgccgcccttcatggacatcctcctgctgctgctgttcttcatgatcatctttgccatcctcggtttctacttgttctcccctaacccttcagacccctacttcagcaccctggagaacagcatcgtcagtctgtttgtccttctgaccacagccaatttcccagatgtgatgatgccctcctactcccggaacccctggtcctgcgtcttcttcatcgtgtacctctccatcgagctgtatttcatcatgaacctgcttctggctgtggtgttcgacaccttcaatgacattgagaaacgcaagttcaagtctttgctactgcacaagcgaaccgctatccagcatgcctaccgcctgctcatcagccagaggaggcctgccggcatctcctacaggcagtttgaaggcctcatgcgcttctacaagccccggatgagtgccagggagcgctatcttaccttcaaggccctgaatcagaacaacacacccctgctcagcctaaaggacttttacgatatctacgaagttgctgctttgaagtggaaggccaagaaaaacagagagcactggtttgatgagcttcccaggacggcgctcctcatcttcaaaggtattaatatccttgtgaagtccaaggccttccagtatttcatgtacttggtggtggcagtcaacggggtctggatcctcgtggagacatttatgctgaaaggtgggaacttcttctccaagcacgtgccctggagttacctcgtctttctaactatctatggggtggagctgttcctgaaggttgccggcctgggccctgtggagtacttgtcttccggatggaacttgtttgacttctccgtgacagtgttcgccttcctgggactgctggcgctggccctcaacatggagcccttctatttcatcgtggtcctgcgccccctccagctgctgaggttgtttaagttgaaggagcgctaccgcaacgtgctggacaccatgttcgagctgctgccccggatggccagcctgggcctcaccctgctcatcttttactactccttcgccatcgtgggcatggagttcttctgcgggatcgtcttccccaactgctgcaacacgagtacagtggcagatgcctaccgctggcgcaaccacaccgtgggcaacaggaccgtggtggaggaaggctactattatctcaataattttgacaacatcctcaacagctttgtgaccctgtttgagctcacagttgtcaacaactggtacatcatcatggaaggcgtcacctctcagacctcccactggagccgcctctacttcatgaccttttacattgtgaccatggtggtgatgacgatcattgtcgcctttatcctcgaggccttcgtcttccgaatgaactacagccgcaagaaccaggactcggaagttgatggtggcatcacccttgagaaggaaatctccaaagaagagctggttgccgtcctggagctctaccgggaggcacggggggcctcctcggatgtcaccaggctgctggagaccctctcccagatggagagataccagcaacattccatggtgtttctgggacggcgatcaaggaccaagagcgacctgagcctgaagatgtaccaggaggagatccaggagtggtatgaggagcatgccagggagcaagagcagcagcgacaactcagcagcagtgcagcccccgccgcccagcagcccccaggcagccgccagcgctcccagaccgttacctagcccagcgcccgaaagccgtctcttctatgcaataacacaatagtattactctactgcgatgtacggaactgcggtgtgtgtacacatactcacgtatatgcacatatttatatacaggaagaaaaaagacagacaagatggggcttggtttataaccaccttgccctgtcttccttaactccagaagccagtttggtgaggggtgggggtgcggccaccaggtctgagctcttcctactgtggaaggctccagaaggcccttcacaaggagacccctcacctggatccagtcgactgcggggcttgcccctcatgtgggctggcctccatcggccacgtccaaagctgtcactgctactgcttcaggctcacatccccccgacctgatggcgtgcccgccccctctccctgcggcccatgccacaggtttctgtgttttgctttagggacagaaccacttaggaaggaaagaactcccggtctccagggtggtatttcagtgtctgtgataatgtcacgcaacacctcttcggggaccagtgcccaggatctaatggaagcggaattggggcaactgggcccatgtggccagagctcagttagccagtgccgggcggccacagattacactgaccaatctcctcccttggctctgcaagcctcccacccagccttctctggcttaacccttgttggcgaaaactcttccacagtggcctccttggggacccagaacccggaggaaggggcatgaggcaggaagtggggccgatgtctgcaacccagaccacttcgtggaatgggctcttgaccaaatccctttttttgcgatttacccgttcaagcaaaacaacgttttggttaactaaggattgtgctaaagccgataccaggtccttcacacgtgtgcactaggaacaggagcgaacagcacagagagacgctccctgtgggacgcagcagccccgtggccccggcccagttcccagccaccctccctggctctgctcacaccagagatttccatagcaggagcggttggtgcagaagtaggttcagatgaacctcagttaacgtcgccacccctcctcccaccatggtaccctgtaggagccctgtatgacatctgagcgtggtggaggtaggagggttgccagctgcagtgaccctgccacagaggcagggtcagtgcagaggtcgctttggttccgcttccctgggccacagaacggaacacagcataggttctgcagcaggagccgcagtggcaggatggagggtgcgaagggcaaggagtgcactgctgggcattcctggccagccccggccctctggtgcctgcttcctgtgacttcagaaggcaggtggacagagcctccctctggccttgtcctcttcccagccacagaacgggcagggtggcacccgaccccaggggagcagtacctggtcccccaccccctcctcccaaccacctccaaggccaagctgggtcccatagccagcacggcatggttctccccttccccccttcccaggtcaggggagttggacaagtagcaggtgtttgtttttaaagcacagccctttgggaaagcaacacattattgagactcactgtgattcccccgggagtcagactggctttgtcctcttcctctctggagggccatgggccatcagcaggagctccacatcgagccccaggccagaaccccctccctttcacagagagggaactttattgcacaattgggtgccttttagcttttgtgtgttgaaatgggcgttttggaagcaagggtcaggggacagcttctaaaggtgtgagtctctgacctgagcatctgggcctcgcctgggcccttcttcctccccaggggtggaaacgtggaggggccagcagcaccccggggtctgcccaggggagtcaaggccccgaggtgggggggcctattccaggaggagtgggatctcggccctgtccagagcgagttaatgtgtccatctgcccaaccctgtcctgagaaaggacctggttttggccaggacctgacaaatacccaatggcagcagtgtcaacagacgggagtccagccagggtgggtgcccttgtcattgaggttagggacagctatccccaggttatgcctggccccacccagcagggagttggggtccccccacaggctgtgagctctgtgggccctgggatgtgatctagctcagatgccctctcatccttgatgtcatagttgagtgcacccaagtggcacccactggcggccaggggcacagcctggtggtggtggcaatagaactgtgcccctcctcagctcctcgcttcccctcccacagccccagccttactccaccatgcggacaatcattttgtacggatcacgggagcaatgctgtacggttttgtacactggtggtttgtttcctagaaaacccattgtgtctctggatttctagcacattactaaaagagcctctgctttgtaaa

SEQ ID NO: 22060 - DNA, 526 bp, Homo sapiens
  misc_feature 1..526: note = ENST00000552642
  source 1..526: mol_type = unassigned DNA; mol_type = unassigned DNA
gttgctaggttacccgccaatctcagaaggcgagactcggtgtctgactgacctttcttttcaccattcaatttattgttccgctcagttgtccccacctcctgaagtctgaccaatcagaagcaccgccattttgacctttcaccaatggaaagacttgggactccctctgggttggactcaacgaatggcggcagctatgccatccacgactcccaggcccccagtctcagctctgggggtgagagttccccctccagccccgcacacaactgggagatgaattaccaagaggcagcaatctacctccaggaaggcgagaacaacgacaagttcttcacccaccccaaggatgccaaggcgctggcggcctacctctttgcacacaatcacctcttctacctgatggagctggccacggccctgctgctgctgctgctctccctgtgcgaggcccccgccgtccccgcactccggcttggcatctatgtccacgccaccctggagctgtttgccctgatggtgg

SEQ ID NO: 22061 - DNA, 564 bp, Homo sapiens
  misc_feature 1..564: note = ENST00000547275
  source 1..564: mol_type = unassigned DNA; mol_type = unassigned DNA
agaaggcgagactcggtgtctgactgacctttcttttcaccattcaatttattgttccgctcagttgtccccacctcctgaagtctgaccaatcagaagcaccgccattttgacctttcaccaatggaaagacttgggactccctctgggttggactcaacgaaagatgcctctaatggaggagtttctgagcagcacccctggcccagtggctttgaaagggagctcaaaccagagactatttcaagccctggatatcatatcctgagggccacaggagaagagaacatggctgtgagtttggatgacgacgtgccgctcatcctgaccttggatgagggtggcagtgccccactggctccctccaacggcctgggccaagaagagctacctagcaaaaatggcggcagctatgccatccacgactcccaggcccccagtctcagctctgggggtgagagttccccctccagccccgcacacaactgggagatgaattaccaagaggcagcaatctacctccaggaaggcgagaacaacgacaagttcttcacccaccccaag

SEQ ID NO: 22062 - DNA, 762 bp, Homo sapiens
  misc_feature 1..762: note = ENST00000552985
  source 1..762: mol_type = unassigned DNA; mol_type = unassigned DNA
cgagactcggtgtctgactgacctttcttttcaccattcaatttattgttccgctcagttgtccccacctcctgaagtctgaccaatcagaagcaccgccattttgacctttcaccaatggaaagacttgggactccctctgggttggactcaacgaagatggagtcttgctacattgcccaggctggtcttgaactgctaggctcaagcagttctcccaccttgacctcccaaagcgctgagattacagaagatgcctctaatggaggagtttctgagcagcacccctggcccagtggctttgaaagggagctcaaaccagagactatttcaagccctggatatcatatcctgagggccacaggagaagagaacatggctgtgagtttggatgacgacgtgccgctcatcctgaccttggatgagggtggcagtgccccactggctccctccaacggcctgggccaagaagagctacctagcaaaaatggcggcagctatgccatccacgactcccaggcccccagtctcagctctgggggtgagagttccccctccagccccgcacacaactgggagatgaattaccaagaggcagcaatctacctccaggaaggcgagaacaacgacaagttcttcacccaccccaaggatgccaaggcgctggcggcctacctctttgcacacaatcacctcttctacctgatggagctggccacggccctgctgctgctgctgctctccctgtgcgaggcccccgcc

SEQ ID NO: 22063 - DNA, 527 bp, Homo sapiens
  misc_feature 1..527: note = ENST00000550873
  source 1..527: mol_type = unassigned DNA; mol_type = unassigned DNA
aacgagtaaggcggggaacaagggaggagtaaggggcgtggattcttcgtcccgccccttcttaaggaggcgggcagggagtaccgcatcggcggcgggcgagacctgcggaaggacgtgatagttggccaatcagagttcatcacgaagatgcctctaatggaggagtttctgagcagcacccctggcccagtggctttgaaagggagctcaaaccagagactatttcaagccctggatatcatatcctgagggccacaggagaagagaacatggctgtgagtttggatgacgacgtgccgctcatcctgaccttggatgagggtggcagtgccccactggctccctccaacggcctgggccaagaagagctacctagcaaaaatggcggcagctatgccatccacgactcccaggcccccagtctcagctctgggggtgagagttccccctccagccccgcacacaactgggagatgaattaccaagaggcagcaatctacctccaggaaggcgagaacaacgac

SEQ ID NO: 22064 - DNA, 530 bp, Homo sapiens
  misc_feature 1..530: note = ENST00000551096
  source 1..530: mol_type = unassigned DNA; mol_type = unassigned DNA
agcggggttgagaggacggtaggcggtggataggagagctggcgcagctgccctggtggcagtggctgaagtggcggcggcttcggcggctgcggcggctgcaacagcttcgggctcggggttttggcggcggcgccggcgggctaggctgcgcgagatggagtcttgctacattgcccaggctggtcttgaactgctaggctcaagcagttctcccaccttgacctcccaaagcgctgagattacagaagatgcctctaatggaggagtttctgagcagcacccctggcccagtggctttgaaagggagctcaaaccagagactatttcaagccctggatatcatatcctgagggccacaggagaagagaacatggctgtgagtttggatgacgacgtgccgctcatcctgaccttggatgagggtggcagtgccccactggctccctccaacggcctgggccaagaagagctacctagcaaaaatggcggcagctatgccatccacgactcccaggcccccagtctca

SEQ ID NO: 22065 - DNA, 570 bp, Homo sapiens
  misc_feature 1..570: note = ENST00000551099
  source 1..570: mol_type = unassigned DNA; mol_type = unassigned DNA
gagaggacggtaggcggtggataggagagctggcgcagctgccctggtggcagtggctgaagtggcggcggcttcggcggctgcggcggctgcaacagcttcgggctcggggttttggcggcggcgccggcgggctaggctgcgcgaagatgcctctaatggaggagtttctgagcagcacccctggcccagtggctttgaaagggagctcaaaccagagactatttcaagccctggatatcatatcctgagggccacaggagaagagaacatggctgtgagtttggatgacgacgtgccgctcatcctgaccttggatgagggtggcagtgccccactggctccctccaacggcctgggccaagaagagctacctagcaaaagacgctgctgcatgctgtgctccagcaaacagaaaccttggattccctgcagggtcatttccgatgtggcgtgcaaagcagccagctgtttcgagggagcgtctgggccctgtgacatcagcatgtgggagtgttaccgtgtgtgcaaacagatggcggcagctatgccatccacgactcccaggcc

SEQ ID NO: 22066 - DNA, 3131 bp, Homo sapiens
  misc_feature 1..3131: note = ENST00000368533
  source 1..3131: mol_type = unassigned DNA; mol_type = unassigned DNA
cgccgagcggaggaggcaggaaccggagcgcgagcagtagctgggtgggcaccatggctgggatcaccaccatcgaggcggtgaagcgcaagatccaggttctgcagcagcaggcagatgatgcagaggagcgagctgagcgcctccagcgagaagttgagggagaaaggcgggcccgggaacaggctgaggctgaggtggcctccttgaaccgtaggatccagctggttgaagaagagctggaccgtgctcaggagcgcctggccactgccctgcaaaagctggaagaagctgaaaaagctgctgatgagagtgagagaggtatgaaggttattgaaaaccgggccttaaaagatgaagaaaagatggaactccaggaaatccaactcaaagaagctaagcacattgcagaagaggcagataggaagtatgaagaggtggctcgtaagttggtgatcattgaaggagacttggaacgcacagaggaacgagctgagctggcagagtcccgttgccgagagatggatgagcagattagactgatggaccagaacctgaagtgtctgagtgctgctgaagaaaagtactctcaaaaagaagataaatatgaggaagaaatcaagattcttactgataaactcaaggaggcagagacccgtgctgagtttgctgagagatcggtagccaagctggaaaagacaattgatgacctggaagataaactgaaatgcaccaaagaggagcacctctgtacacaaaggatgctggaccagaccctgcttgacctgaatgagatgtagaacgccccagtcccaccctgctgctgctcctccctctgacccagactccgcctgaggccagcctgcgggaagctgacctttaactgagggctgatctttaactggaaggctgctttctcctttcaccaccccctccttccctgtgtctttttcgccaaactgtctctgcctcttcccggagaatccagctgggctagaggctgagcacctttggaaacaacatttaagggaatgtgagcacaatgcataatgtctttaaaaagcatgttgtgatgtacacattttgtaattaccttttttgttgttttgtagcaaccatttgtaaaacattccaaataattccacagtcctgaagcagcaatcgaatccctttctcacttttggaaggtgacttttcaccttaatgcatattcccctctccatagaggagaggaaaaggtgtaggcctgccttaccgagagccaaacagagcccagggagactccgctgtgggaaacctcattgttctgtacaaagtactagctaaaccagaaaggtgattccaggaggagttagccaaacaacaacaaaaacaaaaaatgtgctgttcaagttttcagctttaagatatctttggataatgttatttctattttttatttttttcattagaagttaccaaattaagatggtaagacctctgagaccaaaattttgtcccatctctaccccctcacaactgcttacagaatggatcatgtcccccttatgttgaggtgaccacttaattgctttcctgcctccttgaaagaaagaaagaaagaagactgtgtttttgccactgatttagccatgtgaaactcatctcattacccttttctgggtttgaagctgctgtctctagaagtgccatctcaattgtgctttgtatcagtcagtgctggagaaatcttgaatagcttatgtacaaaactttttaaattttatattattttgaaactttgctttgggtttgtggcaccctggccaccccatctggctgtgacagcctctgcagtccgtgggctggcagtttgttgatcttttaagtttccttccctacccagtccccattttctggtaaggtttctaggaggtctgttaggtgtacatcctgcagcttattggcttaaaatgtactctccttttatgtggtctctttggggccgattgggagaaagagaaatcaatagtgcaactgttttgatactgaatattgacaagtgtctttttgaaataaagaaccagtccctccaaccctcagacctatttgacttttatttattaaaactaaatgtgctttctccacagaagctatgaggtttgggttaaaaatagcatctttgtgggtggtagcaacaggatttattctttattattattatttttgagatgaagtttcattcttgttgcctgggctggagcgtaatggctcgatctcggctcactgcaacctccgcctcctggttcaagagattctcctgcctcagcctcccgagtagctgggattacaggcacctgccaccatgcccgggtaattttttatattttaagtagagacagggcttcaccatgttggccaggctggtctcgaactcctgaccttcaggtgatccacctgcctcagcttcccaaaatgctgggattacgggcgtgagccaccgcacccagctggagcaacaggatttaatatagagcaaatgtttagttttatcatctgtaaaatggagataagtattgtcagagtaaacatgaagattagaaagaacacttaatgtgctgggccttttataggttaacactgacatctcaggctgaactatatacattttccttcacaaccatatcaatccttataaactatggatttatgctccttaaaacaatatataatgctgatcactactataaatgcgtggttttaaccaactgtactgaaacagctttgagtttatattctgtttggatatttggagaaaacaacaagtgctctcaagagtatttgcttagaggccggctgtgtgagtggataactttgaaagctgcttttgagacgccagtgtctggcatttcctgcattctggcctggaggccggacgtgaatctgacttctagtaaaaatacacggttcccttgacaaagtcgagctgtttatcccagagactgcacaattttccgttgataggcatggaccaatgctaactggaaatcattgcaaaaagtttttttgtcgggcggagggtgtggtgttaagataaacagtgtgcaacagaagaaattaaaactggaagaaattaaagggttttttttaga

SEQ ID NO: 22067 - DNA, 2147 bp, Homo sapiens
  misc_feature 1..2147: note = ENST00000368545
  source 1..2147: mol_type = unassigned DNA
caaattgagagcaaataaggactaatacatggtgaacagttaattggaagatcctactgggtccttccacctggggtggaagacatcaaagtggctatcctgatttaagatctagtgtctggctgggtgtggtggctcaaacctgtagtcccagctacttagtatgccaaggcaggaaggttgcttgaacccaggagttggaggccagcctgggcgtcatagggagaccctgtccctaaaacaaataaatttaaaaaaaaaatctggtgtctgttttggccactttgccaatctgctagggaaccttagggcaagggtagatattaactgctctcccgtcggtaccttctgggccttgattaacaaagtcagtgctgaatgcatatgtatttgtgcttccctcttacattcccgtctgccagacataacatatcatgaccatggtggtgttctcttcccattttttgaatttttttttttcgttttgctgcttgttttcttgctgtgttcctttttgacctttctccctccccacaacctggcttgtgccatccccgtgactatcactaacagccgttgccgagagatggatgagcagattagactgatggaccagaacctgaagtgtctgagtgctgctgaagaaaagtactctcaaaaagaagataaatatgaggaagaaatcaagattcttactgataaactcaaggaggcagagacccgtgctgagtttgctgagagatcggtagccaagctggaaaagacaattgatgacctggaagataaactgaaatgcaccaaagaggagcacctctgtacacaaaggatgctggaccagaccctgcttgacctgaatgagatgtagaacgccccagtcccaccctgctgctgctcctccctctgacccagactccgcctgaggccagcctgcgggaagctgacctttaactgagggctgatctttaactggaaggctgctttctcctttcaccaccccctccttccctgtgtctttttcgccaaactgtctctgcctcttcccggagaatccagctgggctagaggctgagcacctttggaaacaacatttaagggaatgtgagcacaatgcataatgtctttaaaaagcatgttgtgatgtacacattttgtaattaccttttttgttgttttgtagcaaccatttgtaaaacattccaaataattccacagtcctgaagcagcaatcgaatccctttctcacttttggaaggtgacttttcaccttaatgcatattcccctctccatagaggagaggaaaaggtgtaggcctgccttaccgagagccaaacagagcccagggagactccgctgtgggaaacctcattgttctgtacaaagtactagctaaaccagaaaggtgattccaggaggagttagccaaacaacaacaaaaacaaaaaatgtgctgttcaagttttcagctttaagatatctttggataatgttatttctattttttatttttttcattagaagttaccaaattaagatggtaagacctctgagaccaaaattttgtcccatctctaccccctcacaactgcttacagaatggatcatgtcccccttatgttgaggtgaccacttaattgctttcctgcctccttgaaagaaagaaagaaagaagactgtgtttttgccactgatttagccatgtgaaactcatctcattacccttttctgggtttgaagctgctgtctctagaagtgccatctcaattgtgctttgtatcagtcagtgctggagaaatcttgaatagcttatgtacaaaactttttaaattttatattattttgaaactttgctttgggtttgtggcaccctggccaccccatctggctgtgacagcctctgcagtccgtgggctggcagtttgttgatcttttaagtttccttccctacccagtccccattttctggtaaggtttctaggaggtctgttaggtgtacatcctgcagcttattggcttaaaatgtactctccttttatgtggtctctttggggccgattgggagaaagagaaatcaatagtgcaactgttttgatactgaatattgacaagtgtctttttgaaataaagaaccagtccctccaaccctcag

SEQ ID NO: 22068 - DNA, 4041 bp, Homo sapiens
  misc_feature 1..4041: note = ENST00000469717
  source 1..4041: mol_type = unassigned DNA
gagcgcgagcagtagctgggtgggcaccatggctgggatcaccaccatcgaggcggtgaagcgcaagatccaggttctgcagcagcaggcagatgatgcagaggagcgagctgagcgcctccagcgagaagttgagggagaaaggcgggcccgggaacagaggtatgaaggttattgaaaaccgggccttaaaagatgaagaaaagatggaactccaggaaatccaactcaaagaagctaagcacattgcagaagaggcagataggaagtatgaagaggtggctcgtaagttggtgatcattgaaggagacttggaacgcacagaggaacgagctgagctggcagagtcgtgagtatctagctccccaaatcttgtcattaccaatttatcccttcccctttggcttgggcactaatatgaataaattagcattccttcaaccttgttaaacagggcctagggaatgggagtcatctatagtgcttttttaggcccaagaatggttttaggcttccttattctcctgactagtgacaagtgacaaaagaggctttcttattttttgttggtagggtttacaaattgagagcaaataaggactaatacatggtgaacagttaattggaagatcctactgggtccttccacctggggtggaagacatcaaagtggctatcctgatttaagatctagtgtctggctgggtgtggtggctcaaacctgtagtcccagctacttagtatgccaaggcaggaaggttgcttgaacccaggagttggaggccagcctgggcgtcatagggagaccctgtccctaaaacaaataaatttaaaaaaaaaatctggtgtctgttttggccactttgccaatctgctagggaaccttagggcaagggtagatattaactgctctcccgtcggtaccttctgggccttgattaacaaagtcagtgctgaatgcatatgtatttgtgcttccctcttacattcccgtctgccagacataacatatcatgaccatggtggtgttctcttcccattttttgaatttttttttttcgttttgctgcttgttttcttgctgtgttcctttttgacctttctccctccccacaacctggcttgtgccatccccgtgactatcactaacagccgttgccgagagatggatgagcagattagactgatggaccagaacctgaagtgtctgagtgctgctgaagaaaaggtactaaccattaagcccacagcaaggttatatatgtggtgtggttttgttttgttttgtttttgttttgcagctgcctcccctccacttgattttgttgagtgctgtctcatctcttcatggaatgctccattcttttccacttacttggcatctttcatctcttctttcctagttgcttcactgcctctccacagggtctccttcctttgggtgatttgggggactgtttgggttgggcatttgttcccacctccaccccaggtagcagttatgacttgttcctggtagtggatttctctcaagtgctttattagtattcaaacatttttgagcccaggaaggtctagctcctgacacgttctatggtagagggaggagggttgatgcttgctcaggttacttgggaacatctcttccccagtatgccttccaactctctctacatataggttcaattcacgtctatgtgtctctctccctttttttattctcttccttttcccttttcctctcctgtggtatttaaaatattcacagtaagtgttctgagctggaggaggagctgaagaatgtcaccaacaacctcaagtctcttgaggctcaggcggagaaggtaggggctggtttgtgaaagtgacaggctttggggcctgggcccagccctgcccttgatgaaagactggagacacgcattccatatataatccagtgaggcgtgtcctcttcctacctccttaccatgtattcaggttctgggtttaatgctattttctgtgcactttgattgctttaattaaaataacttcttggtctcaggttactggagtcatgtgctccttaggctgatactgctgtgctgaaaagcaataatcaagggccctaacaggctttctagcagacagatgggggcaacagacagaatcagctctgagacctaatgagcaatcaagacagatgacttcactttgccatcatgtgggtgtgtttcagtcatgtgaccttggggtgctactactcttgctcatcaagcaggggaaaggaaaaacacctccttgggttgatctgaataatatcaaagcttagatccatcttaaaaagtcatggagaattttaacctgaggatctcatggctctaaagacatagatttctgaatttcaaggacctattgtccagagccaggccttgctcttactcttggaccattcagcacatttagtgcaagaggatattcaatgtaagttaaatgtagggaggggggtattgcctgtgtgactaatttctactctgaaatttttaatctacttatcttacagtactctcaaaaagaagataaatatgaggaagaaatcaagattcttactgataaactcaaggaggcagagacccgtgctgagtttgctgagagatcggtagccaagctggaaaagacaattgatgacctggaagataaactgaaatgcaccaaagaggagcacctctgtacacaaaggatgctggaccagaccctgcttgacctgaatgagatgtagaacgccccagtcccaccctgctgctgctcctccctctgacccagactccgcctgaggccagcctgcgggaagctgacctttaactgagggctgatctttaactggaaggctgctttctcctttcaccaccccctccttccctgtgtctttttcgccaaactgtctctgcctcttcccggagaatccagctgggctagaggctgagcacctttggaaacaacatttaagggaatgtgagcacaatgcataatgtctttaaaaagcatgttgtgatgtacacattttgtaattaccttttttgttgttttgtagcaaccatttgtaaaacattccaaataattccacagtcctgaagcagcaatcgaatccctttctcacttttggaaggtgacttttcaccttaatgcatattcccctctccatagaggagaggaaaaggtgtaggcctgccttaccgagagccaaacagagcccagggagactccgctgtgggaaacctcattgttctgtacaaagtactagctaaaccagaaaggtgattccaggaggagttagccaaacaacaacaaaaacaaaaaatgtgctgttcaagttttcagctttaagatatctttggataatgttatttctattttttatttttttcattagaagttaccaaattaagatggtaagacctctgagaccaaaattttgtcccatctctaccccctcacaactgcttacagaatggatcatgtcccccttatgttgaggtgaccacttaattgctttcctgcctccttgaaagaaagaaagaaagaagactgtgtttttgccactgatttagccatgtgaaactcatctcattacccttttctgggtttgaagctgctgtctctagaagtgccatctcaattgtgctttgtatcagtcagtgctggagaaatcttgaatagcttatgtacaaaactttttaaattttatattattttgaaactttgctttgggtttgtggcaccctggccaccccatctggctgtgacagcctctgcagtccgtgggctggcagtttgttgatcttttaagtttccttccctacccagtccccattttctggtaaggtttctaggaggtctgttaggtgtacatcctgcagcttattggcttaaaatgtactctccttttatgtggtctctttggggccgattgggagaaagagaaatcaatagtgcaactgttttgatactgaatattgacaagtgtctttttgaaataaagaaccagtccctccaaccctc

SEQ ID NO: 22069 - DNA, 2108 bp, Homo sapiens
  misc_feature 1..2108: note = ENST00000330188
  source 1..2108: mol_type = unassigned DNA
gcaggcggaagtaagggtgagaggaggctgcaacgccgagcggaggaggcaggaaccggagcgcgagcagtagctgggtgggcaccatggctgggatcaccaccatcgaggcggtgaagcgcaagatccaggttctgcagcagcaggcagatgatgcagaggagcgagctgagcgcctccagcgagaagttgagggagaaaggcgggcccgggaacaggctgaggctgaggtggcctccttgaaccgtaggatccagctggttgaagaagagctggaccgtgctcaggagcgcctggccactgccctgcaaaagctggaagaagctgaaaaagctgctgatgagagtgagagaggtatgaaggttattgaaaaccgggccttaaaagatgaagaaaagatggaactccaggaaatccaactcaaagaagctaagcacattgcagaagaggcagataggaagtatgaagaggtggctcgtaagttggtgatcattgaaggagacttggaacgcacagaggaacgagctgagctggcagagtctaagtgttctgagctggaggaggagctgaagaatgtcaccaacaacctcaagtctcttgaggctcaggcggagaagtactctcaaaaagaagataaatatgaggaagaaatcaagattcttactgataaactcaaggaggcagagacccgtgctgagtttgctgagagatcggtagccaagctggaaaagacaattgatgacctggaagataaactgaaatgcaccaaagaggagcacctctgtacacaaaggatgctggaccagaccctgcttgacctgaatgagatgtagaacgccccagtcccaccctgctgctgctcctccctctgacccagactccgcctgaggccagcctgcgggaagctgacctttaactgagggctgatctttaactggaaggctgctttctcctttcaccaccccctccttccctgtgtctttttcgccaaactgtctctgcctcttcccggagaatccagctgggctagaggctgagcacctttggaaacaacatttaagggaatgtgagcacaatgcataatgtctttaaaaagcatgttgtgatgtacacattttgtaattaccttttttgttgttttgtagcaaccatttgtaaaacattccaaataattccacagtcctgaagcagcaatcgaatccctttctcacttttggaaggtgacttttcaccttaatgcatattcccctctccatagaggagaggaaaaggtgtaggcctgccttaccgagagccaaacagagcccagggagactccgctgtgggaaacctcattgttctgtacaaagtactagctaaaccagaaaggtgattccaggaggagttagccaaacaacaacaaaaacaaaaaatgtgctgttcaagttttcagctttaagatatctttggataatgttatttctattttttatttttttcattagaagttaccaaattaagatggtaagacctctgagaccaaaattttgtcccatctctaccccctcacaactgcttacagaatggatcatgtcccccttatgttgaggtgaccacttaattgctttcctgcctccttgaaagaaagaaagaaagaagactgtgtttttgccactgatttagccatgtgaaactcatctcattacccttttctgggtttgaagctgctgtctctagaagtgccatctcaattgtgctttgtatcagtcagtgctggagaaatcttgaatagcttatgtacaaaactttttaaattttatattattttgaaactttgctttgggtttgtggcaccctggccaccccatctggctgtgacagcctctgcagtccgtgggctggcagtttgttgatcttttaagtttccttccctacccagtccccattttctggtaaggtttctaggaggtctgttaggtgtacatcctgcagcttattggcttaaaatgtactctccttttatgtggtctctttggggccgattgggagaaagagaaatcaatagtgcaactgttttgatactgaatattgacaagtgtctttttgaaataaagaaccagtccctccaa

SEQ ID NO: 22070 - DNA, 2063 bp, Homo sapiens
  misc_feature 1..2063: note = ENST00000341485
  source 1..2063: mol_type = unassigned DNA
gtagcaggcggaagtaagggtgagaggaggctgcaacgccgagcggaggaggcaggaaccggagcgcgagcagtagctgggtgggcaccatggctgggatcaccaccatcgaggcggtgaagcgcaagatccaggttctgcagcagcaggcagatgatgcagaggagcgagctgagcgcctccagcgagaagttgagggagaaaggcgggcccgggaacaggctgaggctgaggtggcctccttgaaccgtaggatccagctggttgaagaagagctggaccgtgctcaggagcgcctggccactgccctgcaaaagctggaagaagctgaaaaagctgctgatgaagaaaagatggaactccaggaaatccaactcaaagaagctaagcacattgcagaagaggcagataggaagtatgaagaggtggctcgtaagttggtgatcattgaaggagacttggaacgcacagaggaacgagctgagctggcagagtcccgttgccgagagatggatgagcagattagactgatggaccagaacctgaagtgtctgagtgctgctgaagaaaagtactctcaaaaagaagataaatatgaggaagaaatcaagattcttactgataaactcaaggaggcagagacccgtgctgagtttgctgagagatcggtagccaagctggaaaagacaattgatgacctggaagataaactgaaatgcaccaaagaggagcacctctgtacacaaaggatgctggaccagaccctgcttgacctgaatgagatgtagaacgccccagtcccaccctgctgctgctcctccctctgacccagactccgcctgaggccagcctgcgggaagctgacctttaactgagggctgatctttaactggaaggctgctttctcctttcaccaccccctccttccctgtgtctttttcgccaaactgtctctgcctcttcccggagaatccagctgggctagaggctgagcacctttggaaacaacatttaagggaatgtgagcacaatgcataatgtctttaaaaagcatgttgtgatgtacacattttgtaattaccttttttgttgttttgtagcaaccatttgtaaaacattccaaataattccacagtcctgaagcagcaatcgaatccctttctcacttttggaaggtgacttttcaccttaatgcatattcccctctccatagaggagaggaaaaggtgtaggcctgccttaccgagagccaaacagagcccagggagactccgctgtgggaaacctcattgttctgtacaaagtactagctaaaccagaaaggtgattccaggaggagttagccaaacaacaacaaaaacaaaaaatgtgctgttcaagttttcagctttaagatatctttggataatgttatttctattttttatttttttcattagaagttaccaaattaagatggtaagacctctgagaccaaaattttgtcccatctctaccccctcacaactgcttacagaatggatcatgtcccccttatgttgaggtgaccacttaattgctttcctgcctccttgaaagaaagaaagaaagaagactgtgtttttgccactgatttagccatgtgaaactcatctcattacccttttctgggtttgaagctgctgtctctagaagtgccatctcaattgtgctttgtatcagtcagtgctggagaaatcttgaatagcttatgtacaaaactttttaaattttatattattttgaaactttgctttgggtttgtggcaccctggccaccccatctggctgtgacagcctctgcagtccgtgggctggcagtttgttgatcttttaagtttccttccctacccagtccccattttctggtaaggtttctaggaggtctgttaggtgtacatcctgcagcttattggcttaaaatgtactctccttttatgtggtctctttggggccgattgggagaaagagaaatcaatagtgcaactgttttgatactgaatattgacaagtgtctttttgaaataaagaaccagtccctccaa

SEQ ID NO: 22071 - DNA, 2007 bp, Homo sapiens
  misc_feature 1..2007: note = ENST00000341372
  source 1..2007: mol_type = unassigned DNA
aggctgcaacgccgagcggaggaggcaggaaccggagcgcgagcagtagctgggtgggcaccatggctgggatcaccaccatcgaggcggtgaagcgcaagatccaggttctgcagcagcaggcagatgatgcagaggagcgagctgagcgcctccagcgagaagttgagggagaaagccgtgctcaggagcgcctggccactgccctgcaaaagctggaagaagctgaaaaagctgctgatgagagtgagagaggtatgaaggttattgaaaaccgggccttaaaagatgaagaaaagatggaactccaggaaatccaactcaaagaagctaagcacattgcagaagaggcagataggaagtatgaagaggtggctcgtaagttggtgatcattgaaggagacttggaacgcacagaggaacgagctgagctggcagagtcccgttgccgagagatggatgagcagattagactgatggaccagaacctgaagtgtctgagtgctgctgaagaaaagtactctcaaaaagaagataaatatgaggaagaaatcaagattcttactgataaactcaaggaggcagagacccgtgctgagtttgctgagagatcggtagccaagctggaaaagacaattgatgacctggaagataaactgaaatgcaccaaagaggagcacctctgtacacaaaggatgctggaccagaccctgcttgacctgaatgagatgtagaacgccccagtcccaccctgctgctgctcctccctctgacccagactccgcctgaggccagcctgcgggaagctgacctttaactgagggctgatctttaactggaaggctgctttctcctttcaccaccccctccttccctgtgtctttttcgccaaactgtctctgcctcttcccggagaatccagctgggctagaggctgagcacctttggaaacaacatttaagggaatgtgagcacaatgcataatgtctttaaaaagcatgttgtgatgtacacattttgtaattaccttttttgttgttttgtagcaaccatttgtaaaacattccaaataattccacagtcctgaagcagcaatcgaatccctttctcacttttggaaggtgacttttcaccttaatgcatattcccctctccatagaggagaggaaaaggtgtaggcctgccttaccgagagccaaacagagcccagggagactccgctgtgggaaacctcattgttctgtacaaagtactagctaaaccagaaaggtgattccaggaggagttagccaaacaacaacaaaaacaaaaaatgtgctgttcaagttttcagctttaagatatctttggataatgttatttctattttttatttttttcattagaagttaccaaattaagatggtaagacctctgagaccaaaattttgtcccatctctaccccctcacaactgcttacagaatggatcatgtcccccttatgttgaggtgaccacttaattgctttcctgcctccttgaaagaaagaaagaaagaagactgtgtttttgccactgatttagccatgtgaaactcatctcattacccttttctgggtttgaagctgctgtctctagaagtgccatctcaattgtgctttgtatcagtcagtgctggagaaatcttgaatagcttatgtacaaaactttttaaattttatattattttgaaactttgctttgggtttgtggcaccctggccaccccatctggctgtgacagcctctgcagtccgtgggctggcagtttgttgatcttttaagtttccttccctacccagtccccattttctggtaaggtttctaggaggtctgttaggtgtacatcctgcagcttattggcttaaaatgtactctccttttatgtggtctctttggggccgattgggagaaagagaaatcaatagtgcaactgttttgatactgaatattgacaagtgtctttttgaaataaagaaccagtccctcc

SEQ ID NO: 22072 - DNA, 1771 bp, Homo sapiens
  misc_feature 1..1771: note = ENST00000328159
  source 1..1771: mol_type = unassigned DNA; mol_type = unassigned DNA
atggctgggatcaccaccatcgaggcggtgaagcgcaagatccaggttctgcagcagcaggcagatgatgcagaggagcgagctgagcgcctccagcgagaagttgagggagaaaggcgggcccgggaacaggctgaggctgaggtggcctccttgaaccgtaggatccagctggttgaagaagagctggaccgtgctcaggagcgcctggccactgccctgcaaaagctggaagaagctgaaaaagctgctgatgagagtgagagaggtatgaaggttattgaaaaccgggccttaaaagatgaagaaaagatggaactccaggaaatccaactcaaagaagctaagcacattgcagaagaggcagataggaagtatgaagaggtggctcgtaagttggtgatcattgaaggagacttggaacgcacagaggaacgagctgagctggcagagtcccgttgccgagagatggatgagcagattagactgatggaccagaacctgaagtgtctgagtgctgctgaagaaaagtactctcaaaaagaagataaatatgaggaagaaatcaagattcttactgataaactcaaggaggcagagacccgtgctgagtttgctgagagatcggtagccaagctggaaaagacaattgatgacctggaagatgagctctatgcccagaaactgaagtacaaggccattagcgaggagctggaccacgccctcaatgacatgacctctatataaactgaaatgcaccaaagaggagcacctctgtacacaaaggatgctggaccagaccctgcttgacctgaatgagatgtagaacgccccagtcccaccctgctgctgctcctccctctgacccagactccgcctgaggccagcctgcgggaagctgacctttaactgagggctgatctttaactggaaggctgctttctcctttcaccaccccctccttccctgtgtctttttcgccaaactgtctctgcctcttcccggagaatccagctgggctagaggctgagcacctttggaaacaacatttaagggaatgtgagcacaatgcataatgtctttaaaaagcatgttgtgatgtacacattttgtaattaccttttttgttgttttgtagcaaccatttgtaaaacattccaaataattccacagtcctgaagcagcaatcgaatccctttctcacttttggaaggtgacttttcaccttaatgcatattcccctctccatagaggagaggaaaaggtgtaggcctgccttaccgagagccaaacagagcccagggagactccgctgtgggaaacctcattgttctgtacaaagtactagctaaaccagaaaggtgattccaggaggagttagccaaacaacaacaaaaacaaaaaatgtgctgttcaagttttcagctttaagatatctttggataatgttatttctattttttatttttttcattagaagttaccaaattaagatggtaagacctctgagaccaaaattttgtcccatctctaccccctcacaactgcttacagaatggatcatgtcccccttatgttgaggtgaccacttaattgctttcctgcctccttgaaagaaagaaagaaagaagactgtgtttttgccactgatttagccatgtgaaactcatctcattacccttttctgggtttgaagctgctgtctctagaagtgccatctcaattgtgctttgtatcagtcagtgctggagaaatcttgaatagcttatgt

SEQ ID NO: 22073 - DNA, 1248 bp, Homo sapiens
  misc_feature 1..1248: note = ENST00000509409
  source 1..1248: mol_type = unassigned DNA; mol_type = unassigned DNA
agttccggtatttcagggcgtagcaggcggaagtaagggtgagaggaggctgcaacgccgagcggaggaggcaggaaccggagcgcgagcagtagctgggtgggcaccatggctgggatcaccaccatcgaggcggtgaagcgcaagatccaggttctgcagcagcaggcagatgatgcagaggagcgagctgagcgcctccagcgagaagttgagggagaaaggcgggcccgggaacagaggtatgaaggttattgaaaaccgggccttaaaagatgaagaaaagatggaactccaggaaatccaactcaaagaagctaagcacattgcagaagaggcagataggaagtatgaagaggtggctcgtaagttggtgatcattgaaggagacttggaacgcacagaggaacgagctgagctggcagagtcccgttgccgagagatggatgagcagattagactgatggaccagaacctgaagtgtctgagtgctgctgaagaaaagtactctcaaaaagaagataaatatgaggaagaaatcaagattcttactgataaactcaaggaggcagagacccgtgctgagtttgctgagagatcggtagccaagctggaaaagacaattgatgacctggaagataaactgaaatgcaccaaagaggagcacctctgtacacaaaggatgctggaccagaccctgcttgacctgaatgagatgtagaacgccccagtcccaccctgctgctgctcctccctctgacccagactccgcctgaggccagcctgcgggaagctgacctttaactgagggctgatctttaactggaaggctgctttctcctttcaccaccccctccttccctgtgtctttttcgccaaactgtctctgcctcttcccggagaatccagctgggctagaggctgagcacctttggaaacaacatttaagggaatgtgagcacaatgcataatgtctttaaaaagcatgttgtgatgtacacattttgtaattaccttttttgttgttttgtagcaaccatttgtaaaacattccaaataattccacagtcctgaagcagcaatcgaatccctttctcacttttggaaggtgacttttcaccttaatgcatattcccctctccatagaggagaggaaaaggtgtaggcctgccttaccgagagccaaacagagcccagggagactccgctgtgggaaacctcattgttctgtacaaagtactagctaaa

SEQ ID NO: 22074 - DNA, 1219 bp, Homo sapiens
  misc_feature 1..1219: note = ENST00000271850
  source 1..1219: mol_type = unassigned DNA; mol_type = unassigned DNA
ctccagtgttcacaggtgagcctaccaacagccactgctcatgatggaggccatcaagaaaaagatgcagatgctgaagttagacaaggagaatgctctggatcgggcagagcaagctgaagctgagcagaagcaggcagaagaaagaagtaaacagctggaggatgagctggcagccatgcagaagaagctgaaagggacagaggatgagctggacaagtattctgaagctttgaaggatgcccaggagaagctggaactggcagagaagaaggctgctgatgctgaggctgaggtggcctccttgaaccgtaggatccagctggttgaagaagagctggaccgtgctcaggagcgcctggccactgccctgcaaaagctggaagaagctgaaaaagctgctgatgagagtgagagaggtatgaaggttattgaaaaccgggccttaaaagatgaagaaaagatggaactccaggaaatccaactcaaagaagctaagcacattgcagaagaggcagataggaagtatgaagaggtggctcgtaagttggtgatcattgaaggagacttggaacgcacagaggaacgagctgagctggcagagtcccgttgccgagagatggatgagcagattagactgatggaccagaacctgaagtgtctgagtgctgctgaagaaaagtactctcaaaaagaagataaatatgaggaagaaatcaagattcttactgataaactcaaggaggcagagacccgtgctgagtttgctgagagatcggtagccaagctggaaaagacaattgatgacctggaagataaactgaaatgcaccaaagaggagcacctctgtacacaaaggatgctggaccagaccctgcttgacctgaatgagatgtagaacgccccagtcccaccctgctgctgctcctccctctgacccagactccgcctgaggccagcctgcgggaagctgacctttaactgagggctgatctttaactggaaggctgctttctcctttcaccaccccctccttccctgtgtctttttcgccaaactgtctctgcctcttcccggagaatccagctgggctagaggctgagcacctttggaaacaacatttaagggaatgtgagcacaatgcataatgtctttaaaaagcatgttgtgatgtacacattttgtaattaccttttttgttgttttgtagcaaccattt

SEQ ID NO: 22075 - DNA, 750 bp, Homo sapiens
  misc_feature 1..750: note = ENST00000312970
  source 1..750: mol_type = unassigned DNA; mol_type = unassigned DNA
ccaggttctgcagcagcaggcagatgatgcagaggagcgagctgagcgcctccagcgagaagttgagggagaaaggcgggcccgggaacaggagcgcctggccactgccctgcaaaagctggaagaagctgaaaaagctgctgatgagagtgagagaggtatgaaggttattgaaaaccgggccttaaaagatgaagaaaagatggaactccaggaaatccaactcaaagaagctaagcacattgcagaagaggcagataggaagtatgaagaggtggctcgtaagttggtgatcattgaaggagacttggaacgcacagaggaacgagctgagctggcagagtcccgttgccgagagatggatgagcagattagactgatggaccagaacctgaagtgtctgagtgctgctgaagaaaagtactctcaaaaagaagataaatatgaggaagaaatcaagattcttactgataaactcaaggaggcagagacccgtgctgagtttgctgagagatcggtagccaagctggaaaagacaattgatgacctggaagataaactgaaatgcaccaaagaggagcacctctgtacacaaaggatgctggaccagaccctgcttgacctgaatgagatgtagaacgccccagtcccaccctgctgctgctcctccctctgacccagactccgcctgaggccagcctgcgggaagctgacctttaactgagggctgatctttaactggaaggctgc

SEQ ID NO: 22076 - DNA, 539 bp, Homo sapiens
  misc_feature 1..539: note = ENST00000513769
  source 1..539: mol_type = unassigned DNA; mol_type = unassigned DNA
gctcatcaagcaggggaaaggaaaaacacctccttgggttgatctgaataatatcaaagcttagatccatcttaaaaagtcatggagaattttaacctgaggatctcatggctctaaagacatagatttctgaatttcaaggacctattgtccagagccaggccttgctcttactcttggaccattcagcacatttagtgcaagaggatattcaattactctcaaaaagaagataaatatgaggaagaaatcaagattcttactgataaactcaaggaggcagagacccgtgctgagtttgctgagagatcggtagccaagctggaaaagacaattgatgacctggaagataaactgaaatgcaccaaagaggagcacctctgtacacaaaggatgctggaccagaccctgcttgacctgaatgagatgtagaacgccccagtcccaccctgctgctgctcctccctctgacccagactccgcctgaggccagcctgcgggaagctgacctttaactgagggctgatctttaactggaa

SEQ ID NO: 22077 - DNA, 741 bp, Homo sapiens
  misc_feature 1..741: note = ENST00000302206
  source 1..741: mol_type = unassigned DNA; mol_type = unassigned DNA
ggtgagctgcatgatgtcttacatttcatgagcttcctctaaatctagttgtatttttcgtctgaggggggctgaggctgaggtggcctccttgaaccgtaggatccagctggttgaagaagagctggaccgtgctcaggagcgcctggccactgccctgcaaaagctggaagaagctgaaaaagctgctgatgagagtgagagaggtatgaaggttattgaaaaccgggccttaaaagatgaagaaaagatggaactccaggaaatccaactcaaagaagctaagcacattgcagaagaggcagataggaagtatgaagaggtggctcgtaagttggtgatcattgaaggagacttggaacgcacagaggaacgagctgagctggcagagtctaagtgttctgagctggaggaggagctgaagaatgtcaccaacaacctcaagtctcttgaggctcaggcggagaagtactctcaaaaagaagataaatatgaggaagaaatcaagattcttactgataaactcaaggaggcagagacccgtgctgagtttgctgagagatcggtagccaagctggaaaagacaattgatgacctggaagataaactgaaatgcaccaaagaggagcacctctgtacacaaaggatgctggaccagaccctgcttgacctgaatgagatgtagaacgccccagtcccaccctgctgctgctcctccctctgacccagactccgcctgag

SEQ ID NO: 22078 - DNA, 1115 bp, Homo sapiens
  misc_feature 1..1115: note = ENST00000368531
  source 1..1115: mol_type = unassigned DNA; mol_type = unassigned DNA
gggtgggcaccatggctgggatcaccaccatcgaggcggtgaagcgcaagatccaggttctgcagcagcaggcagatgatgcagaggagcgagctgagcgcctccagcgagaagttgagggagaaaggcgggcccgggaacaggctgaggctgaggtggcctccttgaaccgtaggatccagctggttgaagaagagctggaccgtgctcaggagcgcctggccactgccctgcaaaagctggaagaagctgaaaaagctgctgatgagagtgagagaggtatgaaggttattgaaaaccgggccttaaaagatgaagaaaagatggaactccaggaaatccaactcaaagaagctaagcacattgcagaagaggcagataggaagtatgaagaggtggctcgtaagttggtgatcattgaaggagacttggaacgcacagaggaacgagctgagctggcagagtcccgttgccgagagatggatgagcagattagactgatggaccagaacctgaagtgtctgagtgctgctgaagaaaagtactctcaaaaagaagataaatatgaggaagaaatcaagattcttactgataaactcaaggaggcagagacccgtgctgagtttgctgagagatcggtagccaagctggaaaagacaattgatgacctggaagagcgtctctacagccaacttgagcgaaaccgcctgctttctaatgagctgaagctaacgctgcatgatctgtgtgactgatgggcagggctcaatgatgcccattaaactgagcttactgctcacaccactgacctggaccccaacaaaaagctgattgtctttttaaaagttattattttgccctgagcaaattgcattttaattggggcagttagaatgttgatttcctaacagcattgtgaagttgaccattgtgaagtttctgtccctttagaagagattatgggtgaagaagggaggggcctgagagattatagtgagaaaacttgcgagaattttgttttccacccttatttgctgctctttcacttgggcactgactgtaggatatgttcccttgcatggatgtttttaacaataaaaggactgacttgacaa

SEQ ID NO: 22079 - DNA, 1088 bp, Homo sapiens
  misc_feature 1..1088: note = ENST00000323144
  source 1..1088: mol_type = unassigned DNA; mol_type = unassigned DNA
ggaggaggcaggaaccggagcgcgagcagtagctgggtgggcaccatggctgggatcaccaccatcgaggcggtgaagcgcaagatccaggttctgcagcagcaggcagatgatgcagaggagcgagctgagcgcctccagcgagaagttgagggagaaaggcgggcccgggaacaggctgaggctgaggtggcctccttgaaccgtaggatccagctggttgaagaagagctggaccgtgctcaggagcgcctggccactgccctgcaaaagctggaagaagctgaaaaagctgctgatgagagtgagagaggtatgaaggttattgaaaaccgggccttaaaagatgaagaaaagatggaactccaggaaatccaactcaaagaagctaagcacattgcagaagaggcagataggaagtatgaagaggtggctcgtaagttggtgatcattgaaggagacttggaacgcacagaggaacgagctgagctggcagagtctaagtgttctgagctggaggaggagctgaagaatgtcaccaacaacctcaagtctcttgaggctcaggcggagaagtactctcaaaaagaagataaatatgaggaagaaatcaagattcttactgataaactcaaggaggcagagacccgtgctgagtttgctgagagatcggtagccaagctggaaaagacaattgatgacctggaagagcgtctctacagccaacttgagcgaaaccgcctgctttctaatgagctgaagctaacgctgcatgatctgtgtgactgatgggcagggctcaatgatgcccattaaactgagcttactgctcacaccactgacctggaccccaacaaaaagctgattgtctttttaaaagttattattttgccctgagcaaattgcattttaattggggcagttagaatgttgatttcctaacagcattgtgaagttgaccattgtgaagtttctgtccctttagaagagattatgggtgaagaagggaggggcctgagagattatagtgagaaaacttgcgagaattttgttttccacccttatttgctgctctttcacttgggcac

SEQ ID NO: 22080 - DNA, 1523 bp, Homo sapiens
  misc_feature 1..1523: note = ENST00000368530
  source 1..1523: mol_type = unassigned DNA; mol_type = unassigned DNA
gttcccccaggagaacaatgatggggtggagggagctggaaagaccatattaggaacaaaaggtggagctatgagcacagataaagactcaagtctggggacctcctggtcactcaggcagcagccccttctttcttgccccagtctccagttctccagtgttcacaggtgagcctaccaacagccactgctcatgatggaggccatcaagaaaaagatgcagatgctgaagttagacaaggagaatgctctggatcgggcagagcaagctgaagctgagcagaagcaggcagaagaaagaagtaaacagctggaggatgagctggcagccatgcagaagaagctgaaagggacagaggatgagctggacaagtattctgaagctttgaaggatgcccaggagaagctggaactggcagagaagaaggctgctgatgctgaggctgaggtggcctccttgaaccgtaggatccagctggttgaagaagagctggaccgtgctcaggagcgcctggccactgccctgcaaaagctggaagaagctgaaaaagctgctgatgagagtgagagaggtatgaaggttattgaaaaccgggccttaaaagatgaagaaaagatggaactccaggaaatccaactcaaagaagctaagcacattgcagaagaggcagataggaagtatgaagaggtggctcgtaagttggtgatcattgaaggagacttggaacgcacagaggaacgagctgagctggcagagtctaagtgttctgagctggaggaggagctgaagaatgtcaccaacaacctcaagtctcttgaggctcaggcggagaagtactctcaaaaagaagataaatatgaggaagaaatcaagattcttactgataaactcaaggaggcagagacccgtgctgagtttgctgagagatcggtagccaagctggaaaagacaattgatgacctggaagatgagctctatgcccagaaactgaagtacaaggccattagcgaggagctggaccacgccctcaatgacatgacctctatataattatcaccgtttctgctctgttctggatctgccccctttactcctcggggaacccaaggccccactctcgctctggattccatttgggtcagcctggctggtccccaaggcattaggatgggggagcaaaaagcaacttatgtattttcttccacccccaccccaaattaaaatgttaagctgctggaaacctcatgccaccctgcatttgtgtcattgacaaagctgttgctgtccctaagaaggagccttgggggtgtgatgtggggaagagctattgtaggctccccctcctctgacttatgtaatcaaagccacttttgtgtgtgtctattttttcttgacatttaaactcagctgatctgattctaccagagtgatggatttagtacaggttactcaggatagtaattttagttatactcctcaagctgaacaagattaaattccttatttccaggttcttaaatca

SEQ ID NO: 22081 - DNA, 870 bp, Homo sapiens
  misc_feature 1..870: note = ENST00000504663
  source 1..870: mol_type = unassigned DNA; mol_type = unassigned DNA
agaagataaatatgaggaagaaatcaagattcttactgataaactcaaggaggcagagacccgtgctgagtttgctgagagatcggtagccaagctggaaaagacaattgatgacctggaaggtatggaacctggagtagggattgaaatagagaaatatagaggaagactgcccattaaccattaatctctttttctgtacaccaaaggaagttggtagtgacttggcatgtattaatatcatgtgcactgtcctatgccacagctaggcaaagtgggtcaaactctagaattggttttttaaatttaatcttttcctttaagaagactttaccaaatagtctgcaatttgtacccttcccttttgaggagaatgataatggctgcatttacctccaatttattagtcttaaacctttagtctgtgggtttaaatggaagccatgatttcagaagggcaagatgtatgtcatttcatggctactttccacagttctttttgccactcaagttgtcgggtatttatccaataaatgaagttgtggaataaccatatctgaacattgaccaatgtcaggagctttctaaatactttctgtccctgcaagttggtaactgccatccaccctgacaagggaacgtactctttgctttgagaactctgatgtatgctcctttggtacactctcttggcagagttgcaggggcagcctgtggagcagaggggccactaataggttcacattttgtaggcagagaagtgtctgaatatggatatatactctctccctttgctatttttgttcaattaagtgttatcactgctaggaattgggtacctggatgggagtggtatcctcttgagtgctt

SEQ ID NO: 22082 - DNA, 543 bp, Homo sapiens
  misc_feature 1..543: note = ENST00000509601
  source 1..543: mol_type = unassigned DNA; mol_type = unassigned DNA
gtagcaggcggaagtaagggtgagaggaggctgcaacgccgagcggaggaggcaggaaccggagcgcgagcagtagctgggtgggcaccatggctgggatcaccaccatcgaggcggtgaagcgcaagatccaggttctgcagcagcaggcagatgatgcagaggagcgagctgagcgcctccagcgagaagttgagggagaaaggcgggcccgggaacaggctgaggctgaggtggcctccttgaaccgtaggatccagctggttgaagaagagctggaccgtgctcaggagcgcctggccactgccctgcaaaagctggaagaagctgaaaaagctgctgatgagagtgagagatggatgagcagattagactgatggaccagaacctgaagtgtctgagtgctgctgaagaaaagtactctcaaaaagaagataaatatgaggaagaaatcaagattcttactgataaactcaaggaggcagagacccgtgctgagtttgctgagagatcggtagccaagctggaaaagacaattgatga

SEQ ID NO: 22083 - DNA, 540 bp, Homo sapiens
  misc_feature 1..540: note = ENST00000505010
  source 1..540: mol_type = unassigned DNA; mol_type = unassigned DNA
gctgaggtggcctccttgaaccgtaggatccagctggttgaagaagagctggaccgtgctcaggagcgcctggccactgccctgcaaaagctggaagaagctgaaaaagctgctgatgagagtgagagaggtatgaaggttattgaaaaccgggccttaaaagatgaagaaaagatggaactccaggaaatccaactcaaagaagctaagcacattgcagaagaggcagataggaagtatgaagaggtggctcgtaagttggtgatcattgaaggagacttggaacgcacagaggaacgagctgagctggcagagtcccgttgccgagagatggatgagcagattagactgatggaccagaacctgaagtgtctgagtgctgctgaagaaaaggtactaaccattaagcccacagcaaggttatatatgtggtgtggttttgttttgttttgtttttgttttgcagctgcctcccctccacttgattttgttgagtgctgtctcatctcttcatggaatgctccattcttttccacttac

SEQ ID NO: 22084 - DNA, 569 bp, Homo sapiens
  misc_feature 1..569: note = ENST00000368527
  source 1..569: mol_type = unassigned DNA; mol_type = unassigned DNA
ataccatgccaaatagaatgagaatttgtgccatcttgcccatcccttccactccgacagttccattcattgacttccaggagacgggagagagaacctacctacctgagccgactttgaaaggagactgagtggggctcttttgaacctgaggcccagaaagtcttttagacttttcttataacttggttttggagtttgtcgtggggctgaggctgaggtggcctccttgaaccgtaggatccagctggttgaagaagagctggaccgtgctcaggagcgcctggccactgccctgcaaaagctggaagaagctgaaaaagctgctgatgagagtgagagaggtatgaaggttattgaaaaccgggccttaaaagatgaagaaaagatggaactccaggaaatccaactcaaagaagctaagcacattgcagaagaggcagataggaagtatgaagaggtggctcgtaagttggtgatcattgaaggagacttggaacgcacagaggaacgagctgagctggcagagtcccgttgccgagagatggatgagcagattagactgatgg

SEQ ID NO: 22085 - DNA, 746 bp, Homo sapiens
  misc_feature 1..746: note = ENST00000473036
  source 1..746: mol_type = unassigned DNA; mol_type = unassigned DNA
aacgccgagcggaggaggcaggaaccggagcgcgagcagtagctgggtgggcaccatggctgggatcaccaccatcgaggcggtgaagcgcaagatccaggttctgcagcagcaggcagatgatgcagaggagcgagctgagcgcctccagcgagaagttgagggagaaaggcgggcccgggaacaggctgaggctgaggtggcctccttgaaccgtaggatccagctggttgaagaagagctggaccgtgctcaggagcgcctggccactgccctgcaaaagctggaagaagctgaaaaagctgctgatgagagtgagagaggtatgaaggttattgaaaaccgggccttaaaagatgaagaaaagatggaactccaggaaatccaactcaaagaagctaagcacattgcagaagaggcagataggaagtatgaagaggtggctcgtaagttggtgatcattgaaggagacttggaacgcacagaggaacgagctgagctggcagagtcgtgagtatctagctccccaaatcttgtcattaccaatttatcccttcccctttggcttgggcactaatatgaataaattagcattccttcaaccttgttaaacagggcctagggaatgggagtcatctatagtgcttttttaggcccaagaatggttttaggcttccttattctcctgactagtgacaagtgacaaaagaggctttcttattttttgttggtagggtttacaaatt

SEQ ID NO: 22086 - DNA, 461 bp, Homo sapiens
  misc_feature 1..461: note = ENST00000466010
  source 1..461: mol_type = unassigned DNA; mol_type = unassigned DNA
agcaagctgaagctgagcagaagcaggcagaagaaagaagtaaacagactgcctttgtgaccttgggaaagtcagtgagccacagtatgtctgctgaatttaagtagaaatggaccatgttttggaagaacccttgacttctagaggaaaagctggaggatgagctggcagccatgcagaagaagctgaaagggacagaggatgagctggacaagtattctgaagctttgaaggatgcccaggagaagctggaactggcagagaagaaggctgctgatctttcccaagtcagaaagtaccctcagagatatgcataagaacaagaaacaggagagggaaggttgtggccaggagcaagcaagaagaaaggtttctttcctcaaagctagagtcagcaaactaccacctgtgggttaaatcttgcaacagcctggttttgtaaataaagttttatcggaaca

SEQ ID NO: 22087 - DNA, 587 bp, Homo sapiens
  misc_feature 1..587: note = ENST00000515609
  source 1..587: mol_type = unassigned DNA; mol_type = unassigned DNA
gagaaatttcccatgtgggaatccggctggatccctgtgagggaagacccttggagaacgcagcctggagttctggtaaaaagccctagaagaggagaggactcctgtggactgcaggctgcttcctggcagaagtttcctctcttaccctcagtctaaagccttagtttcaattctgccaggcaaggtggggaactataagtcttctcttctggagcccacgatggagcctgccagggagacaagttattcttctgttctggacatccaagggtgactttaaggaggatgcctggaggacatggggagaagtctccagttctccagtgttcacaggtgagcctaccaacagccactgctcatgatggaggccatcaagaaaaagatgcagatgctgaagttagacaaggagaatgctctggatcgggcagagcaagctgaagctgagcagaagcaggcagaagaaagaagtaaacagctggaggatgagctggcagccatgcagaagaagctgaaagggacagaggatgagctggacaagtattctgaagctttgaaggatgcccaggagaagctggaactggcag

SEQ ID NO: 22088 - DNA, 3149 bp, Homo sapiens
  misc_feature 1..3149: note = ENST00000611659
  source 1..3149: mol_type = unassigned DNA; mol_type = unassigned DNA
gtcacatccgggcgggttggtgagttccggtatttcagggcgtagcaggcggaagtaagggtgagaggaggctgcaacgccgagcggaggaggcaggaaccggagcgcgagcagtagctgggtgggcaccatggctgggatcaccaccatcgaggcggtgaagcgcaagatccaggttctgcagcagcaggcagatgatgcagaggagcgagctgagcgcctccagcgagaagttgagggagaaaggcgggcccgggaacaggctgaggctgaggtggcctccttgaaccgtaggatccagctggttgaagaagagctggaccgtgctcaggagcgcctggccactgccctgcaaaagctggaagaagctgaaaaagctgctgatgagagtgagagaggtatgaaggttattgaaaaccgggccttaaaagatgaagaaaagatggaactccaggaaatccaactcaaagaagctaagcacattgcagaagaggcagataggaagtatgaagaggtggctcgtaagttggtgatcattgaaggagacttggaacgcacagaggaacgagctgagctggcagagtcccgttgccgagagatggatgagcagattagactgatggaccagaacctgaagtgtctgagtgctgctgaagaaaaggcagagacccgtgctgagtttgctgagagatcggtagccaagctggaaaagacaattgatgacctggaagataaactgaaatgcaccaaagaggagcacctctgtacacaaaggatgctggaccagaccctgcttgacctgaatgagatgtagaacgccccagtcccaccctgctgctgctcctccctctgacccagactccgcctgaggccagcctgcgggaagctgacctttaactgagggctgatctttaactggaaggctgctttctcctttcaccaccccctccttccctgtgtctttttcgccaaactgtctctgcctcttcccggagaatccagctgggctagaggctgagcacctttggaaacaacatttaagggaatgtgagcacaatgcataatgtctttaaaaagcatgttgtgatgtacacattttgtaattaccttttttgttgttttgtagcaaccatttgtaaaacattccaaataattccacagtcctgaagcagcaatcgaatccctttctcacttttggaaggtgacttttcaccttaatgcatattcccctctccatagaggagaggaaaaggtgtaggcctgccttaccgagagccaaacagagcccagggagactccgctgtgggaaacctcattgttctgtacaaagtactagctaaaccagaaaggtgattccaggaggagttagccaaacaacaacaaaaacaaaaaatgtgctgttcaagttttcagctttaagatatctttggataatgttatttctattttttatttttttcattagaagttaccaaattaagatggtaagacctctgagaccaaaattttgtcccatctctaccccctcacaactgcttacagaatggatcatgtcccccttatgttgaggtgaccacttaattgctttcctgcctccttgaaagaaagaaagaaagaagactgtgtttttgccactgatttagccatgtgaaactcatctcattacccttttctgggtttgaagctgctgtctctagaagtgccatctcaattgtgctttgtatcagtcagtgctggagaaatcttgaatagcttatgtacaaaactttttaaattttatattattttgaaactttgctttgggtttgtggcaccctggccaccccatctggctgtgacagcctctgcagtccgtgggctggcagtttgttgatcttttaagtttccttccctacccagtccccattttctggtaaggtttctaggaggtctgttaggtgtacatcctgcagcttattggcttaaaatgtactctccttttatgtggtctctttggggccgattgggagaaagagaaatcaatagtgcaactgttttgatactgaatattgacaagtgtctttttgaaataaagaaccagtccctccaaccctcagacctatttgacttttatttattaaaactaaatgtgctttctccacagaagctatgaggtttgggttaaaaatagcatctttgtgggtggtagcaacaggatttattctttattattattatttttgagatgaagtttcattcttgttgcctgggctggagcgtaatggctcgatctcggctcactgcaacctccgcctcctggttcaagagattctcctgcctcagcctcccgagtagctgggattacaggcacctgccaccatgcccgggtaattttttatattttaagtagagacagggcttcaccatgttggccaggctggtctcgaactcctgaccttcaggtgatccacctgcctcagcttcccaaaatgctgggattacgggcgtgagccaccgcacccagctggagcaacaggatttaatatagagcaaatgtttagttttatcatctgtaaaatggagataagtattgtcagagtaaacatgaagattagaaagaacacttaatgtgctgggccttttataggttaacactgacatctcaggctgaactatatacattttccttcacaaccatatcaatccttataaactatggatttatgctccttaaaacaatatataatgctgatcactactataaatgcgtggttttaaccaactgtactgaaacagctttgagtttatattctgtttggatatttggagaaaacaacaagtgctctcaagagtatttgcttagaggccggctgtgtgagtggataactttgaaagctgcttttgagacgccagtgtctggcatttcctgcattctggcctggaggccggacgtgaatctgacttctagtaaaaatacacggttcccttgacaaagtcgagctgtttatcccagagactgcacaattttccgttgataggcatggaccaatgctaactggaaatcattgcaaaaagtttttttgtcgggcggagggtgtggtgttaagataaacagtgtgcaacagaagaaattaaaactggaagaaattaaagggttttttttagacttt

SEQ ID NO: 22089 - DNA, 586 bp, Homo sapiens
  misc_feature 1..586: note = ENST00000589897
  source 1..586: mol_type = unassigned DNA; mol_type = unassigned DNA
agagaaaagtgtgtgtgtgggcggtgggggaggggggaaacggggaattgctcattttacttaacaagtactttcccatttttaggggaccaggtactcagtgggccacagacaagaccaaggcagaaaagacaggcgcctccccacattgcagcaccgggaccccgagcccacccacagccctcttcattcctcccaacgatggatggggaaactgaggcagcccagagcagcccccaccctaggtcctgcccgggacacgcccacgcgggacctgtgtcaccaggctcactctgccccacagccacagcccctgactgccgcagcccccacagagcccgccgcgcaccccacgtcccccacgccagcgcccagccatggaggccatcaagaagaaaatgcagatgctgaagttggacaaggagaatgccatcgaccgcgcggagcaggcggaggcggataagaaagccgctgaggacaagtgcaagcaggtggaggaggagctgacgcacctccagaagaaactaaaagggacagaggacgagctggataaatattccgaggacctgaaggacgcgcaggagaa

SEQ ID NO: 22090 - DNA, 1417 bp, Homo sapiens
  misc_feature 1..1417: note = ENST00000344824
  source 1..1417: mol_type = unassigned DNA; mol_type = unassigned DNA
ataaggccctctcctccaccctgccaggctcactctgccccacagccacagcccctgactgccgcagcccccacagagcccgccgcgcaccccacgtcccccacgccagcgcccagccatggaggccatcaagaagaaaatgcagatgctgaagttggacaaggagaatgccatcgaccgcgcggagcaggcggaggcggataagaaagccgctgaggacaagtgcaagcaggtggaggaggagctgacgcacctccagaagaaactaaaagggacagaggacgagctggataaatattccgaggacctgaaggacgcgcaggagaagctggagctcacggagaagaaggcctccgacgctgaaggtgatgtggccgccctcaaccgacgcatccagctcgttgaggaggagttggacagggctcaggaacgactggccacggccctgcagaagctggaggaggcagaaaaagctgcagatgagagtgagagaggaatgaaggtgatagaaaaccgggccatgaaggatgaggagaagatggagattcaggagatgcagctcaaagaggccaagcacattgcggaagaggctgaccgcaaatacgaggaggtagctcgtaagctggtcatcctggagggtgagctggagagggcagaggagcgtgcggaggtgtctgaactaaaatgtggtgacctggaagaagaactcaagaatgttactaacaatctgaaatctctggaggctgcatctgaaaagtattctgaaaaggaggacaaatatgaagaagaaattaaacttctgtctgacaaactgaaagaggctgagacccgtgctgaatttgcagagagaacggttgcaaaactggaaaagacaattgatgacctggaagagaaacttgcccaggccaaagaagagaacgtgggcttacatcagacactggatcagacactaaacgaacttaactgtatataagcaaaacagaagagtcttgttccaacagaaactctggagctccgtgggtctttctcttctcttgtaagaagttccttttgttattgccatcttcgctttgctggaaatgtcaagcaaattatgaatacatgaccaaatattttgtatcggagaagctttgagcaccagttaaatctcattccttccctttttttttcaaatggcaccagctttttcagctctcttattttttccttaagtagcatttattcctaaggtaggcagggtatttcctagtaagcatactttcttaagacggaggccatttggttcctgggagaataggcagccccacactttgaagaatacagaccccagtatctagtcgtggatataattaaaacgctgaagaccataaccttttgggtcaactgttggtcaaactataggagagaccagggacca

SEQ ID NO: 22091 - DNA, 708 bp, Homo sapiens
  misc_feature 1..708: note = ENST00000586499
  source 1..708: mol_type = unassigned DNA; mol_type = unassigned DNA
gaggcggataagaaagccgctgaggacaagtgcaagcaggtgaggtgccctccgctgggccgctccgggctgctgggagtcctctctgtgcggaaggccggggtctggagcccagttgggggtcgcagacacctgcgggaggataggaggctgatgctttggcggaggaagagcgaggggaccattgccttccttggatggggtcctgggctggaagaggggtgacgatcggacccacccccagcagggccagtgcgaacaaagtggaggaggagctgacgcacctccagaagaaactaaaagggacagaggacgagctggataaatattccgaggacctgaaggacgcgcaggagaagctggagctcacggagaagaaggcctccgacgctgaaggtgatgtggccgccctcaaccgacgcatccagctcgttgaggaggagttggacagggctcaggaacgactggccacggccctgcagaagctggaggaggcagaaaaagctgcagatgagagtgagagaggaatgaaggtgatagaaaaccgggccatgaaggatgaggagaagatggagattcaggagatgcagctcaaagaggccaagcacattgcggaagaggctgaccgcaaatacgaggaggtagctcgtaagctggtcatcctggagggtgagctggagagggcagaggagcgtgcggaggtgtctg

SEQ ID NO: 22092 - DNA, 558 bp, Homo sapiens
  misc_feature 1..558: note = ENST00000586833
  source 1..558: mol_type = unassigned DNA; mol_type = unassigned DNA
gagattgcttaactccagatcatggtggaggaggagctgacgcacctccagaagaaactaaaagggacagaggacgagctggataaatattccgaggacctgaaggacgcgcaggagaagctggagctcacggagaagaaggcctccgacgctgaaggtgatgtggccgccctcaaccgacgcatccagctcgttgaggaggagttggacagggctcaggaacgactggccacggccctgcagaagctggaggaggcagaaaaagctgcagatgagagtgagagaggaatgaaggtgatagaaaaccgggccatgaaggatgaggagaagatggagattcaggagatgcagctcaaagaggccaagcacattgcggaagaggctgaccgcaaatacgaggaggtagctcgtaagctggtcatcctggagggtgagctggagagggcagaggagcgtgcggaggtgtctgaactaaaatgtggtgacctggaagaagaactcaagaatgttactaacaatctgaaatctctggaggctgcatctgaaaagtattctgaa

SEQ ID NO: 22093 - DNA, 367 bp, Homo sapiens
  misc_feature 1..367: note = ENST00000588507
  source 1..367: mol_type = unassigned DNA; mol_type = unassigned DNA
gctggataaatattccgaggacctgaaggacgcgcaggagaagctggagctcacggagaagaaggcctccgacaggaatgaaggtgatagaaaaccgggccatgaaggatgaggagaagatggagattcaggagatgcagctcaaagaggccaagcacattgcggaagaggctgaccgcaaatacgaggaggtagctcgtaagctggtcatcctggagggtgagctggagagggcagaggagcgtgcggaggtgtctgaactaaaatgtggtgacctggaagaagaactcaagaatgttactaacaatctgaaatctctggaggctgcatctgaaaagtattctgaaaaggaggacaaatatgaaga

SEQ ID NO: 22094 - DNA, 2666 bp, Homo sapiens
  misc_feature 1..2666: note = ENST00000300933
  source 1..2666: mol_type = unassigned DNA; mol_type = unassigned DNA
aagtcccgaaaaggggcactttccagcagctgtggccagcggtgccgacgtcaggccctcccccagcggtgctgacgtcggcggtccggccgggtgacctcatcgccccgacggcagccggcccggggggcggggagaggcgggggcggcccccgcgcaggcaaaggcttggggggccggggcgcggctgtgcagctctcgccggagccgagcccagccgagcgtccgccgctgcccgtgcgcctctgcgcctccgcgccatggccggcctcaactccctggaggcggtgaaacgcaagatccaggccctgcagcagcaggcggacgaggcggaagaccgcgcgcagggcctgcagcgggagctggacggcgagcgcgagcggcgcgagaaagctgaaggtgatgtggccgccctcaaccgacgcatccagctcgttgaggaggagttggacagggctcaggaacgactggccacggccctgcagaagctggaggaggcagaaaaagctgcagatgagagtgagagaggaatgaaggtgatagaaaaccgggccatgaaggatgaggagaagatggagattcaggagatgcagctcaaagaggccaagcacattgcggaagaggctgaccgcaaatacgaggaggtagctcgtaagctggtcatcctggagggtgagctggagagggcagaggagcgtgcggaggtgtctgaactaaaatgtggtgacctggaagaagaactcaagaatgttactaacaatctgaaatctctggaggctgcatctgaaaagtattctgaaaaggaggacaaatatgaagaagaaattaaacttctgtctgacaaactgaaagaggctgagacccgtgctgaatttgcagagagaacggttgcaaaactggaaaagacaattgatgacctggaagagaaacttgcccaggccaaagaagagaacgtgggcttacatcagacactggatcagacactaaacgaacttaactgtatataagcaaaacagaagagtcttgttccaacagaaactctggagctccgtgggtctttctcttctcttgtaagaagttccttttgttattgccatcttcgctttgctggaaatgtcaagcaaattatgaatacatgaccaaatattttgtatcggagaagctttgagcaccagttaaatctcattccttccctttttttttcaaatggcaccagctttttcagctctcttattttttccttaagtagcatttattcctaaggtaggcagggtatttcctagtaagcatactttcttaagacggaggccatttggttcctgggagaataggcagccccacactttgaagaatacagaccccagtatctagtcgtggatataattaaaacgctgaagaccataaccttttgggtcaactgttggtcaaactataggagagaccagggaccatcacatgggtagggattttccatccagagccaataaaaggactggtgggggccgggggtggctattgtgggaagtcataacccacagatagatcaacctaagaatcctggcccttctccactctccaccatgcaggacaaacatcttctcaagcagtcaacgtagaatgcttgggaaatagtcataattacccacatatagtaattaatagatggtaattaattgatccttgatgtgatgttcttttgcatatttccttcattctaaagttgttccctggccgggagcgttggctttcgcctgtaatcccaacactttgggaggccaggacagatcacttgaggtcaggagttcgagaccagcccagccaacatggcgaaaccatgtctctactaaaaatacaaaaattatggtgacgcctgcctgtagtcccagctactcgggaggctgaggcaggaggatcgcttgaacccaggaagtggagactgcagtgagccgatatcgcaccacagcgctccagcctggtcgacagagtgagactccatctcaagaaaaaataaaaataaagttgttctctgaagagcaaatgtctcattccagtaatgacccactcagcaggaatatggtggagttcagtccaattcaggtcagccatatccaaaagaccacaagtcattactaagttgagcaaaagagtttttatctattagcagaaagggcctctctggcagcagagattaaaaactggcccaacttcatttccatacttcagggaacagcaaattgaggatttacttatctaggacttgaattccttctttgggaccaagttaataaaagaccaagaaactcctgattaaactggataatgaaggattctgtagacagggctgcacgtatcggctttgtttgacttctcttttctcagttaacatctcagagctagaacattccacattccccagcagcgtgtgggggctgactaaagtttacaattccaactaaaaatcaccctgcttctggcttatctgaatcccttacccaccccaccccaccaccctactcctatttattcagcaccacactacccaggaaatacactagcaaattgtgcaatggaataaaatccacactttagattcttgcaactgtatcatatgtaatagtatcactttttctacattttggtcaaataaatttttacataaactacaa

SEQ ID NO: 22095 - DNA, 877 bp, Homo sapiens
  misc_feature 1..877: note = ENST00000587201
  source 1..877: mol_type = unassigned DNA; mol_type = unassigned DNA
agctctcgccggagccgagcccagccgagcgtccgccgctgcccgtgcgcctctgcgcctccgcgccatggccggcctcaactccctggaggcggtgaaacgcaagatccaggccctgcagcagcaggcggacgaggcggaagaccgcgcgcagggcctgcagcgggagctggacggcgagcgcgagcggcgcgagaaagctgaaggtgatgtggccgccctcaaccgacgcatccagctcgttgaggaggagttggacagggctcaggaacgactggccacggccctgcagaagctggaggaggcagaaaaagctgcagatgagagtgagagaggaatgaaggtgatagaaaaccgggccatgaaggatgaggagaagatggagattcaggagatgcagctcaaagaggccaagcacattgcggaagaggctgaccgcaaatacgaggaggtagctcgtaagctggtcatcctggagggtgagctggagagggcagaggagcgtgcggaggtgtctgaactgtgagtggcagaacaggactgagcgaggctggctcgattcctggggcggagtgggaaggagctggctgtgttgggaattggctctgaccggggtctctgctcaagtggacgggcgtcaggggctcatggctcatcttttctcttggcttctgtgacaaagaggtggtgacttgttcttactgccatgggaagcactgcccacgtgttgaccctttctgcaaagatatgaggaaataggagtgagacaggaggcagcagggaagcccagaagtcccattttcccagagaggatatctcagggggctgtgccatcttaacagaacactgacctgctccagaaggcaggctcccccgg

SEQ ID NO: 22096 - DNA, 563 bp, Homo sapiens
  misc_feature 1..563: note = ENST00000588410
  source 1..563: mol_type = unassigned DNA; mol_type = unassigned DNA
gtgcaggctccgactccggggctggcgccggggtcccgggccgaggggaacccgcgaccggacttgtgggggagaatgaggatgaaaacgtggagcttccattgtctagggtaaaaacaccttgaaaagccaataacactattggggtatgtcttccatgcctgcaaccaagttttctttccctttccatatctttttgtcctgccatctctcagccaggcggattgaaggatggaattccaacgaggctcccccgcctcgtcccaccttggctgaaggtgatgtggccgccctcaaccgacgcatccagctcgttgaggaggagttggacagggctcaggaacgactggccacggccctgcagaagctggaggaggcagaaaaagctgcagatgagagtgagagaggaatgaaggtgatagaaaaccgggccatgaaggatgaggagaagatggagattcaggagatgcagctcaaagaggccaagcacattgcggaagaggctgaccgcaaatacgaggaggtagctcgtaagctggtcatcctggagggtgagctggaga

SEQ ID NO: 22097 - DNA, 521 bp, Homo sapiens
  misc_feature 1..521: note = ENST00000590180
  source 1..521: mol_type = unassigned DNA; mol_type = unassigned DNA
taggaaaaagctagcgtggcttcccttttcctctcggttgaggcccgtttgacccgttctcaatattccttccaaagagcaggcatcgctggaaaactcgccttgcctcgtagccctggcaggacctaggggacaggttctgacaaggaagagccctgggtgggtcttaagaggccattcatttcttaccaattctgagtcactgaataaaaccacttcccccagtggggcccctcggtttcttcacctgtaaaatgggtgcgatgtgtgaggatgaaattgcagtaaaataaaaccgtggcagtaagagatgcctttctctggcacatcccacctgctgggcataagcggcgccaccctctggagttacagcctcaaggcagtccggctgaaggtgatgtggccgccctcaaccgacgcatccagctcgttgaggaggagttggacagggctcaggaacgactggccacggccctgcagaagctggaggaggcagaaaaagctgcagatgagagtgagag

SEQ ID NO: 22098 - DNA, 801 bp, Homo sapiens
  misc_feature 1..801: note = ENST00000588483
  source 1..801: mol_type = unassigned DNA; mol_type = unassigned DNA
gaaaatgacaaagcggggattccagcccagcactttttggccctggagttcctggtttaatgcttcccattgtacttcctttcttgtaggtaaaaacaccttgaaaagccaataacactattggggtatgtcttccatgcctgcaaccaagttttctttccctttccatatctttttgtcctgccatctctcagccaggcggattgaaggatggaattccaacgaggctcccccgcctcgtcccaccttggtaattgcatggccaacatttaactgagggctccatagtcttgcatttatcttgccattcaggtgaatgggagcggaactcacaggacacaatgagccgggtcactgatggccttgctttctaagaatctcacagtgagccctagaactctctacgtggtaacactgtgtgcctttttcagagaagagcctatcttagatcttagcctaacgttgggtctattgtgttgctggagagaccagcactgacattcatctcaaagcacatggctggagtgcagtggcacgatctcagctcacggcaacctccgcctcccgggttcaagtgattcttctgcctcagcctcctgagcatgtggaactacaggcacgtgatgtggccgccctcaaccgacgcatccagctcgttgaggaggagttggacagggctcaggaacgactggccacggccctgcagaagctggaggaggcagaaaaagctgcagatgagagtgagagaggaatgaaggtgatagaaaaccgggccatgaaggatgaggagaagatggagat

SEQ ID NO: 22099 - DNA, 635 bp, Homo sapiens
  misc_feature 1..635: note = ENST00000592138
  source 1..635: mol_type = unassigned DNA; mol_type = unassigned DNA
tgtttttcccagacattttccgggaagatcatactgaaattttggtatgagtgtaaattccctatggcctggactcctgggtgggctttgacggggaagatcaggttaacagagggcaggacatgggggaggctcccactggtggctggcctgatacttcttaacatggctgcacctccgacctccccaggctgaaggtgatgtggccgccctcaaccgacgcatccagctcgttgaggaggagttggacagggctcaggaacgactggccacggccctgcagaagctggaggaggcagaaaaagctgcagatgagagtgagagaggaatgaaggtgatagaaaaccgggccatgaaggatgaggagaagatggagattcaggagatgcagctcaaagaggccaagcacattgcggaagaggctgaccgcaaatacgaggaggtagctcgtaagctggtcatcctggagggtgagctggagagggcagaggagcgtgcggaggtgtctgaactaaaatgtggtgacctggaagaagaactcaagaatgttactaacaatctgaaatctctggaggctgcatctgaaaagtattctgaaaaggaggacaaatatgaagaagaaattaaacttctgt

SEQ ID NO: 22100 - DNA, 712 bp, Homo sapiens
  misc_feature 1..712: note = ENST00000588032
  source 1..712: mol_type = unassigned DNA; mol_type = unassigned DNA
gctggagagggcagaggagcgtgcggaggtgtctgaactaaaatgtggtgacctggaagaagaactcaagaatgttactaacaatctgaaatctctggaggctgcatctgaaaagtattctgaaaaggaggacaaatatgaagaagaaattaaacttctgtctgacaaactgaaagaggctgagacccgtgctgaatttgcagagagaacggttgcaaaactggaaaagacaattgatgacctggaagagaaacttgcccaggccaaagaagagaacgtgggcttacatcagacactggatcagacactaaacgaacttaactgtatataagcaaaacagaagagtcttgttccaacagaaactctggagctccgtgggtctttctcttctcttttgttccctggccgggagcgttggctttcgcctgtaatcccaacactttgggaggccaggacagatcacttgaggtcaggagttcgagaccagcccagccaacatggcgaaaccatgtctctactaaaaatacaaaaattatggtgacgcctgcctgtagtcccagctactcgggaggctgaggcaggaggatcgcttgaacccaggaagtggagactgcagtgagccgatatcgcaccacagcgctccagcctggtcgacagagtgagactccatctcaagaaaaaataaaaataaagttgttctctgaagagcaaa

SEQ ID NO: 22101 - DNA, 545 bp, Homo sapiens
  misc_feature 1..545: note = ENST00000586193
  source 1..545: mol_type = unassigned DNA; mol_type = unassigned DNA
aatccactccgggcttccttcccggagtgtcccctgcaaactcccattgctctctgcccgccttctgccctcagtcccattcttacaccttccggagtcggcctcatcaatcatagatttcacaagtccttgcagccttacccttggcaaaagaccaggagtgttttccaagccctccaaatactcttcgggcgcacctcgcctctgcctggtatgataagcctttgataagcccatagtatcacactgcagaaaaatccattaacattttctccccacattccttctgccccccaccgggggagctgtgtaggtttctcctttggaaaatttattgttggggcgattgctattattgccggctgtaagggaagataagacacaaaaatcctttgtctttgtgcagaaaatgtggtgacctggaagaagaactcaagaatgttactaacaatctgaaatctctggaggctgcatctgaaaagtattctgaaaaggaggacaaatatgaagaagaaattaaacttctgtctgacaaactgaaagag

SEQ ID NO: 22102 - DNA, 653 bp, Homo sapiens
  misc_feature 1..653: note = ENST00000591645
  source 1..653: mol_type = unassigned DNA; mol_type = unassigned DNA
ggtcccccaaaacactggaatcacagtattctgaaaaggaggacaaatatgaagaagaaattaaacttctgtctgacaaactgaaagaggctgagacccgtgctgaatttgcagagagaacggttgcaaaactggaaaagacaattgatgacctggaagagaaacttgcccaggccaaagaagagaacgtgggcttacatcagacactggatcagacactaaacgaacttaactgtatataagcaaaacagaagagtcttgttccaacagaaactctggagctccgtgggtctttctcttctcttgtaagaagttccttttgttattgccatcttcgctttgctggaaatgtcaagcaaattatgaatacatgaccaaatattttgtatcggagaagctttgagcaccagttaaatctcattccttccctttttttttcaaatggcaccagctttttcagctctcttattttttccttaagtagcatttattcctaaggtaggcagggtatttcctagtaagcatactttcttaagacggaggccatttggttcctgggagaataggcagccccacactttgaagaatacagaccccagtatctagtcgtggatataattaaaacgctgaagaccataaccttttgggtcaac

SEQ ID NO: 22103 - DNA, 262 bp, Homo sapiens
  misc_feature 1..262: note = ENST00000592822
  source 1..262: mol_type = unassigned DNA; mol_type = unassigned DNA
aaacttctgtctgacaaactgaaagaggctgagacccgtgctgaatttgcagagagaacggttgcaaaactggaaaagacaattgatgacctggaagatgagttatacgctcagaagctcaagtacaaagctatcagcgaggaactggaccacgctctcaacgacatgacctctctctgagaggcagccaggtcgctgccctctgtccttctcacatggtgcctcctacgcccctgtgggcttctaggagctccggtggcct

SEQ ID NO: 22104 - DNA, 2672 bp, Homo sapiens
  misc_feature 1..2672: note = ENST00000591226
  source 1..2672: mol_type = unassigned DNA; mol_type = unassigned DNA
tatgaggcattttgctttcccccagcattttaatgagtcttggccttgtcccttatcagccatcacttactgcaaactaagttctctctcgtgctctgtcacgcatagctctaaatggcgtcttttttctctctctctttcttttttaatttaaattgtttcatcagctcagttacttaataacatgcctgtagaatggcttaaatttcgcatttacctggggtttgtctccgttctcctggattcatagacagttacacaattatgtgtataatttaaacagccattcccagaagctccgaaggaaagatgggttacaggattttagatttaactatcaaaggctcaggggctaattaactagcacttgggtggaaatttatattaagtcacacatatctaggactgaaatcttcatgtagcagcacgtcataggttctgaagtatttctcctttattcctcatcataacccccacaccacgcattgatatcgttacccccatttgacagacggggaaaacagacctaggaaggttagatgcttacttaagtgatacaactggagcttaagttcaggtattctgactcaagggttaccagagttcacaaggaaaaatacaggacaccaacttaaatctgagtttcagataagcaatgaataattttttaatcataagtatatctcttgcataagtacatctcatgcaacatttgggatatacttacactaaaatattatttgtggtttatctgaaattcaatttaactgggcgccctgcattttatcttacaactgtgactcccaaatttggtgcttgttccttagtattctgtgatgttctgctgtaattaaaaatacaaagtactggacaggcatggtggctataacccacctgtattcccagcactttgggaggctgagcagatgggttccttgagcccaggagctcaagaccagcctgggtaacatggtgagaccctgtctctagaaaaaatgcaaaaattggccaggtggtggcatgcacctgcagtcccagctatgcgggaggctgaggtgggaggatcacctgagcccagggaggtcaaggctacggtgattcgtgattacgccactgcacttcagcctggacaacagagtgagaccctgtctcaaaaaaaaagtactttctctcttgtgactttcaccctggcagtttcaggtttagaaatctttgggggggtgctgggcatggtggctcacacctgtaatcccagcactttaggaggccaaggtgggtggatcacttgaggtcaagagctcgagaccagcctggctaacatggtgaaaccccatctctactaaaaatacaaaaattagccgggtggtggtggcacgcgtctgtaatcccagctactcgggaggctgaggcaggagaattgcttgagcctggcaggtgaaggttgcagtgagccaagatcgcgccactgcactccagcctgggtgacagaatgagaccctgtctcaagaagaagaaaaaaaaacaaatctttttttttctttcatttaacaaagacgcttattaatttatctttccccatactcttaatcctcaccagagaaacttgcccaggccaaagaagagaacgtgggcttacatcagacactggatcagacactaaacgaacttaactgtatataagcaaaacagaagagtcttgttccaacagaaactctggagctccgtgggtctttctcttctcttgtaagaagttccttttgttattgccatcttcgctttgctggaaatgtcaagcaaattatgaatacatgaccaaatattttgtatcggagaagctttgagcaccagttaaatctcattccttccctttttttttcaaatggcaccagctttttcagctctcttattttttccttaagtagcatttattcctaaggtaggcagggtatttcctagtaagcatactttcttaagacggaggccatttggttcctgggagaataggcagccccacactttgaagaatacagaccccagtatctagtcgtggatataattaaaacgctgaagaccataaccttttgggtcaactgttggtcaaactataggagagaccagggaccatcacatgggtagggattttccatccagagccaataaaaggactggtgggggccgggggtggctattgtgggaagtcataacccacagatagatcaacctaagaatcctggcccttctccactctccaccatgcaggacaaacatcttctcaagcagtcaacgtagaatgcttgggaaatagtcataattacccacatatagtaattaatagatggtaattaattgatccttgatgtgatgttcttttgcatatttccttcattctaaagttgttccctggccgggagcgttggctttcgcctgtaatcccaacactttgggaggccaggacagatcacttgaggtcaggagttcgagaccagcccagccaacatggcgaaaccatgtctctactaaaaatacaaaaattatggtgacgcctgcctgtagtcccagctactcgggaggctgaggcaggaggatcgcttgaacccaggaagtggagactgcagtgagccgatatcgcaccacagcgctccagcctggtcgacagagtgagactccatctc

SEQ ID NO: 22105 - DNA, 6022 bp, Homo sapiens
  misc_feature 1..6022: note = ENST00000360578
  source 1..6022: mol_type = unassigned DNA; mol_type = unassigned DNA
gggcggtgctgggcgggacgggcgggcgcggggcggcggctggagagctccgctgagcaccgggtcgcgcgcggccgagtcgcggaggcgcctccgctgcagtcgctgcgtctccaagcaacatggctgacaaggccaagcctgccaaagctgccaacaggacgccccccaagtccccgggggacccctcgaaggaccgggcagccaagaggctgtcgctggaatcggagggtgctggtgagggggcagccgcatcccctgagctcagtgccctggaggaggccttccggcgctttgccgtgcacggggacgccagggccaccgggagggagatgcacggcaagaactggtcgaagctgtgcaaggactgccaggtgatcgacggcaggaacgtgaccgtcactgacgtggacatcgtcttcagcaagatcaaagggaagtcttgccggaccatcacctttgagcagttccaggaggcgctggaggagctcgccaagaagcgattcaaagacaagagcagcgaggaggccgttcgcgaggtgcacaggctcatcgagggcaaggcgcccatcatctcaggggtgacgaaagccatctcgtcgcccacagtgtcgaggctcacggacaccaccaagttcacgggctcccacaaggagcgcttcgacccctctggcaagggcaagggcaaggctggccgcgtggatctggtggacgagtcaggctatgtgtccggctacaagcacgcaggcacctacgaccagaaggtgcaagggggcaagtagcccccgctccatgcctcgcggcactgccggtgtccccagagcagggactctgtcacctcgcacttcattacattcctgtactaactggggcagaactcagacgggtgccccagagggggctggggggcggccaggcccaggcctccctcctgcccctcctcctaccggatgcccccagcactcccctctcaaaccaggtttgggccccagttcgctgaccctcctaatacacctgcctcgtcctcagccatttccaaagtgtctcgcggatcacaccacactgggcacgtggtttgcaggtcaaaggggcgttttaaagcagctggctgtcatggcaacaggaggctgtgctgacctcctgagcggcagacaccttccaggagccctgagggtggcaggagctaaccccaaccagcaggcaactaacacggaattggccccacaccggacgtgggaggtgtctgtggggcccgaggcctgtcctgtgtgcagcggacaccacggggccttcctgctttcctgggcagagggcagagtgaggccacctggcgggggtgctgggcgcctggcacatgtgtggggaagccggtcacatggacacacctgtgcacacatgcctacaggccagctctgtgccaagggcaacctaggtaaaacgaaagccgtcaggggcagtgggcggcttcccggctgaccacagtggcttggactgtgagggtagagtaggctcgctttgctttcctgagaagatgcggtggctgcctatgttctcagagcgggtctgggaagattcagaatgtccggtccctgtggtgttgccaggcaagagacacgaagtgccgagacactcctcgcctcaccgcgtgacagagcctctgcccggccctcccgttcgcccgtcctcactagctgcaccctgtttgctcgcagacctcccattgccacagcccaagcaccttcttcaactctcccaaaatggctcagcctaacctctcctggccaatcccccccgccggagagcaggacactagggaggacccccagtcctgcagtgtctgtgggggtttctctgccagcagggggctgagcagagcccatccaggacactccacactgccaggacacacccaggcggcccgcccttgcctgtctgcacctggggagaagccggcgctcctgctccctcctggggaggctgacgggtgtggccacccgctgtcacaatggcacactgccactgtcccttggcacgcacacagccacagccacacgtgtgacctgctgggccgtggttctggagtctacctgcggatgagcctgcggcagtcctggggaaacttttccagagcctgttagcccgtggctacggtcaggctctggccagggcagagggctgcccagggccaggctcacagtacaggagggtggcgaggcccctccctcactggcacgcatgagcaccacccgcctccccgactcccaagagtgcacctgctgcggccacagctccgtggaaggactccccctacctgagcagagcagaagccccagggcggagctcccagccagcatggtccgctgagggctggggggcggtctccgaggcccctcaacagagaagcctccacctgaggatggggaggacctggcaggcagcttccacggcagggctgggaagttcagtgcctggaaataaagagcaaggaaaaatggacctcaggcttcgtggctcctttaggatgtcacctcaccggcctggggaaggcggggggtgcccaagcccagccctgtgcccccgctgaacctggctggaccgcgtgtgaaaggcagaactaacgtgcggaaacatttgaaaacaactctgaatgtgcggttcggaatcacccgatcacagacgagcggtcaccggaatcgcccggtcacagacgagcagtcatcggactcacccgatcacagacgagcggtcaccggaatcgcccgatcacagacgagcggccaccggaatcgcccaatcacagacaagcagtcatcggaatcacccgatcacagacgagcagtcatcggactcacccgatcacagacgagcggtcaccagactcgcccgatcacagacgagcagtcatcggaatcacccgatcacagacgagcagtcatcggactcacccgatcacagacgagcggtcaccagaatcgcccgatcacagacgagcagtcatcggaatcacccgatcacagacgagtggccaccggaatcacccgataacagcccatcacaactccaaagcccttgtgttgaaaaggccgaggacgagtggtcaccaaacagggtggctccccaggtcccgaagcctgagacccggaaggccctggcacccttacaccctcggactcctgccctcctcggcctccctggccccagcgcggctccaccctgggctgcgtctcctggtcacaggctgcgtttctcctttctgtccgtgggcagcccagtccccacagtcacggccaagccacgcagaacgaacatgactccagaggacctcgccctggagctgagcctggcgccgggtcaggacggagggaagggcgggttggggtccgcgggtcctcacaccgcacggcaggcacagaggctcgccaggccctgatccggtctgtggggacgagggacactgaggagaggtgctgggcaccaggacgctgcctcctggtccctggttggcctcagacaagcacggcctcgagaaaagagccaagcgcatcgggagcacaccagaaaccggccctgagcacgagaagagcctccgcccggcccgggcaccacccgacctcgcagggagcaggccctgtcaccgacgggtcacctcgcccacacggccagcaccgactcaccacagcccttcccagacctggctggagtggccggagcggcggggctcatggctcccatcttggcccctggaggtgagctcattcacagaagtggtcccttcactctgagagagaaaatcgtggcgtgcatcccaaaccctaggccacgcctgtgggtttcgtgaatgagatcgaggctgctgtggcaccctgcccgtcctggcctggagcaccctgggatcctggagggagaggccccacgcccccactctccctccacacttccagggttggtgcccacgagttagaggcacgccctcccccagcggccctcaggcttttctcagacatgcgggagccaggagagcacccttctccactcagctccaaagcgaatctttgaaaacacccactcggctcccatctctgtcacctagccaggaggggtagcaaaaataaagtcacgaggacatagtggtcaccactgtcagttacaacttgtctgtggaatccgtaattgcatctgtgtgccgcctccgaacacagaacattgtttggacggcagccccactgcacataacagacccgtgcatcttcctcagtcagtttctgaatattgtgaattcaggcaggtgtgtgttctcttctgcatgtttttatgcactgccaattagcttctactaaccacggttcaacagaaaataaatgtgtatttgtgaataacaaactgcacaacctgcaaaccaggagagagggacaggttctgtcaggggtgacaccaggacacagggacaggttctgtcgggggtgacaccaggacacagggacaggttctgtcatgggtgacacgaggacacagggacaggttctatcatgggtgacaccaggagagagggacaggttctgttgggggtgacaagaggagacagggacaggttctgtcgggggtgacaccaggagagagggacaggttctgtcaggggtgacaccaggagagagggacaggttctgttgggggtgacaccaggacacaggaataggttctgtcgggaggacagtgctgatcgtgtctcagcatcaggaaaggagaaaggcagagggagagcgctgagaagactgttcacgccagagtgcttatttatttttaatttactgctataggataagcaaccaggtagtgttcctaacaattagcgttaccaaaattaaagttcaaattatatgtttaaaatattgtagaagatatatatttatactggactacttttacaccttctaatatcctgtccaagtttgggcgcagatggtggagttgggctggcatcatgtcctgtggccgccccacttgcctgttggtgccactccatcccgggccccagggatgccagctcagggctgaccacagcagccctgcgtgggcatcacctcctaccccagcccccatcctgggctgctgcggccgcctgcttttgtgaatggtgttttgttggcacagggcctgtcctgtgttttcacacaggcctgtggctcctgctgtacaagtggagtggggaggagttgagatggagatgccttggccctggacacttacctgtccctctactggcccagctcatctcctcctgtgggcaatcacgcgtgcactggccaccctcccaccccacagcacacaccacgaggggatggcacagggggaagatgaggctggaccgtgatgttatcaataggctagaacgtccttcaaacactgaacctgcatctttcctcctcttactactgaacactttgtgagctctggtggtccagggtgcagcgtttgtccctgggcatgtgatggggagtcctgggcacatcgagatgctttacttctttctttcgacctcttaaaaaactaaaccaagccaaaccacaaaggaaatctgcacaacttaagagaaacttgaaagggatcgtgtaactactagtttgtactaagtttttttcaagaaagggaaacaaatttatatatatatatatatatatatatgtgcaatatatttttacactgtgtgattaacattagggagtactgagtgcatcactttatcagtgtgacgggtgatgtccacgtcatggctgttctgactctgaaagccacttctgctgatgtctaaaccgcactcaccgcggacgtccgcggggtggggtggccctgctgttcctcctgcaggtgagaggtgtggtgttgcctgttggacttgctgttgagcctggcttgcaaacctgtagtgaaacagctcgtgtctgtgtgcacactgctcctgtgtctgctgtcgttaacattgtgtgtcaagttggtaaagtgacaaataaaggtgttaaaacatgga

SEQ ID NO: 22106 - DNA, 4735 bp, Homo sapiens
  misc_feature 1..4735: note = ENST00000530705
  source 1..4735: mol_type = unassigned DNA; mol_type = unassigned DNA
ggaacggagccttgtgtctccgcctcaagtccccggatgctcacctccccgactcgcccccgctgtggccccgcccccgcgcggctcttcgtgccacgtcaccgcctgcgtcgcttccggaggcgcagcgggcgatgacgtagagggacgtgccctctatatgaggttggggagcggctgagtcggccttttccgcccgctcccccctccccccgagcgccgctccggctgcaccgcgctcgctccgagtttcaggctcgtgctaagctagcgccgtcgtcgtctcccttcagtcgccatcatgattatctaccgggacctcatcagccacgatgagatgttctccgacatctacaagatccgggagatcgcggacgggttgtgcctggaggtggaggggaagatggtcagtaggacagaaggtaacattgatgactcgctcattggtggaaatgcctccgctgaaggccccgagggcgaaggtaccgaaagcacagtaatcactggtgtcgatattgtcatgaaccatcacctgcaggaaacaagtttcacaaaagaagcctacaagaagtacatcaaagattacatgaaatcaatcaaagggaaacttgaagaacagagaccagaaagagtaaaaccttttatgacaggggctgcagaacaaatcaagcacatccttgctaatttcaaaaactaccagttctttattggtgaaaacatgaatccagatggcatggttgctctattggactaccgtgaggatggtgtgaccccatatatgattttctttaaggatggtttagaaatggaaaaatgttaacaaatgtggcaattattttggatctatcacctgtcatcataactggcttctgcttgtcatccacacaacaccaggacttaagacaaatgggactgatgtcatcttgagctcttcatttattttgactgtgatttatttggagtggaggcattgtttttaagaaaaacatgtcatgtaggttgtctaaaaataaaatgcatttaaactcatttgagagaatgccttttagtttaatgcatatttaaactaaattgatcctgtagtgttcctggagaagctagagcctgattgtaggctactactcatcaattaacttctacagtggagactacttctgggactggaatataaaaaagaatcaaaggttctgattttgagttgcaataaagggaaagaccatgctcatagcagtgccaacatctgaagtgtggagccttacccatttcatcacctacaacggaagtagttaactggaagagattaccaagagaataaaaagagactcattcagtggaagcaactttgtctcagcttatttcacataaagagagcgaagtcttttgggatgaatgttaattaaactccctggtaactagaacagggactggcaaactagcctatctgaccacctgttttgtacactttaaggtggttggttgcctttttaaatggttgaggggaaaagaataccttgtgggatatggaatttaagttcgagtccagttttattggaacgtggctatgcttattcatttatggattgactgtggctgttgtcagtgcatgagcagagttgtgtctaacagactagagcctgcaagtttgccagcccctgatttaaaagatgaaggtacacagaatgtgggctggctggtgggcaaaggggtaaaaatgttctctatattgtatctgaaaagatggggtgtctgaataagaaaatgcatctatttgacagacctggagcagttgctatctgctgctatggtttccaccacagatgcaagaagaacatgtccttgcgctttccgtctgtctaattgtggcagctgagattgaatagaggaatacaggaggaaaaaaagcgggaagagtttttgaggcaggtcggtcacccaggcttgtagtgcagtggcacaagcaactcactgcattctctgcatcctgtgctcaagccattttcccacctcagtctcactagttgctgggactgcaggcatgcacccctatgcccagctaatttttgtagagaccgagtatcgcttagttgcccagggtggtctcaactcctgggctcaaggagatctgcccacctcagcctcccaaagtgcaggcctagcctgggaggggaattttcaaaacgtgagttttgggaaatagtctatcagccttacctggttgattacacttgtaaaagaaagattaaaagcaggccagtgactctggtctgcttgaacatgtgaatgtagtggtttgagcaatctggagtttgccctagtgtcaaattccagactgtccatagtgtccaaaacctgaggcagatactaatgttaacccccagcaccccgtgattggaaacaaacctaaatacgtattgggaacttaatagcaattttaagcattctgatagattttttgtagggatggggtcatgccatgtggcccaggctggtctgaaaactctggcctcaagtgatctcaagctttggccttctaaagtgttgggattacaggtgtgaggcattgcacctggcttagcgttctgatttgacattgtaatgaaaagtgtgagtctcatctacagggccttttgtcctctgaaatgatagcaggaagggaattttcaggcagtggtcaaagctggggaaaccaggatagtgaagaaggccttgaggtgagagatggaagctaattggtgaactagccttggaagcctgaaacagacaagtagcaattcagagactttgtgggctccactgctccaacttgttttgaagattttcagttctgcagaagaggtatttccccagttgtcctttcagtgctcttagctgttttcccaacatccagatccaatcaaggctgggacatagcattttatcatgtctatttaagtcagaagtgatgaaccccagctgtttacctcatggtaaacctttgaagattccaggtagaatcttctcagactttgaagactgtctcattttatatctttttctcgttattcctagggtcaagacgttttgggcaagaataaggatgtgaacatcagaaagctcataacattttgtttttgatgctaagtttaacaaaggcatgctttagtagcctgtgggccctagggtttgttaaagtgtggagaacaactgagtggagcaagaggacttttctaggaaggtccttgtaatgtgacatttgaaaacaaatgaaggtgtggaagtaggccatgtggatatcaggacaaaccattccaggccaagacaacagcagttagtctggagtgtgatgtgttctgggaaaaaagtggccactttgctaacccaagaagacaggaagggttgtaaagcagtgggagtgtgcaaggaaggaagaccagacctcaaggaaaccacaggcgctctgagcagaagagttacatgatatgactcaaatttttaaaggatcactttggctgccaggtggcagggtaaaagcatagaataattgtgtataatgtgtttttaaggcaaagatagtggcttagtctagggtagtagactgaggtggtaggaaatgaagatagagacaacaggatatgctggtgggtgaggatggatttaatgttgatacaagtattttggtctgagcgtttggaagaaagttggcactgaggtgggaagtcgagtttagttttgttagttttggatgtgttaagtttgagatgctgattcttcagagaagtctaagctggagaactatatagagagtggaaagataacaatagacattgaaagccatgatacaggataaggtcatttggagagaggatagactgcattccaacatgagattggttgacaaagagaaaccaacaaaggtaattaagaggtgctcccactgcacttgtactcagaaggctgaggtaggattgttagaggccagcctgggcaccacagggagaccccatctctaaaatttagccaggaaccatggctcatgcctgtagccccaggaatttgggaggctgagtggggaggatcgcttgaggtcaggagtttgagaccagcctgggcaacatagggagacctaaaaaaattaattgggcatctgtagtcccagctactcaggcggctgagctgagaggatggcttgagtccgagagattgagggtgcagtgagctgtgatcataccactgcactccagcctgggcggcagtgagacactatctgaaaaaagtttaaaaattttaaaaaagaaggaactgcccctgaggtaagaaccaagggagggcctcccagaggtcaggtggaaaaagttttaggaaggaggaagtagtcaacagggttacctgttgcaaagtacttaagtaatatgaggcctgatagtggtaaacttgactaccgttggatttcactagtgggaaaggaagtctaattaaaatgcactcaagagactaacagtcgcaggcatgaaatacaatacaggtacatggttttttattatgtgtgcatctgcttcagtaataggtgtgaattactcatttggatcattaggagtttcaaaatctagttaaatgactagatttttgttgatgtaaattctgtcattctgaactgcagggattgtcagtaacttaactgcaaactaaactggtgataattatggtaaaattgcaagacgagcaataaatctcaaccaacttgagagaacactgataa

SEQ ID NO: 22107 - DNA, 1101 bp, Homo sapiens
  misc_feature 1..1101: note = ENST00000379056
  source 1..1101: mol_type = unassigned DNA; mol_type = unassigned DNA
atatgaggttggggagcggctgagtcggccttttccgcccgctcccccctccccccgagcgccgctccggctgcaccgcgctcgctccgagtttcaggctcgtgctaagctagcgccgtcgtcgtctcccttcagtcgccatcatgattatctaccgggacctcatcagccatggtcagtaggacagaaggtaacattgatgactcgctcattggtggaaatgcctccgctgaaggccccgagggcgaaggtaccgaaagcacagtaatcactggtgtcgatattgtcatgaaccatcacctgcaggaaacaagtttcacaaaagaagcctacaagaagtacatcaaagattacatgaaatcaatcaaagggaaacttgaagaacagagaccagaaagagtaaaaccttttatgacaggggctgcagaacaaatcaagcacatccttgctaatttcaaaaactaccagttctttattggtgaaaacatgaatccagatggcatggttgctctattggactaccgtgaggatggtgtgaccccatatatgattttctttaaggatggtttagaaatggaaaaatgttaacaaatgtggcaattattttggatctatcacctgtcatcataactggcttctgcttgtcatccacacaacaccaggacttaagacaaatgggactgatgtcatcttgagctcttcatttattttgactgtgatttatttggagtggaggcattgtttttaagaaaaacatgtcatgtaggttgtctaaaaataaaatgcatttaaactcatttgagagaatgccttttagtttaatgcatatttaaactaaattgatcctgtagtgttcctggagaagctagagcctgattgtaggctactactcatcaattaacttctacagtggagactacttctgggactggaatataaaaaagaatcaaaggttctgattttgagttgcaataaagggaaagaccatgctcatagcagtgccaacatctgaagtgtggagccttacccatttcatcacctacaacggaagtagttaactggaagagattaccaagagaataaaaagagactcattcagtg

SEQ ID NO: 22108 - DNA, 731 bp, Homo sapiens
  misc_feature 1..731: note = ENST00000528619
  source 1..731: mol_type = unassigned DNA; mol_type = unassigned DNA
aatcaagcacatccttgctaatttcaaaaactaccagttctttattggtgaaaacatgaatccagatggcatggttgctctattggactaccgtgaggatggtgtgaccccatatatgattttctttaaggatggtttagaaatggaaaaatgtgatgcaaaagaaagaaatccctgcgctttctgtctgtctttgtggcggcccagattgaattggggaatacatctttagcctggaaattaacaaatgtggcaattattttggatctatcacctgtcatcataactggcttctgcttgtcatccacacaacaccaggacttaagacaaatgggactgatgtcatcttgagctcttcatttattttgactgtgatttatttggagtggaggcattgtttttaagaaaaacatgtcatgtaggttgtctaaaaataaaatgcatttaaactcatttgagagaatgccttttagtttaatgcatatttaaactaaattgatcctgtagtgttcctggagaagctagagcctgattgtaggctactactcatcaattaacttctacagtggagactacttctgggactggaatataaaaaagaatcaaaggttctgattttgagttgcaataaagggaaagaccatgctcatagcagtgccaacatctgaagtgtggagccttacccatttcatcacctacaacggaagtagttaactggaagagattaccaa

SEQ ID NO: 22109 - DNA, 801 bp, Homo sapiens
  misc_feature 1..801: note = ENST00000529421
  source 1..801: mol_type = unassigned DNA; mol_type = unassigned DNA
aactttttaatgaccccattttttgttccggccaacagacaactcttttaaatggtcagtaggacagaaggtaacattgatgactcgctcattggtggaaatgcctccgctgaaggccccgagggcgaaggtaccgaaagcacagtaatcactggtgtcgatattgtcatgaaccatcacctgcaggaaacaagtttcacaaaagaagcctacaagaagtacatcaaagattacatgaaatcaatcaaagggaaacttgaagaacagagaccagaaagagtaaaaccttttatgacaggggctgcagaacaaatcaagcacatccttgctaatttcaaaaactaccagttctttattggtgaaaacatgaatccagatggcatggttgctctattggactaccgtgaggatggtgtgaccccatatatgattttctttaaggatggtttagaaatggaaaaatgttaacaaatgtggcaattattttggatctatcacctgtcatcataactggcttctgcttgtcatccacacaacaccaggacttaagacaaatgggactgatgtcatcttgagctcttcatttattttgactgtgatttatttggagtggaggcattgtttttaagaaaaacatgtcatgtaggttgtctaaaaataaaatgcatttaaactcatttgagagaatgccttttagtttaatgcatatttaaactaaattgatcctgtagtgttcctggagaagctagagcctgattgtaggctactactcatcaattaacttctacagtggagactact

SEQ ID NO: 22110 - DNA, 794 bp, Homo sapiens
  misc_feature 1..794: note = ENST00000484604
  source 1..794: mol_type = unassigned DNA; mol_type = unassigned DNA
cttttctataatatgagcatactgaagcctgcagtctgtttccgtttagaattagaatagtattttgaaaatagtcaacaagaaatgtaaacattcttgaaagataccttctgtgaactagtaatttcttaacagctggttgcctttttcagtgttttctttttttaagcttggatattttttactttaaaaattgattttactgaaaattcaatacttcaacctgttaatgaaatgttgttttagaatcaaagggaaacttgaagaacagagaccagaaagagtaaaaccttttatgacaggggctgcagaacaaatcaagcacatccttgctaatttcaaaaactaccagttctttattggtgaaaacatgaatccagatggcatggttgctctattggactaccgtgaggatggtgtgaccccatatatgattttctttaaggatggtttagaaatggaaaaatgttaacaaatgtggcaattattttggatctatcacctgtcatcataactggcttctgcttgtcatccacacaacaccaggacttaagacaaatgggactgatgtcatcttgagctcttcatttattttgactgtgatttatttggagtggaggcattgtttttaagaaaaacatgtcatgtaggttgtctaaaaataaaatgcatttaaactcatttgagagaatgccttttagtttaatgcatatttaaactaaattgatcctgtagtgttcctggagaagctagagcctgattgtaggctactactcatcaattaacttctacag

SEQ ID NO: 22111 - DNA, 594 bp, Homo sapiens
  misc_feature 1..594: note = ENST00000533567
  source 1..594: mol_type = unassigned DNA; mol_type = unassigned DNA
gtgaactattggcgtggaaggtgctttggatgcgtttgtgtcttttgcaattatactgctttttcttaatgcagatggtcagtaggacagaaggtaacattgatgactcgctcattggtggaaatgcctccgctgaaggccccgagggcgaaggtaccgaaagcacagtaatcactggtgtcgatattgtcatgaaccatcacctgcaggaaacaagtttcacaaaagaagcctacaagaagtacatcaaagattacatgaaatcttctttattggtgaaaacatgaatccagatggcatggttgctctattggactaccgtgaggatggtgtgaccccatatatgattttctttaaggatggtttagaaatggaaaaatgttaacaaatgtggcaattattttggatctatcacctgtcatcataactggcttctgcttgtcatccacacaacaccaggacttaagacaaatgggactgatgtcatcttgagctcttcatttattttgactgtgatttatttggagtggaggcattgtttttaagaaaaacatgtcatgtaggttgtctaaaaataaaatgcatttaaactca

SEQ ID NO: 22112 - DNA, 1851 bp, Homo sapiens
  misc_feature 1..1851: note = ENST00000490277
  source 1..1851: mol_type = unassigned DNA; mol_type = unassigned DNA
agcgccgctccggctgcaccgcgctcgctccgagtttcaggctcgtgctaagctagcgccgtcgtcgtctcccttcagtcgccatcatgattatctaccgggacctcatcagccatggtcagtaggacagaaggtaacattgatgactcgctcattggtggaaatgcctccgctgaaggccccgagggcgaaggtaccgaaagcacagtaatcactggtgtcgatattgtcatgaaccatcacctgcaggaaacaagtttcacaaaagaagcctacaagaagtacatcaaagattacatgaaatcgtaagtgatactggcagtacctagctgatgtctagaatcttacaggatttaaagattggctaacttttgaggttctttcgcagtgggtatacttttgtgaaagtccttgcttttttattaatgagttcacggaaaagagtggttgcttttctataatatgagcatactgaagcctgcagtctgtttccgtttagaattagaatagtattttgaaaatagtcaacaagaaatgtaaacattcttgaaagataccttctgtgaactagtaatttcttaacagctggttgcctttttcagtgttttctttttttaagcttggatattttttactttaaaaattgattttactgaaaattcaatacttcaacctgttaatgaaatgttgttttagaatcaaagggaaacttgaagaacagagaccagaaagagtaaaaccttttatgacaggggctgcagaacaaatcaagcacatccttgctaatttcaaaaactaccaggtaaataccttaagtatctggatcaaaggattgtacaattttaactgcaagagcaaaaattaagttgattaatcttcaattctatactagtattccaggtgtagaaagtggctttcccagctcgcaggtgtttccaaatcttgtcttctgattgaaaatttgcttcccagatgacatttctcagtttttctttttgtgaattgcttaaccacctaagtgttctttcagttttttgcttacaattttaatgtgtctcattgctactggtcctccttctaatgtatctgagcttgttaattctacttttggaaaatgtcagtggctttccctttcctctaattttccagcttcatgcatcccctggccataagatacttccagactgtatgatatattctatcactgtcagccttatgttccctgtggttgactatataagcacgctttagggtttgggattgtatttaggattgagagtaaaggtttcctgaaagcctagtgttcctggattgctctgtacgttatttttctatttaggtcactattaaggtgccttaatccagtgaacagatgtctatgataagtgagcatcagagcttttgggtactgaagttttgatttttgtggtggtctaaaccttcccttgtactgtagtttgttttgaatggcatgtatttgtatgtaatagtctaattctaggtattttgtttgcttcccaagttctttattggtgaaaacatgaatccagatggcatggttgctctattggactaccgtgaggatggtgtgaccccatatatgattttctttaaggatggtttagaaatggaaaaatgttaacaaatgtggcaattattttggatctatcacctgtcatcataactggcttctgcttgtcatccacacaacaccaggacttaagacaaatgggactgatgtcatcttgagctcttcatttattttgactgtgatttatttggagtggaggcattgtttttaagaaaaacatgtcatgtaggttgtctaaaaataaaatgcatttaaactca

SEQ ID NO: 22113 - DNA, 530 bp, Homo sapiens
  misc_feature 1..530: note = ENST00000530245
  source 1..530: mol_type = unassigned DNA; mol_type = unassigned DNA
aatcaagcacatccttgctaatttcaaaaactaccagttctttattggtgaaaacatgaatccagatggcatggttgctctattggactaccgtgaggatggtgtgaccccatatatgattttctttaaggatggtttagaaatggaaaaatgtgatgcaaaagaaagaaatccctgcgctttctgtctgtctttgtggcggcccagattgaattggggaatacatctttagcctggaaatgtaggctgcatgttaatggtaatgtaacttttgcagtgtaatgtttgaaaaatattaatgtagtttttgcttttacagtaacaaatgtggcaattattttggatctatcacctgtcatcataactggcttctgcttgtcatccacacaacaccaggacttaagacaaatgggactgatgtcatcttgagctcttcatttattttgactgtgatttatttggagtggaggcattgtttttaagaaaaacatgtcatgtaggttgtctaaaaataaaatgcatttaaactc

SEQ ID NO: 22114 - DNA, 764 bp, Homo sapiens
  misc_feature 1..764: note = ENST00000379060
  source 1..764: mol_type = unassigned DNA; mol_type = unassigned DNA
gtttcaggctcgtgctaagctagcgccgtcgtcgtctcccttcagtcgccatcatgattatctaccgggacctcatcagccgtgaacgatgagatgttctccgacatctacaagatccgggagatcgcggacgggttgtgcctggaggtggaggggaagatggtcagtaggacagaaggtaacattgatgactcgctcattggtggaaatgcctccgctgaaggccccgagggcgaaggtaccgaaagcacagtaatcactggtgtcgatattgtcatgaaccatcacctgcaggaaacaagtttcacaaaagaagcctacaagaagtacatcaaagattacatgaaatcaatcaaagggaaacttgaagaacagagaccagaaagagtaaaaccttttatgacaggggctgcagaacaaatcaagcacatccttgctaatttcaaaaactaccagttctttattggtgaaaacatgaatccagatggcatggttgctctattggactaccgtgaggatggtgtgaccccatatatgattttctttaaggatggtttagaaatggaaaaatgttaacaaatgtggcaattattttggatctatcacctgtcatcataactggcttctgcttgtcatccacacaacaccaggacttaagacaaatgggactgatgtcatcttgagctcttcatttattttgactgtgatttatttggagtggaggcattgtttttaagaaaaacatgtcatgtaggttgtctaaa

SEQ ID NO: 22115 - DNA, 948 bp, Homo sapiens
  misc_feature 1..948: note = ENST00000379055
  source 1..948: mol_type = unassigned DNA; mol_type = unassigned DNA
ccgagcgccgctccggctgcaccgcgctcgctccgagtttcaggctcgtgctaagctagcgccgtcgtcgtctcccttcagtcgccatcatgattatctaccgggacctcatcagccgtgagtcctcactgcactatccttactgccgcacacgggggtctggggtgcgggtgggggcggggaaggcgcagccgtcgcgggcctaggggacgccggcggtcttagccgagcgcggaggggtcggtgcccggggctcgcgcccagctctggtgtgctacggaggggcagatcccgcgtgcggccgccggcgcgggaaatgcgggaaatggcggcgccaggcgcacggtgatgggcggctctgtgtatccggcagacgatgagatgttctccgacatctacaagatccgggagatcgcggacgggttgtgcctggaggtggaggggaagatggtcagtaggacagaaggtaacattgatgactcgctcattggtggaaatgcctccgctgaaggccccgagggcgaaggtaccgaaagcacagtaatcactggtgtcgatattgtcatgaaccatcacctgcaggaaacaagtttcacaaaagaagcctacaagaagtacatcaaagattacatgaaatcaatcaaagggaaacttgaagaacagagaccagaaagagtaaaaccttttatgacaggggctgcagaacaaatcaagcacatccttgctaatttcaaaaactaccagttctttattggtgaaaacatgaatccagatggcatggttgctctattggactaccgtgaggatggtgtgaccccatatatgattttctttaaggatggtttagaaatggaaaaatgttaacaaatgtggcaattattttggatctatcacctgtcatcataactggcttctgcttgtcatccacacaacaccaggacttaagac

SEQ ID NO: 22116 - DNA, 1008 bp, Homo sapiens
  misc_feature 1..1008: note = ENST00000309246
  source 1..1008: mol_type = unassigned DNA; mol_type = unassigned DNA
tcccttcagtcgccatcatgattatctaccgggacctcatcagccacgatgagatgttctccgacatctacaagatccgggagatcgcggacgggttgtgcctggaggtggaggggaagatggtcagtaggacagaaggtaacattgatgactcgctcattggtggaaatgcctccgctgaaggccccgagggcgaaggtaccgaaagcacagtaatcactggtgtcgatattgtcatgaaccatcacctgcaggaaacaagtttcacaaaagaagcctacaagaagtacatcaaagattacatgaaatcaatcaaagggaaacttgaagaacagagaccagaaagagtaaaaccttttatgacaggggctgcagaacaaatcaagcacatccttgctaatttcaaaaactaccagttctttattggtgaaaacatgaatccagatggcatggttgctctattggactaccgtgaggatggtgtgaccccatatatgattttctttaaggatggtttagaaatggaaaaatgtgtaagtacaaggaagtgggttaaaataaataatgtaaaaaagacattttagatgtgatttgcaattgttttgtgacactgagaatgagttttacagcgttctgaaacatggttttagttttctctttggggatcaagagaattgtgtttcatatgtaaaaaattcttagggtataaaaaggcttagaatcttatttgtggaaaacgttgagtgcagatggggcataataaagtacagtttaggctgggtgtggtggctcacacctgtaatttcagcacttgggacgccgaggtgggtgcatcacctgaggttgggagttcgagaccagcctggccaacatggcgaaaccctatctctgctaaaaatacaaaaattagccaggcatggcagcgggcacctgtaatcccagctaatcgagagcctgaggcaggaaaatcacttaaacctgggaggggggttgcagtgagcagagatc

SEQ ID NO: 22117 - DNA, 613 bp, Homo sapiens
  misc_feature 1..613: note = ENST00000527226
  source 1..613: mol_type = unassigned DNA; mol_type = unassigned DNA
ccgagcgccgctccggctgcaccgcgctcgctccgagtttcaggctcgtgctaagctagcgccgtcgtcgtctcccttcagtcgccatcatgattatctaccgggacctcatcagccgcgcacggtgatgggcggctctgtgtatccggcagacgatgagatgttctccgacatctacaagatccgggagatcgcggacgggttgtgcctggaggtggaggggaagatggtcagtaggacagaaggtaacattgatgactcgctcattggtggaaatgcctccgctgaaggccccgagggcgaaggtaccgaaagcacagtaatcactggtgtcgatattgtcatgaaccatcacctgcaggaaacaagtttcacaaaagaagcctacaagaagtacatcaaagattacatgaaatcaatcaaagggaaacttgaagaacagagaccagaaagagtaaaaccttttatgacaggggctgcagaacaaatcaagcacatccttgctaatttcaaaaactaccagttctttattggtgaaaacatgaatccagatggcatggttgctctattggactaccgtgaggatggtgtgaccccatatatgattttcttt

SEQ ID NO: 22118 - DNA, 902 bp, Homo sapiens
  misc_feature 1..902: note = ENST00000442760
  source 1..902: mol_type = unassigned DNA; mol_type = unassigned DNA
cttttccgcccgctcccccctccccccgagcgccgctccggctgcaccgcgctcgctccgagtttcaggctcgtgctaagctagcgccgtcgtcgtctcccttcagtcgccatcatgattatctaccgggacctcatcagccacgatgagatgttctccgacatctacaagatccgggagatcgcggacgggttgtgcctggaggtggaggggaaggtgagtcggtcgggcctgcgcgtgggggagtccgggccgagcgggctcgggtttcctccgctcccccgcctgaggttgtgcaatcctccccgccgcctcctggcggaggagacgctctttccgggcttgggtttttctagaaaactggaggcggagctgatcctggaaataggcccgccgcctcggcgcccatcctcctcccggggttgtccgggacatgatgcttccggcttaggagcctggagtcctttcgtgtttgtcctgtccccacttaccaaccggaggcatcacatgcccgcaactggaaacaactttttaatgaccccattttttgttccggccaacagacaactcttttaagttaggtcgttttgagaaatccacgggtcacaactttattcccaaaatggtgctttttttattttcagcaagaactaagaatacttcttatccgtgaactattggcgtggaaggtgctttggatgcgtttgtgtcttttgcaattatactgctttttcttaatgcagatggtcagtaggacagaaggtaacattgatgactcgctcattggtggaaatgcctccgctgaaggccccgagggcgaaggtaccgaaagcacagtaatcactggtgtcgatattgtcatgaaccatcacctgcaggaaacaagtttcacaaaagaagcc

SEQ ID NO: 22119 - DNA, 4814 bp, Homo sapiens
  misc_feature 1..4814: note = ENST00000616577
  source 1..4814: mol_type = unassigned DNA; mol_type = unassigned DNA
cttcgtgccacgtcaccgcctgcgtcgcttccggaggcgcagcgggcgatgacgtagagggacgtgccctctatatgaggttggggagcggctgagtcggccttttccgcccgctcccccctccccccgagcgccgctccggctgcaccgcgctcgctccgagtttcaggctcgtgctaagctagcgccgtcgtcgtctcccttcagtcgccatcatgattatctaccgggacctcatcagccacgatgagatgttctccgacatctacaagatccgggagatcgcggacgggttgtgcctggaggtggaggggaagatggtcagtaggacagaaggtaacattgatgactcgctcattggtggaaatgcctccgctgaaggccccgagggcgaaggtaccgaaagcacagtaatcactggtgtcgatattgtcatgaaccatcacctgcaggaaacaagtttcacaaaagaagcctacaagaagtacatcaaagattacatgaaatcaatcaaagggaaacttgaagaacagagaccagaaagagtaaaaccttttatgacaggggctgcagaacaaatcaagcacatccttgctaatttcaaaaactaccagttctttattggtgaaaacatgaatccagatggcatggttgctctattggactaccgtgaggatggtgtgaccccatatatgattttctttaaggatggtttagaaatggaaaaatgtgatgcaaaagaaagaaatccctgcgctttctgtctgtctttgtggcggcccagattgaattggggaatacatctttagcctggaaatgtaggctgcatgttaatggtaatgtaacttttgcagtgtaatgtttgaaaaatattaatgtagtttttgcttttacagtaacaaatgtggcaattattttggatctatcacctgtcatcataactggcttctgcttgtcatccacacaacaccaggacttaagacaaatgggactgatgtcatcttgagctcttcatttattttgactgtgatttatttggagtggaggcattgtttttaagaaaaacatgtcatgtaggttgtctaaaaataaaatgcatttaaactcatttgagagaatgccttttagtttaatgcatatttaaactaaattgatcctgtagtgttcctggagaagctagagcctgattgtaggctactactcatcaattaacttctacagtggagactacttctgggactggaatataaaaaagaatcaaaggttctgattttgagttgcaataaagggaaagaccatgctcatagcagtgccaacatctgaagtgtggagccttacccatttcatcacctacaacggaagtagttaactggaagagattaccaagagaataaaaagagactcattcagtggaagcaactttgtctcagcttatttcacataaagagagcgaagtcttttgggatgaatgttaattaaactccctggtaactagaacagggactggcaaactagcctatctgaccacctgttttgtacactttaaggtggttggttgcctttttaaatggttgaggggaaaagaataccttgtgggatatggaatttaagttcgagtccagttttattggaacgtggctatgcttattcatttatggattgactgtggctgttgtcagtgcatgagcagagttgtgtctaacagactagagcctgcaagtttgccagcccctgatttaaaagatgaaggtacacagaatgtgggctggctggtgggcaaaggggtaaaaatgttctctatattgtatctgaaaagatggggtgtctgaataagaaaatgcatctatttgacagacctggagcagttgctatctgctgctatggtttccaccacagatgcaagaagaacatgtccttgcgctttccgtctgtctaattgtggcagctgagattgaatagaggaatacaggaggaaaaaaagcgggaagagtttttgaggcaggtcggtcacccaggcttgtagtgcagtggcacaagcaactcactgcattctctgcatcctgtgctcaagccattttcccacctcagtctcactagttgctgggactgcaggcatgcacccctatgcccagctaatttttgtagagaccgagtatcgcttagttgcccagggtggtctcaactcctgggctcaaggagatctgcccacctcagcctcccaaagtgcaggcctagcctgggaggggaattttcaaaacgtgagttttgggaaatagtctatcagccttacctggttgattacacttgtaaaagaaagattaaaagcaggccagtgactctggtctgcttgaacatgtgaatgtagtggtttgagcaatctggagtttgccctagtgtcaaattccagactgtccatagtgtccaaaacctgaggcagatactaatgttaacccccagcaccccgtgattggaaacaaacctaaatacgtattgggaacttaatagcaattttaagcattctgatagattttttgtagggatggggtcatgccatgtggcccaggctggtctgaaaactctggcctcaagtgatctcaagctttggccttctaaagtgttgggattacaggtgtgaggcattgcacctggcttagcgttctgatttgacattgtaatgaaaagtgtgagtctcatctacagggccttttgtcctctgaaatgatagcaggaagggaattttcaggcagtggtcaaagctggggaaaccaggatagtgaagaaggccttgaggtgagagatggaagctaattggtgaactagccttggaagcctgaaacagacaagtagcaattcagagactttgtgggctccactgctccaacttgttttgaagattttcagttctgcagaagaggtatttccccagttgtcctttcagtgctcttagctgttttcccaacatccagatccaatcaaggctgggacatagcattttatcatgtctatttaagtcagaagtgatgaaccccagctgtttacctcatggtaaacctttgaagattccaggtagaatcttctcagactttgaagactgtctcattttatatctttttctcgttattcctagggtcaagacgttttgggcaagaataaggatgtgaacatcagaaagctcataacattttgtttttgatgctaagtttaacaaaggcatgctttagtagcctgtgggccctagggtttgttaaagtgtggagaacaactgagtggagcaagaggacttttctaggaaggtccttgtaatgtgacatttgaaaacaaatgaaggtgtggaagtaggccatgtggatatcaggacaaaccattccaggccaagacaacagcagttagtctggagtgtgatgtgttctgggaaaaaagtggccactttgctaacccaagaagacaggaagggttgtaaagcagtgggagtgtgcaaggaaggaagaccagacctcaaggaaaccacaggcgctctgagcagaagagttacatgatatgactcaaatttttaaaggatcactttggctgccaggtggcagggtaaaagcatagaataattgtgtataatgtgtttttaaggcaaagatagtggcttagtctagggtagtagactgaggtggtaggaaatgaagatagagacaacaggatatgctggtgggtgaggatggatttaatgttgatacaagtattttggtctgagcgtttggaagaaagttggcactgaggtgggaagtcgagtttagttttgttagttttggatgtgttaagtttgagatgctgattcttcagagaagtctaagctggagaactatatagagagtggaaagataacaatagacattgaaagccatgatacaggataaggtcatttggagagaggatagactgcattccaacatgagattggttgacaaagagaaaccaacaaaggtaattaagaggtgctcccactgcacttgtactcagaaggctgaggtaggattgttagaggccagcctgggcaccacagggagaccccatctctaaaatttagccaggaaccatggctcatgcctgtagccccaggaatttgggaggctgagtggggaggatcgcttgaggtcaggagtttgagaccagcctgggcaacatagggagacctaaaaaaattaattgggcatctgtagtcccagctactcaggcggctgagctgagaggatggcttgagtccgagagattgagggtgcagtgagctgtgatcataccactgcactccagcctgggcggcagtgagacactatctgaaaaaagtttaaaaattttaaaaaagaaggaactgcccctgaggtaagaaccaagggagggcctcccagaggtcaggtggaaaaagttttaggaaggaggaagtagtcaacagggttacctgttgcaaagtacttaagtaatatgaggcctgatagtggtaaacttgactaccgttggatttcactagtgggaaaggaagtctaattaaaatgcactcaagagactaacagtcgcaggcatgaaatacaatacaggtacatggttttttattatgtgtgcatctgcttcagtaataggtgtgaattactcatttggatcattaggagtttcaaaatctagttaaatgactagatttttgttgatgtaaattctgtcattctgaactgcagggattgtcagtaacttaactgcaaactaaactggtgataattatggtaaaattgcaagacgagcaataaatctcaaccaacttgagagaacactgataa

SEQ ID NO: 22120 - DNA, 2952 bp, Homo sapiens
  misc_feature 1..2952: note = ENST00000453386
  source 1..2952: mol_type = unassigned DNA; mol_type = unassigned DNA
gtgcgggacgcgctgcagctggagaggaaaggcagagcgaggaggggcgaggccaagaaagcgcgcgtttctgggaggggaggagcctggctaaggagcgccgcgtcacatccggtagagttagagcccgtgcggaggcggtgcggagcatttcggctctgagcggctgggcgaccggcgcgtcgtgcggggctgcggcggagcctccttaaggaaggtgcaagaggttggcagcttcgattgaagcacatcgaccggcgacagcagccaggagtcatgagcgacagcggcgagcagaactacggcgagcgggaatcccgttctgcttccagaagtggaagtgctcacggatcggggaaatctgcaaggcatacccctgcaaggtctcgctccaaggaagattccaggcgttccagatcaaagtccaggtcccgatctgaatctaggtctagatccagaagaagctcccgaaggcattatacccggtcacggtctcgctcccgctcccatagacgatcacgtagcaggtcttacagtcgagattatcgtagacggcacagccacagccattctcccatgtctactcgcaggcgtcatgttgggaatcgggcaaatcctgatcctaactgttgtcttggagtatttgggctgagcttgtacaccacagaaagagatctaagagaagtgttctctaaatatggtcccattgccgatgtgtctattgtatatgaccagcagtctaggcgttcaagaggatttgcctttgtatattttgaaaatgtagatgatgccaaggaagctaaagaacgtgccaatggaatggagcttgatgggcgtaggatcagagttgatttctctataacaaaaagaccacatacgccaacaccaggaatttacatggggagacctacctatggcagctctcgccgtcgggattactatgacagaggatatgatcggggctatgatgatcgggactactatagcagatcatacagaggaggaggtggaggaggaggaggatggagagctgcccaagacagggatcagatttatagaaggcggtcaccttctccttactatagtcgtggaggatacagatcacgttccagatctcgatcatactcacctcgtcgctattaaagcatgaagactttctgaaacctgccctagagctgggatattgtttgtgggcaatattttttattgtctcttgtttaaaaagtgaacagtgcctagtgaagttaggtgacttttacaccttttacgatgactacttttggtggagttgaaatgctgttttcattctgcatttgtgtagtttggtgctttgttccaagttaagtgttttcagaaaagtatgttttgcatgtatttttttacagtctaaattttgactgctgagaagtttctattgtacaaaacttcatttaaaaggtttttctactgaatccagggtattctgaagatcgaagcctgtgtaaaatgctaccaaatggcaaaaagcaacaataaacagtttgatttttacttttctttctaacatatcaatgcttagcagaactattcagattgtcagtagtaaatttaaagacaaatgcccgttttcctccagtccatgaaacataccatacttatatacctgcaactaagtgtttaaaattatgctctgtaactctgtactgctagtattagaactaaaaatcttaaaatacagccagtgcttaatgcttatatcaatgtggatttgtcggcttttatgtaatctgtaatatgtatagcaggaaatacgaagagttacacagtgtatgccttaaaaggctgtttcttaaaggtgttacaaggggataatggtatttcaactagttatcagcaagtgacaatacattccaccacaaatacactcttgttcttctagcttttagactatatgaaaaaaccgggtgcttcaaagtacatgataagggaacactatacctgtcatggatgaactgaagactttgcctgttcattttttaaatattattttcaggtcctttgcttaccaaaggaggcccaatttcactcaaatgttttgagaactgtgtttaaataaacgcaaatgaaaagaaaaatgttggtgcagctgttcacaaagaagtgttcttgttctattataattagagttcttctgtagtttaatcgttagggcagtgtgttccttgggctgaggtgtatctttgctattttgggctgggttgagggggggatgaatttctgtattcctggaaaattcagagtgcataactaggtattagagtgatctccatttggggatggagttacagtaaataactagactgcgggtactttaatacatgttcttattattttgcatttaagtaattttcatgaccaattgtagggatgttgctacaggtgggttattttgttgccttgctaacctttatcgcatctaggtattagtatgtttcaggtactttgggaagaactttacatataatctttagcaatgaaatgatgtagagtaacttaccttagttcaaatagctgtttaagtggcaatgccacgatctgaattgaacctaggtgatcttagtccacagttctcttgatcatgatgtctcaaatctgggtacctgggtgatggaaaataccagtaatggagcataggcagtattggcaggtcttaatttgtaaaacttactgtccagggtgttttcagtgtttgccaacttgtggtaaattaatatgcttagagaactacccttaggtttgtttctgataagcatgtggaaacaacttagtatatgcctgatgggttatttcaaattgttctcaatgagttttgaaacaagaatttgtagtatttatatataaagttgagttttagggtgtggtcccagagggggttgtgttatggatggatacattaaaggctgagaaacctgg

SEQ ID NO: 22121 - DNA, 4141 bp, Homo sapiens
  misc_feature 1..4141: note = ENST00000492417
  source 1..4141: mol_type = unassigned DNA; mol_type = unassigned DNA
attgcttacaaaatatatctgcatagtccgttagttttggaggctgagtgaaaactcctgtgatttcagaaatattgtatctgtgatctgctagattttaaggagaaaacttcattaagtcttattttctaggttaggagtactgtctcttccctcagtggacaggctgccgaagcatcttagcttagaataaaggtttttctgttaaagccaggagcttaaagaggatcttgacttgacccattcttcctttatactcagattcctgggctgactgatttctgttaactacagttactttattggtagtcttaactgttactgtgaaacacccatattctgctttcacttctggagaaaattgtttcatttccatagaggtaatctttctagtgttggagtaaacaggcttttagcaacttttgggttccccatttctatattctcacctatgttaatttttgcctgtggtaaaaatagcaaaaactacaccctcatttttgagacttcctcctttgtccatggagagaagggaagtgtccgttcagaatacttgatagggaattccaagggattgttgttaattggaagccccagagcatcactacatcctttaaccatttcttgatgttaaaggcagctgttcatatatttttcttttaatctttttacagtcagtcatggagggaggtagaggggaaaggctgtcacatttcatgtcaccccaccatgttttataatggctttgaagtcatttgaacgtttctagagtcgtctggggcctagagacctgaactcattttactggatgagttagcctttccttctgtgttaaacctcaaaccttaatttgtctattctgtgttacattataaatgttttccctgagcatcaaaggatcatccaaattttctccattatgttgtaaaccacaaaactatcttctaaagtgttttgagctgtaatttagaataatcctctactgtcctttcaagaatgtccagaatactctgaagatgtatcacacaaggaaatctcttgtgattttatctgaaagcttcacctttgattcatgccatatagtgacttactgtaatactgcttccttttgagtcttgccatttctgctctctggagtagaaaggcttaccaggctttactttgtctaagtttgataacctaaaataaaggttgccttgataattttacctagctatcagactgactaggagtaggttctgtcctttcctcatctactgttttggtgccttggcagaacttttccttggtttcattacttagtatacccttttgttgattatgtgtctttagctcgttggtgacctagttatcctggttaccattcctttgctatttttcattacaaatccccccttaacctgccagccaatcccagttttggttgggaaagctatgagtacacaatgtttacctaaactttggcttttgtatgtagtttctgtactcttttgcttcctgggccctaggttaggagctcctgatttagctgcctggttttgatgtgtacttaagtaactaggtaagttaggttaattcctggttttccataagtttgccctggctcatctccatttagctggagaagctgtggaggatctctgacaccctctctactcttatttgtgtgtagttcgctgttctgttgtagctccatctggttgctttcagttttttagggggcctcccaccatggttagatgcaatagggttttacagggtttagtgtccttcaagctagcctttgctttccactaggtttctgcttttctctaggatttgaaactgagatcatcatctttatctcttatcactgaattataagtagtaacttgaaaggtcaaggtctttttaaaaatcaagcatttttttaagtaaattatataaattatataggattttgttttattgattgcaacttgattgaaataggtataaagtataggtgtcatagttaataaggttccgcctcaccctagtctttatggagtaacattctgaaacacagtccttggacagttcccttaactgcttgactttggcacccctttctgaaggaagtggggtcaaataactcttatccctgctccaaaaaggtggaagaaaggacaagttaattgacttatgtcatttggagcaatgaaactattaacaccaggtatattcagttcctgcccttacctatattttcttatcttggaaggggattgctgtccctcaccatttatctcacagcagcttatttgtttttaaagttgcccagaaagtgtgcaaattaaacttttaacatctacgtgtaggaatcccgttctgcttccagaagtggaagtgctcacggatcggggaaatctgcaaggcatacccctgcaaggtctcgctccaaggaagattccaggcgttccagatcaaagtccaggtcccgatctgaatctaggtctagatccagaagaagctcccgaaggcattatacccggtcacggtctcgctcccgctcccatagacgatcacgtagcaggtcttacagtcgagattatcgtagacggcacagccacagccattctcccatgtctactcgcaggcgtcatgttgggaatcgggcaaatcctgatcctaactgttgtcttggagtatttgggctgagcttgtacaccacagaaagagatctaagagaagtgttctctaaatatggtcccattgccgatgtgtctattgtatatgaccagcagtctaggcgttcaagaggatttgcctttgtatattttgaaaatgtagatgatgccaaggaagctaaagaacgtgccaatggaatggagcttgatgggcgtaggatcagagttgatttctctataacaaaaagaccacatacgccaacaccaggaatttacatggggagacctacctatggcagctctcgccgtcgggattactatgacagaggatatgatcggggctatgatgatcgggactactatagcagatcatacagaggaggaggtggaggaggaggaggatggagagctgcccaagacagggatcagatttatagaaggcggtcaccttctccttactatagtcgtggaggatacagatcacgttccagatctcgatcatactcacctcgtcgctattaaagcatgaagactttctgaaacctgccctagagctgggatattgtttgtgggcaatattttttattgtctcttgtttaaaaagtgaacagtgcctagtgaagttaggtgacttttacaccttttacgatgactacttttggtggagttgaaatgctgttttcattctgcatttgtgtagtttggtgctttgttccaagttaagtgttttcagaaaagtatgttttgcatgtatttttttacagtctaaattttgactgctgagaagtttctattgtacaaaacttcatttaaaaggtttttctactgaatccagggtattctgaagatcgaagcctgtgtaaaatgctaccaaatggcaaaaagcaacaataaacagtttgatttttacttttctttctaacatatcaatgcttagcagaactattcagattgtcagtagtaaatttaaagacaaatgcccgttttcctccagtccatgaaacataccatacttatatacctgcaactaagtgtttaaaattatgctctgtaactctgtactgctagtattagaactaaaaatcttaaaatacagccagtgcttaatgcttatatcaatgtggatttgtcggcttttatgtaatctgtaatatgtatagcaggaaatacgaagagttacacagtgtatgccttaaaaggctgtttcttaaaggtgttacaaggggataatggtatttcaactagttatcagcaagtgacaatacattccaccacaaatacactcttgttcttctagcttttagactatatgaaaaaaccgggtgcttcaaagtacatgataagggaacactatacctgtcatggatgaactgaagactttgcctgttcattttttaaatattattttcaggtcctttgcttaccaaaggaggcccaatttcactcaaatgttttgagaactgtgtttaaataaacgcaaatgaaaagaaaaa

SEQ ID NO: 22122 - DNA, 2780 bp, Homo sapiens
  misc_feature 1..2780: note = ENST00000463328
  source 1..2780: mol_type = unassigned DNA; mol_type = unassigned DNA
aatactgacacaatggtgtaactccttagcccatcaaaaaaaaaaacttccgactgcattactatactgtagtatagtattagtacattagttcaaaatatagttctatgctaacattaactctttccaggctgcataaacctagttagatgctctcctgactttcccatttaatttgaagctaatttcttttgggtgttgttaaggcattttttacatttcatgaaaggcttcaaatgagatgatatttattgtgatttcactgtataatccaagtggtttaggaggagggtgcagggggggacttaatgtttttagagtagagtagaatttttccctagtaaattgttagtttatgaaataaatggaatctttaggtaaattcatcacagcatctggaatgttagcaacatatggctcactctttattctttcctcttgtcatctttttttgagacagggcctcactctgtcgcccagtctggagtgcagtggtgcaatctcagcttactgcagcttctaccttgcaggcttaagcgatccgcccacctcagcctcctgagtagctaggactagaggcatgccaccacacccagtaatttgttatatttttgtagagacatggggtctcactgtgttgcccaggctagtctcaaaactcctgagcttcaagcagtccaccagccttggcctcccagagtgtttggattacaagcatgagccactgcgcctggccaactcttgtttcttacgattgcaagctgtttatgacctgtaaaatggtttggtacgcatcccctcaggcttcgtttatgtacttacttgtgtattgtgtttctgaaaaaatcgaaccatacatgctcatctttttggcaattcagagcattctattgaatggaaggtgtgtcaacattacaattttttctagctgatagacacagtgtggttccagttatccttgtatgtcatgttatgaatatgtgaatttttcttagaataaattcatagaaggaaagatgccaagttgcttttcgccagcacgagtgcttgtttacctacttaattctaaggttgaaattttttcttttgcattctttcctacccattcccaaaaatacttgtagtacttgctgtaattttgtaatttctaagcagtgtttggtctaatcattatgtacttttcttgttagtgacattttggctagtatacagctccctttttaaacaactttgattttatgacaacttttccaaagtttaaaacttttttttttccctaggcaaatcctgatcctaactgttgtcttggagtatttgggctgagcttgtacaccacagaaagagatctaagagaagtgttctctaaatatggtcccattgccgatgtgtctattgtatatgaccagcagtctaggcgttcaagaggatttgcctttgtatattttgaaaatgtagatgatgccaaggaagctaaagaacgtgccaatggaatggagcttgatgggcgtaggatcagagttgatttctctataacaaaaagaccacatacgccaacaccaggaatttacatggggagacctacctatggcagctctcgccgtcgggattactatgacagaggatatgatcggggctatgatgatcgggactactatagcagatcatacagaggaggaggtggaggaggaggaggatggagagctgcccaagacagggatcagatttatagaaggcggtcaccttctccttactatagtcgtggaggatacagatcacgttccagatctcgatcatactcacctcgtcgctattaaagcatgaagactttctgaaacctgccctagagctgggatattgtttgtgggcaatattttttattgtctcttgtttaaaaagtgaacagtgcctagtgaagttaggtgacttttacaccttttacgatgactacttttggtggagttgaaatgctgttttcattctgcatttgtgtagtttggtgctttgttccaagttaagtgttttcagaaaagtatgttttgcatgtatttttttacagtctaaattttgactgctgagaagtttctattgtacaaaacttcatttaaaaggtttttctactgaatccagggtattctgaagatcgaagcctgtgtaaaatgctaccaaatggcaaaaagcaacaataaacagtttgatttttacttttctttctaacatatcaatgcttagcagaactattcagattgtcagtagtaaatttaaagacaaatgcccgttttcctccagtccatgaaacataccatacttatatacctgcaactaagtgtttaaaattatgctctgtaactctgtactgctagtattagaactaaaaatcttaaaatacagccagtgcttaatgcttatatcaatgtggatttgtcggcttttatgtaatctgtaatatgtatagcaggaaatacgaagagttacacagtgtatgccttaaaaggctgtttcttaaaggtgttacaaggggataatggtatttcaactagttatcagcaagtgacaatacattccaccacaaatacactcttgttcttctagcttttagactatatgaaaaaaccgggtgcttcaaagtacatgataagggaacactatacctgtcatggatgaactgaagactttgcctgttcattttttaaatattattttcaggtcctttgcttaccaaaggaggcccaatttcactcaaatgttttgagaactgtgtttaaataaacgcaaatgaaaag

SEQ ID NO: 22123 - DNA, 943 bp, Homo sapiens
  misc_feature 1..943: note = ENST00000259043
  source 1..943: mol_type = unassigned DNA; mol_type = unassigned DNA
gtcccattgccgatgtgtctattgtatatgaccagcagtctaggcgttcaagaggatttgcctttgtatattttgaaaatgtagatgatgccaaggaagctaaagaacgtgccaatggaatggagcttgatgggcgtaggatcagagttgatttctctataacaaaaagaccacatacgccaacaccaggaatttacatggggagacctacctatggcagctctcgccgtcgggattactatgacagaggatatgatcggggctatgatgatcgggactactatagcagatcatacagaaggcggtcaccttctccttactatagtcgtggaggatacagatcacgttccagatctcgatcatactcacctcgtcgctattaaagcatgaagactttctgaaacctgccctagagctgggatattgtttgtgggcaatattttttattgtctcttgtttaaaaagtgaacagtgcctagtgaagttaggtgacttttacaccttttacgatgactacttttggtggagttgaaatgctgttttcattctgcatttgtgtagtttggtgctttgttccaagttaagtgttttcagaaaagtatgttttgcatgtatttttttacagtctaaattttgactgctgagaagtttctattgtacaaaacttcatttaaaaggtttttctactgaatccagggtattctgaagatcgaagcctgtgtaaaatgctaccaaatggcaaaaagcaacaataaacagtttgatttttacttttctttctaacatatcaatgcttagcagaactattcagattgtcagtagtaaatttaaagacaaatgcccgttttcctccagtccatgaaacataccatacttatatacctgcaactaagtgtttaaaattatgctctgtaactctgtactgctagtattagaactaaaa

SEQ ID NO: 22124 - DNA, 710 bp, Homo sapiens
  misc_feature 1..710: note = ENST00000414862
  source 1..710: mol_type = unassigned DNA; mol_type = unassigned DNA
gaatggagcttgatgggcgtaggatcagagttgatttctctataacaaaaagaccacatacgccaacaccaggaatttacatggggagacctacctatggcagctctcgccgtcgggattactatgacagaggatatgatcggggctatgatgatcgggactactatagcagatcatacagaggaggaggtggaggaggaggaggatggagagctgcccaagacagggatcagatttataggcggtcaccttctccttactatagtcgtggaggatacagatcacgttccagatctcgatcatactcacctcgtcgctattaaagcatgaagactttctgaaacctgccctagagctgggatattgtttgtgggcaatattttttattgtctcttgtttaaaaagtgaacagtgcctagtgaagttaggtgacttttacaccttttacgatgactacttttggtggagttgaaatgctgttttcattctgcatttgtgtagtttggtgctttgttccaagttaagtgttttcagaaaagtatgttttgcatgtatttttttacagtctaaattttgactgctgagaagtttctattgtacaaaacttcatttaaaaggtttttctactgaatccagggtattctgaagatcgaagcctgtgtaaaatgctaccaaatggcaaaaagcaacaataaacagtttgattttta

SEQ ID NO: 22125 - DNA, 2414 bp, Homo sapiens
  misc_feature 1..2414: note = ENST00000466832
  source 1..2414: mol_type = unassigned DNA; mol_type = unassigned DNA
atgatgccaaggaagtaagtaaaagcccgttcctttgtaaaccatcagttctattgttaacgccaagttatcagtgaccaattgctaggataaggacaaggacaagtcagtaatacttcgaactttttctccaacctcttgtggagactcaagatacatgcagaataacaaaattttgtataacttggggaagttggtcctaccacctgctttattagttgccacctattggggtcaactataccccaattccgccaggatatgtagtcagtgtttacactgggttcacattctagagtcaaaaataaccaaaagcaaagttatgatgcagaaggaaaacattgttccttttttggctagtgaatgatgtcatatttggattttgatttgttttgaggcagaatatagagtcaagatttgaaatgtggggctagaccccatttaagaaattcagattttaggtacattaaggatggtagctaaagtcatctccaagtatagagaagaggaagaactgagaaacacttaatgacaaacggagtttcactcttcttgcctgggctggagtgcaatggcgcgatctccggctcaccgcaacctccgcctcctgggttcaagcaattctcctgcctcagcctcctgagcaggtgggattacaggctaccacacccagctaattttgtatttttagtagagacggggtttctccatgttgggtcagggtggtctcgaactcccaacctcaggtgatctgcccccctcggcctcccaaagtgctgggggattacaggtgtgagccaccatgcgcggccgcccatttcctaattaaatttttgcagtaggatcatagctctcggaaaatagcataaattttatcttaatctctagtgccagaaactgcctgggcgtaaacactagcttgaacatctgaactagaagatagcatagtattggaattagaaacttaaattctatttaggtgaaaggatgtttcctcaaattatgaacaaactttaatgtgtttgaaacggggtatttttattttttaaatgtatgctgttaatacatactttgggaaaaggaactatatgtacttaaggctgtgcttcagtcttagcttttggcttccagagaagggctaagaaaacttccaagggttaaataatgtgttcaggtttcagtcataggatctcagtcgcaactatttaactctgttgttttaacccaacagcagccagatgaatgagttggggccctattccaataaaagattattttggggcattggaatttggattttgtgtgtttcttcacttgtcatgaaatactgtttttccccctagttatttaaatttttagcttatgggttatacagaaacagccagctggccagatttgacctacaggctatagtttgccaattgtgtgctgctttggagctggaaatactgtcaggatcatagttaggtaaaataattgtttcaagtttttatgagtagcttttacaaatgaacatttagtagagggaacaacacatttgtaagttgtagaccttacgttctggctaacattaagataacttaatgcacctaactgaaatgtccagtgggatcttactcatagccacaggataattagtggctttgttcaggatgtatgtaacaatttatttaccttttgaaggctaaagaacgtgccaatggaatggagcttgatgggcgtaggatcagagttgatttctctataacaaaaagaccacatacgccaacaccaggaatttacatggggagacctacctatggcagctctcgccgtcgggattactatgacagaggatatgatcggggctatgatgatcgggactactatagcagatcatacagaggaggaggtggaggaggaggaggatggagagctgcccaagacagggatcagatttatagaaggcggtcaccttctccttactatagtcgtggaggatacagatcacgttccagatctcgatcatactcacctcgtcgctattaaagcatgaagactttctgaaacctgccctagagctgggatattgtttgtgggcaatattttttattgtctcttgtttaaaaagtgaacagtgcctagtgaagttaggtgacttttacaccttttacgatgactacttttggtggagttgaaatgctgttttcattctgcatttgtgtagtttggtgctttgttccaagttaagtgttttcagaaaagtatgttttgcatgtatttttttacagtctaaattttgactgctgagaagtttctattgtacaaaacttcatttaaaaggtttttctactgaatccagggtattctgaagatcgaagcctgtgtaaaatgctaccaaatggcaaaaagcaacaataaacagtttgattttt

SEQ ID NO: 22126 - DNA, 4485 bp, Homo sapiens
  misc_feature 1..4485: note = ENST00000487615
  source 1..4485: mol_type = unassigned DNA; mol_type = unassigned DNA
agaagccgcgcggcaacgcggacccgacccgcagcgggccgcgcttcgtaaggccgcgtggtggggtgcaaggggacagacgacgttcttttgggtctttgggccggtgtttaggttaacgaaggaccgtctttgcctccacggaaaggacggagtctgggatgtctttggggcctcttaagatggaaactaatccaaggccgactaagttctgggcccgttaggtggaggggattgcgtgagggctttgtgtttggcctaaatgaagcgcttttctctgatgccgaaagggcttcccaggcaaaaatctgtatcagtattctattaggacagaccacaaagtcgttaagatgattttgtggacatcgcatttccacgggattgtgaaggagaaattggcgggcaaccatttacggcgccgttatttcctttgttttgaggcgttctaatacttagaaccacagcgtgtgttggctacagttttctttcccttaagtttccacctcttaaaggtgttcagtgagggttgattgaattgcgggaacaagacagttctagggtttaaacagcatacgtagctggtctgtggggctctgggtattggattcggaaagcattgaatgatgcgaacatacgaggcttgctagaattaagaggaatctgttagaagggtgatagaaaagcaccatagaaattgatttttgaggctgtgggaataatttgtgcttttttaaaaaaaaaaaacaatttgttacctaagtttccccttgttggtaaagctaccttaagatctgaatatgatttatcaggtaaataagactattaaatgtcttagcaaacttttgattaagattttatatgattcctcagagtattttaggaagaaattttcagtgatgaagcgtgagtttcctgcgtaattttggagcccaaactgcttaatttggtttgaactaatcaagccttgcgtttacatactcggatgagcatagagtttttagtttttgatgtttttcccgaagccgattgactccaatgtcacgagtgttttagatttttttttaagttcttgctttcttgggtaagaaagttgggattgagctcaaaagttgttaaaaagtcgtgacttctgatcattggcagttgaatctgttataacagtcattggtgtttggactgcaaagtaagcgattttaaagtcttttgttattaaacagaaaaattcaattattgggtacctttctactcttcaaaaatactaaatgactggcttctgactagagctctcgattgaatacacgtgaagaatgcttgagaatggaaaattgcccagagttcattagtatattttacgtgagaagggaaacaattgaaactaggttccagtttgagactcggctcaagagaaatttgaaattttctgatgggttatctttttactagtaaaagtacactgtgtttttcgcaatctttgaattgtagagggaggttaacttaatgtgttaaaaattgagttttttttcttacataagagtcttcgctttctggccgagatctctaaacttttacgttgtgaaatacttccatattgttgtgtttggtgtttgcgtgtttgtgttccaattggaacctttaagggttggaatacacctgaatcaaacacgtgtctaggcttccaaagcaagcttgggaaaaccataaagctcaatggaacagcttgatcttagacatgcctgtggtgtaaatgatgcttctctggagccagaaaaatgagtgttattcaactccaggcttctgaactgggtcttaatgtaaatcactaatctcttcaaatcagtggaattctcccttatttatctgtctctaatccagacaaccccacccctctgtgccccaccttttccagtgactgtaggagtttgttgttgtgtccctcccctttaaggttgggtgtgtgggataaattattctcagtttgatcactcaatagaatacatttgggtgaatataatgacatttaaagaactggtgtgtccctcatccctcgttggtctgtgggatttattttttcccccctctcaaaggtaatagattaacactaaaatctgtctataggggtctaattagcaggcttaacctgatctggccaaaccactttcaaaagtaagatctcgttttcatctccggattcaagactcttcccccaaaattgcttgcattttgtaaaggggttgactagcaccatttctttgtaaaaagaggcactcctggcctttaagtcacaattacaagaagttgaataaaaagttgatgaagtgcagggtaatctttagagcccaataatggtcacagcgtataggttgtgtgagatttgtatgttggtcttgcacgcagtgtaatgttctgagcctctcaatattgtaatgagtttctacgagtgagtctttactaaaggaatccagaaactaaggagacactgatgtatggaccagatgttaaagaaaatgttttgacccagcagatactctgatagaatactggctattatttttgtaaagccgatgtgattgcaacataggcacgtaatctttatcattagagatgaatagcagcatctggacaccaacccatcaaactgcttttcaaattctgcagtttttctcatcttctgctgaatcttgggatgtctttttatattccttggttttagctcctaaactctaaattctaattttcaaaactgaaacatctctgaatctacttctttctaaagaattgcagccatctcaccaaatttcctttaaaaaaggattgaattgtcaaataggaggaaattgttttgtattgtgagtctggttaggtttatcagtctcttgaaacccggttgaaatatttttttcttggttttaaacaagaatgctttaatattgtggatattgtctggaactagaacgtgacattttcaagctgacattacaggtgattttataaggttaatgttgaagaaggaaaatgcggaagtcgtcatttgacaagttttataaatgagtatttgaagctcaggaataagtgaagctgaaatttgaaaaaataaaagaaagaatgcatgctaattatcagaccagaagtcccacttgtagaatattgagcaatttgtgtgaagtggggaagatgaaagaagtcagaatttgaaacggaagaatgaagaaaagaaataaaaatgaagttaagataagaagtaatctggaatcagaaagcactacgctaagaatcccgttctgcttccagaagtggaagtgctcacggatcggggaaatctgcaaggcatacccctgcaaggtctcgctccaaggaagattccaggcgttccagatcaaagtccaggtcccgatctgaatctaggtctagatccagaagaagctcccgaaggcattatacccggtcacggtctcgctcccgctcccatagacgatcacgtagcaggtcttacagtcgagattatcgtagacggcacagccacagccattctcccatgtctactcgcaggcgtcatgttgggaatcgggcaaatcctgatcctaactgttgtcttggagtatttgggctgagcttgtacaccacagaaagagatctaagagaagtgttctctaaatatggtcccattgccgatgtgtctattgtatatgaccagcagtctaggcgttcaagaggatttgcctttgtatattttgaaaatgtagatgatgccaaggaagctaaagaacgtgccaatggaatggagcttgatgggcgtaggatcagagttgatttctctataacaaaaagaccacatacgccaacaccaggaatttacatggggagacctacctatggcagctctcgccgtcgggattactatgacagaggatatgatcggggctatgatgatcgggactactatagcagatcatacagaggaggaggtggaggaggaggaggatggagagctgcccaagacagggatcagatttatagaaggcggtcaccttctccttactatagtcgtggaggatacagatcacgttccagatctcgatcatactcacctcgtcgctattaaagcatgaagactttctgaaacctgccctagagctgggatattgtttgtgggcaatattttttattgtctcttgtttaaaaagtgaacagtgcctagtgaagttaggtgacttttacaccttttacgatgactacttttggtggagttgaaatgctgttttcattctgcatttgtgtagtttggtgctttgttccaagttaagtgttttcagaaaagtatgttttgcatgtatttttttacagtctaaattttgactgctgagaagtttctattgtacaaaacttcatttaaaaggtttttctactgaatccagggtattctgaagatcgaagcctgtgtaaaatgctaccaaatggcaaaaagcaacaataaacagtttgattttt

SEQ ID NO: 22127 - DNA, 1697 bp, Homo sapiens
  misc_feature 1..1697: note = ENST00000456380
  source 1..1697: mol_type = unassigned DNA; mol_type = unassigned DNA
acatccggtagagttagagcccgtgcggaggcggtgcggagcatttcggctctgagcggctgggcgaccggcgcgtcgtgcggggctgcggcggagcctccttaaggaaggtgcaagaggttggcagcttcgattgaagcacatcgaccggcgacagcagccaggagtcatgagcgacagcggcgagcagaactacggcgagcgggttaatgttgaagaaggaaaatgcggaagtcgtcatttgacaagttttataaatgagtatttgaagctcaggaataagtgaagctgaaatttgaaaaaataaaagaaagaatgcatgctaattatcagaccagaagtcccacttgtagaatattgagcaatttgtgtgaagtggggaagatgaaagaagtcagaatttgaaacggaagaatgaagaaaagaaataaaaatgaagttaagataagaagtaatctggaatcagaaagcactacgctaagaatcccgttctgcttccagaagtggaagtgctcacggatcggggaaatctgcaaggcatacccctgcaaggtctcgctccaaggaagattccaggcgttccagatcaaagtccaggtcccgatctgaatctaggtctagatccagaagaagctcccgaaggcattatacccggtcacggtctcgctcccgctcccatagacgatcacgtagcaggtcttacagtcgagattatcgtagacggcacagccacagccattctcccatgtctactcgcaggcgtcatgttgggaatcgggcaaatcctgatcctaactgttgtcttggagtatttgggctgagcttgtacaccacagaaagagatctaagagaagtgttctctaaatatggtcccattgccgatgtgtctattgtatatgaccagcagtctaggcgttcaagaggatttgcctttgtatattttgaaaatgtagatgatgccaaggaagctaaagaacgtgccaatggaatggagcttgatgggcgtaggatcagagttgatttctctataacaaaaagaccacatacgccaacaccaggaatttacatggggagacctacctatggcagctctcgccgtcgggattactatgacagaggatatgatcggggctatgatgatcgggactactatagcagatcatacagaggaggaggtggaggaggaggaggatggagagctgcccaagacagggatcagatttatagaaggcggtcaccttctccttactatagtcgtggaggatacagatcacgttccagatctcgatcatactcacctcgtcgctattaaagcatgaagactttctgaaacctgccctagagctgggatattgtttgtgggcaatattttttattgtctcttgtttaaaaagtgaacagtgcctagtgaagttaggtgacttttacaccttttacgatgactacttttggtggagttgaaatgctgttttcattctgcatttgtgtagtttggtgctttgttccaagttaagtgttttcagaaaagtatgttttgcatgtatttttttacagtctaaattttgactgctgagaagtttctattgtacaaaacttcatttaaaaggtttttctactgaatccagggtattctgaagatcgaagcctgtgtaaaatgctaccaaatggcaaaaagcaacaataaacagtttgatttt

SEQ ID NO: 22128 - DNA, 976 bp, Homo sapiens
  misc_feature 1..976: note = ENST00000382191
  source 1..976: mol_type = unassigned DNA; mol_type = unassigned DNA
agagcgaggaggggcgaggccaagaaagcgcgcgtttctgggaggggaggagcctggctaaggagcgccgcgtcacatccggtagagttagagcccgtgcggaggcggtgcggagcatttcggctctgagcggctgggcgaccggcgcgtcgtgcggggctgcggcggagcctccttaaggaaggtgcaagaggttggcagcttcgattgaagcacatcgaccggcgacagcagccaggagtcatgagcgacagcggcgagcagaactacggcgagcgggtctagatccagaagaagctcccgaaggcattatacccggtcacggtctcgctcccgctcccatagacgatcacgtagcaggtcttacagtcgagattatcgtagacggcacagccacagccattctcccatgtctactcgcaggcgtcatgttgggaatcgggcaaatcctgatcctaactgttgtcttggagtatttgggctgagcttgtacaccacagaaagagatctaagagaagtgttctctaaatatggtcccattgccgatgtgtctattgtatatgaccagcagtctaggcgttcaagaggatttgcctttgtatattttgaaaatgtagatgatgccaaggaagctaaagaacgtgccaatggaatggagcttgatgggcgtaggatcagagttgatttctctataacaaaaagaccacatacgccaacaccaggaatttacatggggagacctacctatggcagctctcgccgtcgggattactatgacagaggatatgatcggggctatgatgatcgggactactatagcagatcatacagaggaggaggtggaggaggaggaggatggagagctgcccaagacagggatcagatttatagaaggcggtcaccttctccttactatagtcgtggaggatacagatcacgttccagatctcgatcatactcacctcgtcgctattaa

SEQ ID NO: 22129 - DNA, 634 bp, Homo sapiens
  misc_feature 1..634: note = ENST00000465245
  source 1..634: mol_type = unassigned DNA
cggtgcggagcatttcggctctgagcggctgggcgaccggcgcgtcgtgcggggctgcggcggagcctccttaaggaaggtgcaagaggttggcagcttcgattgaagcacatcgaccggcgacagcagccaggagtcatgagcgacagcggcgagcagaactacggcgagcgggtctagatccagaagaagctcccgaaggcattatacccggtcacggtctcgctcccgctcccatagacgatcacgtagcaggtcttacagtcgagattatcgtagacggcacagccacagccattctcccatgtctactcgcaggcgtcatgttgggaatcggtttaaaacttttttttttccctaggcaaatcctgatcctaactgttgtcttggagtatttgggctgagcttgtacaccacagaaagagatctaagagaagtgttctctaaatatggtcccattgccgatgtgtctattgtatatgaccagcagtctaggcgttcaagaggatttgcctttgtatattttgaaaatgtagatgatgccaaggaagctaaagaacgtgccaatggaatggagcttgatgggcgtaggatcagagttgatttctctataacaaaaagaccacatacgcca

SEQ ID NO: 22130 - DNA, 839 bp, Homo sapiens
  misc_feature 1..839: note = ENST00000485530
  source 1..839: mol_type = unassigned DNA; mol_type = unassigned DNA
atttcggctctgagcggctgggcgaccggcgcgtcgtgcggggctgcggcggagcctccttaaggaaggtgcaagaggttggcagcttcgattgaagcacatcgaccggcgacagcagccaggagtcatgagcgacagcggcgagcagaactacggcgagcgggaatcccgttctgcttccagaagtggaagtgctcacggatcggggaaatctgcaaggcatacccctgcaaggtctcgctccaaggaagattccaggcgttccagatcaaagtccaggtcccgatctgaatctaggtctagatccagaagaagctcccgaaggcattatacccggtcacggtctcgctcccgctcccatagacgatcacgtagcaggtcttacagtcgagattatcgtagacggcacagccacagccattctcccatgtctactcgcaggcgtcatgttgggaatcgggtaagatgaaaaactggttttgaagcagtcaactgcctaaatttactttttcttaaagttagagctgattttgacaatagagctttagcagttggtgcgtgagtgaaatcttcagaggcttttttagtgttttgagagagtcttttaagttaatcttccatgacggggtctgcatttgggctgcctgtcaattaagcataatactgacacaatggtgtaactccttagcccatcaaaaaaaaaaacttccgactgcattactatactgtagtatagtattagtacattagttcaaaatatagttctatgctaacattaactctttccaggctgcataaacctagttagatgctctcctgactttcccatttaatttgaa

SEQ ID NO: 22131 - DNA, 567 bp, Homo sapiens
  misc_feature 1..567: note = ENST00000493864
  source 1..567: mol_type = unassigned DNA; mol_type = unassigned DNA
aagtgtgcaaattaaacttttaacatctacgtgtaggaatcccgttctgcttccagaagtggaagtgctcacggatcggggaaatctgcaaggcatacccctgcaaggtctcgctccaaggaagattccaggcgttccagatcaaagtccaggtcccgatctgaatctaggtctagatccagaagaagctcccgaaggcattatacccggtcacggtctcgctcccgctcccatagacgatcacgtagcaggtcttacagtcgagattatcgtagacggcacagccacagccattctcccatgtctactcgcaggcgtcatgttgggaatcgggtaagatgaaaaactggttttgaagcagtcaactgcctaaatttactttttcttaaagttagagctgattttgacaatagagctttagcagttggtgcgtgagtgaaatcttcagaggcttttttagtgttttgagagagtcttttaagttaatcttccatgacggggtctgcatttgggctgcctgtcaattaagcataatactgacacaatggtgtaactccttagcccatc

SEQ ID NO: 22132 - DNA, 530 bp, Homo sapiens
  misc_feature 1..530: note = ENST00000477939
  source 1..530: mol_type = unassigned DNA; mol_type = unassigned DNA
ttaagataagaagtaatctggaatcagaaagcactacgctaagaatcccgttctgcttccagaagtggaagtgctcacggatcggggaaatctgcaaggcatacccctgcaaggtctcgctccaaggaagattccaggcgttccagatcaaagtccaggtcccgatctgaatctaggtctagatccagaagaagctcccgaaggcattatacccggtcacggtctcgctcccgctcccatagacgatcacgtagcaggtcttacagtcgagattatcgtagacggcacagccacagccattctcccatgtctactcgcaggcgtcatgttgggaatcgggtaagatgaaaaactggttttgaagcagtcaactgcctaaatttactttttcttaaagttagagctgattttgacaatagagctttagcagttggtgcgtgagtgaaatcttcagaggcttttttagtgttttgagagagtcttttaagttaatcttccatgacggggtctgcatttgggctgcctgtcaa

SEQ ID NO: 22133 - DNA, 724 bp, Homo sapiens
  misc_feature 1..724: note = ENST00000471134
  source 1..724: mol_type = unassigned DNA; mol_type = unassigned DNA
tattaaatgtcttagcaaacttttgattaagattttatatgattcctcagagtattttaggaagaaattttcagtgatgaagcgtgagtttcctgcgtaattttggagcccaaactgcttaatttggtttgaactaatcaagccttgcgtttacatactcggatgagcatagagtttttagtttttgatgtttttcccgaagccgattgactccaatgtcacgagtgttttagatttttttttaagttcttgctttcttgggtaagaaagttgggattgagctcaaaagttgttaaaaagtcgtgacttctgatcattggcagttgaatctgttataacagtcattggtgtttggactgcaaaaatgctttaatattgtggatattgtctggaactagaacgtgacattttcaagctgacattacaggtgattttataaggttaatgttgaagaaggaaaatgcggaagtcgtcatttgacaagttttataaatgagtatttgaagctcaggaataagtgaagctgaaatttgaaaaaataaaagaaagaatgcatgctaattatcagaccagaagtcccacttgtagaatattgagcaatttgtgtgaagtggggaagatgaaagaagtcagaatttgaaacggaagaatgaagaaaagaaataaaaatgaagttaagataagaagtaatctggaatcagaaagcactacgctaagaatcccg

SEQ ID NO: 22134 - DNA, 538 bp, Homo sapiens
  misc_feature 1..538: note = ENST00000480461
  source 1..538: mol_type = unassigned DNA; mol_type = unassigned DNA
cggtagagttagagcccgtgcggaggcggtgcggagcatttcggctctgagcggctgggcgaccggcgcgtcgtgcggggctgcggcggagcctccttaaggaaggtgcaagaggttggcagcttcgattgaagcacatcgaccggcgacagcagccaggagtcatgagcgacagcggcgagcagaactacggcgagcgggttaatgttgaagaaggaaaatgcggaagtcgtcatttgacaagttttataaatgagtatttgaagctcaggaataagtgaagctgaaatttgaaaaaataaaagaaagaatgcatgctaattatcagaccagaagtcccacttgtagaatattgagcaatttgtgtgaagtggggaagatgaaagaagtcagaatttgaaacggaagaatgaagaaaagaaataaaaatgaagttaagataagaagtaatctggaatcagaaagcactacgctaagtaattactagtctgtttatgtgtccctgtatattttgctaaacatgcatgcattatttgtt

SEQ ID NO: 22135 - DNA, 288 bp, Homo sapiens
  misc_feature 1..288: note = ENST00000342294
  source 1..288: mol_type = unassigned DNA; mol_type = unassigned DNA
gagcccgtgcggaggcggtgcggagcatttcggctctgagcggctgggcgaccggcgcgtcgtgcggggctgcggcggagcctccttaaggaaggtgcaagaggttggcagcttcgattgaagcacatcgaccggcgacagcagccaggagtcatgagcgacagcggcgagcagaactacggcgagcgggttaatgttgaagaaggaaaatgcggaagtcgtcatttgacaagttttataaatgagtatttgaagctcaggaataagtgaagctgaaatttgaaaaaa

SEQ ID NO: 22136 - DNA, 7034 bp, Homo sapiens
  misc_feature 1..7034: note = ENST00000606738
  source 1..7034: mol_type = unassigned DNA; mol_type = unassigned DNA
tggagccccgtgctccagaggaaactccgtgcccaactgggggctccccgccccgctgaggggcgccgcccaggagggtcccccgcgccccgcgggccctggcaggatgcacgccgccctggcggggccgctgctcgccgccctcctcgccaccgctcgcgcccgcccgcagcccccggacggaggacagtgccggccgcccggatcgcagagggacttgaactccttcctgtggacgattcggcgtgatcctccggcctacctgtttggcactattcacgtcccctacacccgcgtctgggacttcatcccggacaactccaaggcagccttccaggctagcacccgtgtctactttgagctggaccttacagacccctacaccatctcggccctggccagctgccagctgctgccgcacggggaaaacctgcaggacgtgctgccccacgagctttactggcgcttgaagcgccacctggactacgtgaagttgatgatgccctcctggatgacgcccgctcagcggggcaaggggctctatgctgactacctattcaatgccatcgcgggcaactgggagcgcaagaggcccgtctgggtgatgctcatggtaaactcgctcacagagagggacgtgcgcttccgtggtgtgcccgtgctcgacctctacctggcccagcaggctgagaagatgaagaagaccacaggggctgtggagcaggtggaggagcagtgccatcccctcaacaacgggctcaacttctcccaggtgctgtttgccctgaaccaaaccctgctgcagcaggagagtgtgcgggccgggagcctgcaggcctcctacaccacggaggacctcatcaagcactacaactgcggagacctcagcgcagtcatcttcaaccacgacacatcccagctgcccaactttatcaacaccaccctcccgccacacgagcaggtgacggcccaggagattgacagctacttccgccaggagctcatctacaagaggaatgagcgcatggggaagagggtcatggcgcttctacgggagaacgaggacaagatctgcttctttgccttcggagcaggtcactttctggggaacaacacagtcatcgacatcctgcggcaggcagggctggaggtggaccacacacccgccgggcaggccatacacagccctgccccccagagcccagcgccctctcctgaggggacctcgacgagcccggccccagtgaccccagctgccgctgtccccgaagcaccctctgtgacccccaccgccccaccagaggatgaggatccagccctgtccccacacctcctgctccccgacagcctcagccagctggaggagtttggccggcagaggaagtggcacaagaggcagagcacacaccagcggccgcggcagttcaatgacctctgggtccgcatcgaggacagcaccaccgcctcaccacccccgctgcccctgcagcccacccacagctcggggaccgccaagccccccttccagctttcagaccagctacaacagcaggacccgccagggcccgccagcagctcggcacccaccctgggccttctccccgccatcgccaccaccatcgctgtctgcttcctgctgcatagccttgggccctcctgacctcggccaccccaagtggagaagccagagaaatgacacaggggtcttcggccacacccaactgctcctgccaccacctccagggggtgcccaacacgtcgagggcagtccacatgggattggctagacactctagagctttactgtacccaagttacatcttcttttttgtagaaggatcttaatttcccatagtgctatggggctcttttgtaaaatacgtgtccatattaaaaaagaaaaatgtatttattctaccgataaaactattcttatgtggcctgtgttataaccccctagccctagtgctggcccgggaggggaacccgggacatcagtgacctcctgtggactgtggctctggactggcttgctcttggatcaccgaagcctcctgggtctgggtttggcttctccgactgtggggccctcagcaggaggggcaggcaggcaggcttagcctttgtgaagctggatttgggagccagaggtgtgaacgttggccatcctcccctctgctggatgcacccgcggcctgggaagataatttaggaaagagaatgctgctattgtgaaacccctgagtgtctatctggccctccagagctcttggtaagtgttttcaaccaaagcgctggggtggggtgggaggtgggatactggtgctgaggaaagcagtccccaccccacagaacaaatgaataaactgagatccagagagaaccaggtgggtagcccaaggtcacacggcaagtgggagagtgaggacataaatccagacctctctgttctggtgtcatgaatccagcttgggttaaaggagaggctgttgaagtcctggctaaatggattgagctgggccgagggactggagtgggcacaggagggcagttttagagacaggggcttaggcctcacatgatgttaatagtaatgagagctgccatttttccaaagcctgcagcgtggcaagcactttgcacacttgcttcactgattcttgcgctagttctgtgagatgtgactatccccatttcacagatgaggaaactgagccccccaaagaggcgaagggacttgctgaagatcccccagccaggatgtggccccagatcagtgtgatgcaaaacaattcctgcctcctgttccctgttctgccacgttctctctgcaagggagcagatctcacccaaactggggccagcacaagctttcactccaccaagaaaccttttggccggctgcttatgttgacccctctggccaaagggctctggcaactgcatgtgccatgtgtcgcatgtcctgacttgccagatcttggagcccacgagaagctttcctgccaaatcaaaggctgagaggtgggcacagctgtggggcacctggggaggcacagcagccaagtggggaggcaggtgacagggactccgagagactttagcccctcggctcctcaaggtggtggttgaggagacagaggacccaggtgggctaactcccacctgggaggcctgaaaccctatggggcaggtgcctcagtaattacagagtcctggaacctgacagcagaaaggacccttcacttgatggataatagtaacagtaggaggaataataaggcccacagagaggagacacttctccaaggctgcacagccgggtgggcctgctgactcccagcccagtgcaccccaactttatagcttcgtgggtttccctggcaggcttgatggcagctaattggccccagtgccatcttgcccagcttggcagctatctcccttctgagacggcaagttctgggcagctcatgggatggtcaggagtcccacgggcatcttggcaggcagctgaattctttacagctcagccctgatggacgtgtttgagcttgagacctggcaggagactggagctctgccttagagggcccagccagccctgtgggcaccatgctctaaactgaacttgacctcaatccaggctggagttggtttatccttggcaaaaatgtgacttcctatttctgagcgggaaggggcttagctgacttataaagcaggctcagaagttggacatcaaacggatcgtgcagtgcactatttggatgagataagtgtaaaggaattagaagcacacaggccagattcctctctgtttggggcagagtatggcgtgagacgtattgagatggagcttgaggttaattaaagatgaagcatttgggtaaacagtccaggcacctgaccgtgtgcccagatctgtgccaggcactgagccaagaaggtaaattaatgcagcttgtaattactgagcacatgcaatgccaggctctgtattagagctgaatctaaccactctccttggcccagaggaactcattatcaagatgggacaagcagtgcaatgctagattacgtcgtcctggcccctaacttcaggaagattcagccttagtctttcccagatccctcctctgggcatattaggggatcctaaactctcccttaccctaattcaagtgtttaaagaaagatggctagactaaccgatggagtagacatgtacctacaggagagcaagagccaatgtggtcagacatctgttgccaaagttcactgatctctgaggaccaccagctggccagggtctgaaatgaactcaacttgctgacttatgacccaaaagacttgaggcacatatgcaggaatctgcatgtctggggcacttgaattctctcatcctgggccagagaaccaccattccataagcagcaacccacacctttgacacgatctatccaccactaactgacatttcttccagaaacgttctttgtgcccagcctcataaaatgctcctgttgctctgagaaatttgtgtgcacttcttagacttttctgtttgactgtgaggcaggcaggaaagatgaaaggtctgagacccagcaggtaaagtgatctgcttaaggtcgggcagcatgttattgtggccctgggtcctctacctctcacgaaagctgactgtgtgatgaagggctctctggggcatgttggaatggccatgtccccaggtcttcctccagtggtgggtctgatgcaccagcagccagatgaagacagggagagccctgtcatccacagtggagggagaagaatcaggctgccagggagctgcaaagggctgctgaggatgcctccagtcctgagagtcaaagatctgggatctaggaagcatggaaccttgtgctggttatgaacaaatttgtccttgcattgaaagaccctaagcatattttcttcatgctaaataatgtgttatctacaacttcctggcctcggctagacctggacaagcctaggtgctcaggccccttgtcccacttgcctaatctccagcccagggccattgtcacagtggatcccaaagaggagggaaagtccttctaccaaaaggaaagtctattgaaaatgctgtgaaggacaagagaagttctccagggaattgcagctttgatggcatcctgtgtggcagacagcagaattggggctggtgatagtttttcagtgactgtgagataagaaccagagtcctcagcctcaccctgaagtgtccgctagacccttcgtgacccaaccctgctgaccagccacgtctctcatgtctcttaccctgtgcctggccagcgtgatgtgcagtcatctctagaatagacaggatgtttcacacatgctgctccctacccctggaaactcccttctctcccctgtaactgctcatccattgaggatcaacacagatagcacttcctccaggaagccccctcccattcctttgtgctttcttagcatctatcacaatacccactgcccagtgttgtgactatctagtgtgtatctgctcctctcggactgtgagcagcttaatggcaggggtcatgtaaatttgtttttgtaccctcatctgacacaaaggtggtgctcaacagatgtgtagagagagaaaggaagggaaggaagctgaaggaaggggaggaagaaaggaatgaaggcagaaaagaaggagagaggcagaccttagttccaccagtggcataatttccaccaagccaaagctgtctggggatggcccggagcccccaagggtggcaggtttcccatcgggagaggtgtttgagcaggggcagtgtgcccactggctgaagaagtggtaggagagttgacatcttgccaagggcctggtgtagatgacattgagggtccctcctggctctgcaatgatcaagttctatgaacattgttatttttccagaaattcatctgagcagccaaaaaaaatcaccccgctggctgtctaaaccagtaaggttcaggaataagtccagcctccccactccacccacaaccaccaccacccctcacagcgcccccttcaatgacccagctgggcttgactgctgcctttgggtgggggaacttctgaaaggtggaggaggagtgaactggaacccaggcctgcagcccagcccagagctccttcccgctctgccccactccctgaccccaggggaggaaagggttcacgagaactgattgaccccctacttggctctttccagggagcatcggctatcctcaccctttctccaagtgggagctgggctcttcctttccggagatactctggatactccttcactttgctggatgaccttgggcaagttcctgtccctctctgagccttcacttcctcatctgtcaaatgaagaccttgattcctgcctgggcagttctagggctggagggcaggggtgacatggacaatcttgggcctccatggagatgaggtgcttggctttcttcccaggacccacaggctgccatgggattgaaagcatgtggaggtgggaaaggtgacagagtagcatgcctccaaggcccccttcatcccagtcctgctgtggggaaagtgggctttgaacgggatccaagtctaagatgtttccggtgagctgccagggacaaagggctctcagacatcttgggtccccagtggctggggtgggcaggggctgattcagccaaaggaggctctagcccagaacagaggaagccagagcccctgccccattcttgagcctcacagagcttgtccccgagttgattcactgtgcaacacaggcttcagattcatgtatttgaaaggtattcatgatgttgttctcttatcacctctgcccctcacctctgtgaattatcatgaagagtcctttaagagtataaatagaagacaaagaaagatgctattaatgttattttgccaaaaatatttttgtagcataatatattaataaaagatattatgaattcaa

SEQ ID NO: 22137 - DNA, 619 bp, Homo sapiens
  misc_feature 1..619: note = ENST00000435576
  source 1..619: mol_type = unassigned DNA; mol_type = unassigned DNA
ccgtctgggtgatgctcatggtaaactcgctcacagagagggacgtgcgcttccgtggtgtgcccgtgctcgacctctacctggcccagcaggctgagaagatgaagaagaccacaggggctgtggagcaggtggaggagcagtgccatcccctcaacaacgggctcaacttctcccaggtgctgtttgccctgaaccaaaccctgctgcagcaggagagtgtgcgggccgggagcctgcaggcctcctacaccacggaggacctcatcaagcactacaactgcggagacctcagcgcagtcatcttcaaccacgacacatcccaggtcactttctggggaacaacacagtcatcgacatcctgcggcaggcagggctggaggtggaccacacacccgccgggcaggccatacacagccctgccccccagagcccagcgccctctcctgaggggacctcgacgagcccggccccagtgaccccagctgccgctgtccccgaagcaccctctgtgacccccaccgccccaccagaggatgaggatccagccctgtccccacacctcctgctccccgacagcctcagccagctggaggagtttggccggcagaggaagtgg

SEQ ID NO: 22138 - DNA, 6324 bp, Homo sapiens
  misc_feature 1..6324: note = ENST00000373887
  source 1..6324: mol_type = unassigned DNA; mol_type = unassigned DNA
gcggcgggggctgtgctggcgccggcaggcgcgaggaatcacagagcggggcgcccagcctcatcatggggcggcccacggagacttcccgtgggagtggggtctggtgcaggggcgccccaaaggacgagtgggagatggggacacgcggcgcagagagactcctcgtggatggagccgatggaggcccagtgtagaagagaaaggggtcaaggagacggataaggagccaccagagacgcggggggaattccccgcagaggatgcgggaagccggggaaaggaagggattccggaaggaagggctgagagccgggtcaggtgctggcaggagggctggttggatagaaactggggcgggcccagggcatttggcgtccccgacatgcgtatacacttggagagatgattccctggagatccaagtgcctgtatagacaatcttttctagaagttctaccgttaggtgaggcgagagtagatgtagaaattggagacgagaataaagagtgttttaaaagcgtgcgtggttacaggactggctctgggttcaggggtccccactcactagctgtgagaccttgaacaagtcgcttagcctctctgtgcctcagttttctcatctgtaaggtggggatgatgatggcaatacctgcttcacagagtgaaaattagatgagatgatgtctgtaaaattacgtaagacggtacccaaaagtagtactatttttcccttttcttattagagcaggttgcgcacgttttgatgtccgtgggaatgagcaggtagagagggtggtattgaggccggaggggagagaagggacccacagatggggagagaagtcttgggtgcctgttttatcccaaaccaggggaaggagggaacaggtagggctggctgcaggaaagcttgcaggtatggggtacacagttaaaagggagtgtcttctgatagtcttgatgcaggcctggaggtcgtttgttatgggggtggaggtcctgatgtacattgtggcggtaagatgccgtgctgtctttgccaccagcctgtggcagccctggtgttacaccagggcaggtgggcagtttaatgtatctcaggccagatgacctgccctgcccacctgttgaggctccagtagatagacgtgaaagcacagtataagcataatgcaccactttaatccttttctctgaggagctggaaggcctgtagtcaccatctgagccaaatgtcattcaagtacttcacttgggttacacaccacactttgacccactatctcatttagtcatcacaacaaatgggtgaaataggtattattgtcccattttacagatgcagaatctgagtttcagggaagttaaggactttgtcccagggcccacagttagtaagcagtggacccaggatttcaactcagctctgtctgacctcaaaacccatgatctgaaaccactgtgaaagtttgcaaaacctctgtagcagccaagcaggatggaaagatgtgtagggattgtcttctccatttgatagatgagacaagagctgggtactctgatctccatcccaagcacacagagcttggggccccacagccctggtgtgaatcccactccactaccagaggctgtgtgcctttggaccaggcatcttgcttctctgaccctatatacagctgcagaagaattccttgcaggttgctgtaaggatttggagggaaactgttgcccagcacacagtacacattctgggagccatcgtttccccagtgcacttttcctgcaaatgtggatctacatcccacttggatgctgagaccagctgctgtgatcttgcatttgtttagcgctttgttctccttgaggcagtaaagtggtggcacctgaccggagcatgtagccacctatgacttcctgagtggggtggtgtggggagggccctgaggagtctgtggtcctaggccttggatttcatcagggctttcctgctccttctggttgcctcagtcccaggcaagatagggtcccagaatcttacagcccagaggccacctgttgcaacttcttttttacagatggagtcatcagaacccactgtgaggaagtgacttctccttgaggtcacccagacactccaaacagagcagagcaaaagcgcctagaacttgaaattttggacctgtctccaacaccctggggatttccaccaggaagccttcagtcaccatccaggggatttttatcgccacaaagggtaattcctgctccatccctgctgtgactcagctgtgacgttgaaccacacaagccagagagaagaagataaagtcatcagagctcctactcaccagagagtgaggcccaggccaggactccacaaggctggtcccctgccctggagcaacttaaacaggccctctggccagcctggaaccctgagatggcctccagctcaggcagcagtcctcgcccggcccctgatgagaatgagtttccctttgggtgccctcccaccgtctgccaggacccaaaggagcccagggctctctgctgtgcaggctgtctctctgagaacccgaggaatggcgaggatcagatctgccccaaatgcagaggggaagacctccagtctataagcccaggaagccgtcttcgaactcaggagaaggctcaccccgaggtggctgaggctggaattgggtgcccctttgcaggtgtcggctgctccttcaagggaagcccacagtctgtgcaagagcatgaggtcacctcccagacctcccacctaaacctgctgttggggttcatgaaacagtggaaggcccggctgggctgtggcctggagtctgggcccatggccctggagcagaacctgtcagacctgcagctgcaggcagccgtggaagtggcgggggacctggaggtcgattgctaccgggcaccctgctccgagagccaggaggagctggccctgcagcacttcatgaaggagaagcttctggctgagctggaggggaagctgcgtgtgtttgagaacattgttgctgtcctcaacaaggaggtggaggcctcccacctggccctggccacctctatccaccagagccagctggaccgtgagcgcatcctgagcttggagcagagggtggtggagcttcagcagaccctggcccagaaagaccaggccctgggcaagctggagcagagcttgcgcctcatggaggaggcctccttcgatggcactttcctgtggaagatcaccaatgtcaccaggcggtgccatgagtcggcctgtggcaggaccgtcagcctcttctccccagccttctacactgccaagtatggctacaagttgtgcctgcggctgtacctgaatggagatggcactggaaagagaacccatctgtcgctcttcatcgtgatcatgagaggggagtatgatgcgctgctgccgtggcccttccggaacaaggtcaccttcatgctgctggaccagaacaaccgtgagcacgccattgacgccttccggcctgacctaagctcagcgtccttccagaggccccagagtgaaaccaacgtggccagtggatgcccactcttcttccccctcagcaaactgcagtcacccaagcacgcctacgtgaaggacgacacaatgttcctcaagtgcattgtggagaccagcacttagggtgggcggggctcctgagggagctccaactcagaagggagctagccagaggactgtgatgccctgcccttggcacccaagacctcagggcacaaagatgggtgaaggctggcatgatccaagcaagactgaggggtcgacttcgggctggccatctggttaggatggcaggacgtgggctgggcccacaaaggcaaagggtccagaaggagacaggcagagctgctcccctctgcacggaccatgcgacactgggaggccagtgagccactccggccccgaatgttgaggtggactctcaccaaatgagaagaaaatggaaccaggcttggaaccgtaggacccaagcagagaagctctcgggctaggaagatctctgcagggccgccagggagacctggacacaggcctgctctctttttctccagggtcagaaacaggaccgggtggaagggatggggtgccagtttgaatgcagtctgtccaggctcgtcattggaggtgaacaagcaaacccagacggctccactaggacttcaaattgggggttggatttgaagacttttaagtttccttccagcccagaaagtctctcattctaggcctcctggcccaggtgagtcctagagctacaggggttctggaaacattcaggagcttcctgtcctcccagctcctcactcaccttcagtaacccccactggactgacctggtccacagggcacctgccaccctgggcctggcagctcagcttccccaacacgcaggagcacacccagcccccacatcctgtgcctccatcagctaaacaccacgtcacttcatgcaggtgaaacccagtcactgtgagctcccaggtgcagccagaggcacctcaagaagaagaggggcataaactttcctcttcctgcctagaggccccacctttggtgctttccagaatcccgtaacacctgattaactgaggcatccacttctttcagcagactgatcaggacctccaagccactgagcaatgtataaccccaaagaaataatttttagaatctctttcgaagttttcctaaagtgtatggtttgggagttgtttgtactgagccaggtttgaaaaggccattgctgagtttgaggtggtgccaccagttttgcaggtggcatcagaggctggcatgctggcaggaacatcccctcttagccccagtcttctcttttctataatgagacccaccccagcttgcctccctccctggcttctctgaccctcaaaggagatgccacgcaggacagactggagagagaagcctgggcaatactgcccgcctgtcatggcctggtggtggcccacacctatcttctcaccttggaggccacacccaactttccaaagaccctgagacaagtcaggaccctactactctcccctgctgctttcctgacagcttactcttcctccacctgctgagcctgtgccagactccattgctcaaatcgttagggttgcttctataaaaatgggtcagtagcccttcctgttctctccagcccagcatacaggaggatcaaaggaggtgacggagcatcgtggcacggcagtctcaatgggtcagaaacccaggccagctgggctctaagcctggcatcctgtcatgcttagtccttcagctgaagatcagaggaagcctctcccttgccctctccagctctaggggttttcaggaggcccaactgcaataatggagcactagtgcttttatgtgcaatggtgtcgtccatgcacgacagcagcaaacattctggggctgctttttattgttcccacggctgacagcgtggcagcggagactgtggaggcagtggagactgacttcttcctgctgacagctggatgtcacacatgaaggtctggcctagcgagtgatgggtctaggccctgaaactgatgtcctagcaataacctcttgatccctactcaccgagtgttgagcccaaggggggatttgtagaacaagcccccatgagaaacagctgttactctacacttttgattgcctatttctgatggcaagagatacatactctcttcaaagagcatgagatgcagccattctttcagcaaagcttcattgacacctgcacctgttaactgtgttcgacattgaagggagaaaggcaagatgtgcactctggactcaagaaactcttagttcagtggaggaaatgagcagataagtagatcattatgattgagagtaggagaagcttagagaaagcacagaatcccagatccagctggtgaaggagggaaggcttcaggcctttaagctcagcctgagaatattgtgaaatgcagaggatggggaaaagggaagagtaccgacttgaaaacggagagctgtcttggctgagggcagggtctgtgtggcaggatgggggagggagtcagaagggtcagatgaactggagtgtagacagcatcagatgcagcagtgcccaccgcccccccccccaccccccgccctgcccacagagcacctgctggtaaccctgggcctattgaaagcaggatgagatgataatttaagacactgaatgatttcttttccaacaaagctctatgttaagtgca

SEQ ID NO: 22139 - DNA, 3715 bp, Homo sapiens
  misc_feature 1..3715: note = ENST00000546084
  source 1..3715: mol_type = unassigned DNA; mol_type = unassigned DNA
gatgattacggagctgtgtggactgtgccctgacaggagaaatagcagtgctgcccaggatcacagctcaccccgaggtggctgaggctggaattgggtgcccctttgcaggtgtcggctgctccttcaagggaagcccacagtctgtgcaagagcatgaggtcacctcccagacctcccacctaaacctgctgttggggttcatgaaacagtggaaggcccggctgggctgtggcctggagtctgggcccatggccctggagcagaacctgtcagacctgcagctgcaggcagccgtggaagtggcgggggacctggaggtcgattgctaccgggcaccctgctccgagagccaggaggagctggccctgcagcacttcatgaaggagaagcttctggctgagctggaggggaagctgcgtgtgtttgagaacattgttgctgtcctcaacaaggaggtggaggcctcccacctggccctggccacctctatccaccagagccagctggaccgtgagcgcatcctgagcttggagcagagggtggtggagcttcagcagaccctggcccagaaagaccaggccctgggcaagctggagcagagcttgcgcctcatggaggaggcctccttcgatggcactttcctgtggaagatcaccaatgtcaccaggcggtgccatgagtcggcctgtggcaggaccgtcagcctcttctccccagccttctacactgccaagtatggctacaagttgtgcctgcggctgtacctgaatggagatggcactggaaagagaacccatctgtcgctcttcatcgtgatcatgagaggggagtatgatgcgctgctgccgtggcccttccggaacaaggtcaccttcatgctgctggaccagaacaaccgtgagcacgccattgacgccttccggcctgacctaagctcagcgtccttccagaggccccagagtgaaaccaacgtggccagtggatgcccactcttcttccccctcagcaaactgcagtcacccaagcacgcctacgtgaaggacgacacaatgttcctcaagtgcattgtggagaccagcacttagggtgggcggggctcctgagggagctccaactcagaagggagctagccagaggactgtgatgccctgcccttggcacccaagacctcagggcacaaagatgggtgaaggctggcatgatccaagcaagactgaggggtcgacttcgggctggccatctggttaggatggcaggacgtgggctgggcccacaaaggcaaagggtccagaaggagacaggcagagctgctcccctctgcacggaccatgcgacactgggaggccagtgagccactccggccccgaatgttgaggtggactctcaccaaatgagaagaaaatggaaccaggcttggaaccgtaggacccaagcagagaagctctcgggctaggaagatctctgcagggccgccagggagacctggacacaggcctgctctctttttctccagggtcagaaacaggaccgggtggaagggatggggtgccagtttgaatgcagtctgtccaggctcgtcattggaggtgaacaagcaaacccagacggctccactaggacttcaaattgggggttggatttgaagacttttaagtttccttccagcccagaaagtctctcattctaggcctcctggcccaggtgagtcctagagctacaggggttctggaaacattcaggagcttcctgtcctcccagctcctcactcaccttcagtaacccccactggactgacctggtccacagggcacctgccaccctgggcctggcagctcagcttccccaacacgcaggagcacacccagcccccacatcctgtgcctccatcagctaaacaccacgtcacttcatgcaggtgaaacccagtcactgtgagctcccaggtgcagccagaggcacctcaagaagaagaggggcataaactttcctcttcctgcctagaggccccacctttggtgctttccagaatcccgtaacacctgattaactgaggcatccacttctttcagcagactgatcaggacctccaagccactgagcaatgtataaccccaaagaaataatttttagaatctctttcgaagttttcctaaagtgtatggtttgggagttgtttgtactgagccaggtttgaaaaggccattgctgagtttgaggtggtgccaccagttttgcaggtggcatcagaggctggcatgctggcaggaacatcccctcttagccccagtcttctcttttctataatgagacccaccccagcttgcctccctccctggcttctctgaccctcaaaggagatgccacgcaggacagactggagagagaagcctgggcaatactgcccgcctgtcatggcctggtggtggcccacacctatcttctcaccttggaggccacacccaactttccaaagaccctgagacaagtcaggaccctactactctcccctgctgctttcctgacagcttactcttcctccacctgctgagcctgtgccagactccattgctcaaatcgttagggttgcttctataaaaatgggtcagtagcccttcctgttctctccagcccagcatacaggaggatcaaaggaggtgacggagcatcgtggcacggcagtctcaatgggtcagaaacccaggccagctgggctctaagcctggcatcctgtcatgcttagtccttcagctgaagatcagaggaagcctctcccttgccctctccagctctaggggttttcaggaggcccaactgcaataatggagcactagtgcttttatgtgcaatggtgtcgtccatgcacgacagcagcaaacattctggggctgctttttattgttcccacggctgacagcgtggcagcggagactgtggaggcagtggagactgacttcttcctgctgacagctggatgtcacacatgaaggtctggcctagcgagtgatgggtctaggccctgaaactgatgtcctagcaataacctcttgatccctactcaccgagtgttgagcccaaggggggatttgtagaacaagcccccatgagaaacagctgttactctacacttttgattgcctatttctgatggcaagagatacatactctcttcaaagagcatgagatgcagccattctttcagcaaagcttcattgacacctgcacctgttaactgtgttcgacattgaagggagaaaggcaagatgtgcactctggactcaagaaactcttagttcagtggaggaaatgagcagataagtagatcattatgattgagagtaggagaagcttagagaaagcacagaatcccagatccagctggtgaaggagggaaggcttcaggcctttaagctcagcctgagaatattgtgaaatgcagaggatggggaaaagggaagagtaccgacttgaaaacggagagctgtcttggctgagggcagggtctgtgtggcaggatgggggagggagtcagaagggtcagatgaactggagtgtagacagcatcagatgcagcagtgcccaccgcccccccccccaccccccgccctgcccacagagcacctgctggtaaccctgggcctattgaaagcaggatgagatgataatttaagacactgaatgatttcttttccaacaaagctctatgttaagtgca

SEQ ID NO: 22140 - DNA, 4303 bp, Homo sapiens
  misc_feature 1..4303: note = ENST00000540010
  source 1..4303: mol_type = unassigned DNA; mol_type = unassigned DNA
acactccaccggaagctccgggcctggccgccggtaggcggtggcggaggcggcgccgagatggagtcatcagaacccactgtgaggaagtgacttctccttgaggtcacccagacactccaaacagagcagagcaaaagcgcctagaacttgaaattttggacctgtctccaacaccctggggatttccaccaggaagccttcagtcaccatccaggggatttttatcgccacaaagggtaattcctgctccatccctgctgtgactcagctgtgacgttgaaccacacaagccagagagaagaagataaagtcatcagagctcctactcaccagagagtgaggcccaggccaggactccacaaggctggtcccctgccctggagcaacttaaacaggccctctggccagcctggaaccctgagatggcctccagctcaggcagcagtcctcgcccggcccctgatgagaatgagtttccctttgggtgccctcccaccgtctgccaggacccaaaggagcccagggctctctgctgtgcaggctgtctctctgagaacccgaggaatggcgaggatcagatctgccccaaatgcagaggggaagacctccagtctataagcccaggaagccgtcttcgaactcaggagaaggctcaccccgaggtggctgaggctggaattgggtgcccctttgcaggtgtcggctgctccttcaagggaagcccacagtctgtgcaagagcatgaggtcacctcccagacctcccacctaaacctgctgttggggttcatgaaacagtggaaggcccggctgggctgtggcctggagtctgggcccatggccctggagcagaacctgtcagacctgcagctgcaggcagccgtggaagtggcgggggacctggaggtcgattgctaccgggcaccctgctccgagagccaggaggagctggccctgcagcacttcatgaaggagaagcttctggctgagctggaggggaagctgcgtgtgtttgagaacattgttgctgtcctcaacaaggaggtggaggcctcccacctggccctggccacctctatccaccagagccagctggaccgtgagcgcatcctgagcttggagcagagggtggtggagcttcagcagaccctggcccagaaagaccaggccctgggcaagctggagcagagcttgcgcctcatggaggaggcctccttcgatggcactttcctgtggaagatcaccaatgtcaccaggcggtgccatgagtcggcctgtggcaggaccgtcagcctcttctccccagccttctacactgccaagtatggctacaagttgtgcctgcggctgtacctgaatggagatggcactggaaagagaacccatctgtcgctcttcatcgtgatcatgagaggggagtatgatgcgctgctgccgtggcccttccggaacaaggtcaccttcatgctgctggaccagaacaaccgtgagcacgccattgacgccttccggcctgacctaagctcagcgtccttccagaggccccagagtgaaaccaacgtggccagtggatgcccactcttcttccccctcagcaaactgcagtcacccaagcacgcctacgtgaaggacgacacaatgttcctcaagtgcattgtggagaccagcacttagggtgggcggggctcctgagggagctccaactcagaagggagctagccagaggactgtgatgccctgcccttggcacccaagacctcagggcacaaagatgggtgaaggctggcatgatccaagcaagactgaggggtcgacttcgggctggccatctggttaggatggcaggacgtgggctgggcccacaaaggcaaagggtccagaaggagacaggcagagctgctcccctctgcacggaccatgcgacactgggaggccagtgagccactccggccccgaatgttgaggtggactctcaccaaatgagaagaaaatggaaccaggcttggaaccgtaggacccaagcagagaagctctcgggctaggaagatctctgcagggccgccagggagacctggacacaggcctgctctctttttctccagggtcagaaacaggaccgggtggaagggatggggtgccagtttgaatgcagtctgtccaggctcgtcattggaggtgaacaagcaaacccagacggctccactaggacttcaaattgggggttggatttgaagacttttaagtttccttccagcccagaaagtctctcattctaggcctcctggcccaggtgagtcctagagctacaggggttctggaaacattcaggagcttcctgtcctcccagctcctcactcaccttcagtaacccccactggactgacctggtccacagggcacctgccaccctgggcctggcagctcagcttccccaacacgcaggagcacacccagcccccacatcctgtgcctccatcagctaaacaccacgtcacttcatgcaggtgaaacccagtcactgtgagctcccaggtgcagccagaggcacctcaagaagaagaggggcataaactttcctcttcctgcctagaggccccacctttggtgctttccagaatcccgtaacacctgattaactgaggcatccacttctttcagcagactgatcaggacctccaagccactgagcaatgtataaccccaaagaaataatttttagaatctctttcgaagttttcctaaagtgtatggtttgggagttgtttgtactgagccaggtttgaaaaggccattgctgagtttgaggtggtgccaccagttttgcaggtggcatcagaggctggcatgctggcaggaacatcccctcttagccccagtcttctcttttctataatgagacccaccccagcttgcctccctccctggcttctctgaccctcaaaggagatgccacgcaggacagactggagagagaagcctgggcaatactgcccgcctgtcatggcctggtggtggcccacacctatcttctcaccttggaggccacacccaactttccaaagaccctgagacaagtcaggaccctactactctcccctgctgctttcctgacagcttactcttcctccacctgctgagcctgtgccagactccattgctcaaatcgttagggttgcttctataaaaatgggtcagtagcccttcctgttctctccagcccagcatacaggaggatcaaaggaggtgacggagcatcgtggcacggcagtctcaatgggtcagaaacccaggccagctgggctctaagcctggcatcctgtcatgcttagtccttcagctgaagatcagaggaagcctctcccttgccctctccagctctaggggttttcaggaggcccaactgcaataatggagcactagtgcttttatgtgcaatggtgtcgtccatgcacgacagcagcaaacattctggggctgctttttattgttcccacggctgacagcgtggcagcggagactgtggaggcagtggagactgacttcttcctgctgacagctggatgtcacacatgaaggtctggcctagcgagtgatgggtctaggccctgaaactgatgtcctagcaataacctcttgatccctactcaccgagtgttgagcccaaggggggatttgtagaacaagcccccatgagaaacagctgttactctacacttttgattgcctatttctgatggcaagagatacatactctcttcaaagagcatgagatgcagccattctttcagcaaagcttcattgacacctgcacctgttaactgtgttcgacattgaagggagaaaggcaagatgtgcactctggactcaagaaactcttagttcagtggaggaaatgagcagataagtagatcattatgattgagagtaggagaagcttagagaaagcacagaatcccagatccagctggtgaaggagggaaggcttcaggcctttaagctcagcctgagaatattgtgaaatgcagaggatggggaaaagggaagagtaccgacttgaaaacggagagctgtcttggctgagggcagggtctgtgtggcaggatgggggagggagtcagaagggtcagatgaactggagtgtagacagcatcagatgcagcagtgcccaccgcccccccccccaccccccgccctgcccacagagcacctgctggtaaccctgggcctattgaaagcaggatgagatgataatttaagacactgaatgatttcttttccaacaaagctctatgttaagtgca

SEQ ID NO: 22141 - DNA, 2923 bp, Homo sapiens
  misc_feature 1..2923: note = ENST00000262395
  source 1..2923: mol_type = unassigned DNA; mol_type = unassigned DNA
cacagccgagccctggccgcgaccgccagtcggcgccgcccggagccgggagcgccgctccagcgaggcgcgggctgtggggccgccgcgtgcctggccccgctcgcccgtgccggccgctcgcccgccatgcctggcttcgactacaagttcctggagaagcccaagcgacggctgctgtgcccactgtgcgggaagcccatgcgcgagcctgtgcaggtttccacctgcggccaccgtttctgcgatacctgcctgcaggagttcctcagtgaaggagtcttcaagtgccctgaggaccagcttcctctggactatgccaagatctacccagacccggagctggaagtacaagtattgggcctgcctatccgctgcatccacagtgaggagggctgccgctggagtgggccactacgtcatctacagggccacctgaatacctgcagcttcaatgtcattccctgccctaatcgctgccccatgaagctgagccgccgtgatctacctgcacacttgcagcatgactgccccaagcggcgcctcaagtgcgagttttgtggctgtgacttcagtggggaggcctatgagagccatgagggtatgtgcccccaggagagtgtctactgtgagaataagtgtggtgcccgcatgatgcggcggctgctggcccagcatgccacctctgagtgccccaagcgcactcagccctgcacctactgcactaaggagttcgtctttgacaccatccagagccaccagtaccagtgcccaaggctgcctgttgcctgccccaaccaatgtggtgtgggcactgtggctcgggaggacctgccaggccatctgaaggacagctgtaacaccgccctggtgctctgcccattcaaagactccggctgcaagcacaggtgccctaagctggcaatggcacggcatgtggaggagagtgtgaagccacatctggccatgatgtgtgccctggtgagccggcaacggcaggagctgcaggagcttcggcgagagctggaggagctatcagtgggcagtgatggcgtgctcatctggaagattggcagctatggacggcggctacaggaggccaaggccaagcccaaccttgagtgcttcagcccagccttctacacacataagtatggttacaagctgcaggtgtctgcattcctcaatggcaatggcagtggtgagggcacacacctctcactgtacattcgtgtgctgcctggtgcctttgacaatctccttgagtggccctttgcccgccgtgtcaccttctccctgctggatcagagcgaccctgggctggctaaaccacagcacgtcactgagaccttccaccccgacccaaactggaagaatttccagaagccaggcacgtggcggggctccctggatgagagttctctgggctttggttatcccaagttcatctcccaccaggacattcgaaagcgaaactatgtgcgggatgatgcagtcttcatccgtgctgctgttgaactgccccggaagatcctcagctgagtgcaggtggggttcgaggggaaaggacgatggggcatgacctcagtcaggcactggctgaacttggagagggggccggacccccgtcagctgcttctgctgcctaggttctgttaccccatcctccctcccccagccaccaccctcaggtgcctccaattggtgcttcagccctggcccctgtggggaacaggtcttggggtcatgaagggctggaaacaagtgaccccagggcctgtctcccttcttgggtagggcagacatgccttggtgccggtcacactctacacggactgaggtgcctgctcaggtgctatgtcccaagagccataagggggtgggaattggggagggagaaagggtagttcaaagagtctgtcttgagatctgattttttccccctttacctagctgtgccccctctggttatttatttccttagtgccaggagggcacagcaggggagccctgatttttaataaatccggaattgtatttattaatttgcttccagcctgacttacctgggttggttaggtccctgggaggctcaaccaaactgaaggcaaagaaaggaccagtcagagaagggccgctgcctgggtctggccccaggatccagcttacctgctggctcgccctctgatggacgccgggaaaactgcatcgggctttgtgtggaagacggtccctgccactgccctctgccgatgaaatgcgggaagtgtatggcctagatgtttcataaggctggagtccctggtcagccccaccagattagtgcttctaccctaggcagggctttcttggtctaatggtaataagcaccgacactgctaagcactttacgtgcattattatttcattgaaaagaactgtcaagtgaaatactttttagcacagtaactggctttgtgggctctagagaagagttaatgaggcagtgcatgttcttggcccagagtaagtgcttagtgaatgctttctaactccgaaccccagccacatccagggactgggtgttgagcaaaaggggccttcaagatgttcaaggcacttggattttctcctgtctctcatcggcttttcttaacgggcctcagtgggtgcatgtgattatccacgtttcacctatgaaacatgaacagaggagactgacttatcagtgattcttccgcgggttcggacagggcctcgattctgttttaaactccagtagtccctagaaattgtagctccctctagttgtggcaataggtgtgggtccttgtgcttgcttttggcaagtttctgagctacacagggcctccattaccgtcactggtgaaatgcggctcacctcccagatttgttgtaaagattaaatgaactggtcagcaca

SEQ ID NO: 22142 - DNA, 718 bp, Homo sapiens
  misc_feature 1..718: note = ENST00000478021
  source 1..718: mol_type = unassigned DNA; mol_type = unassigned DNA
gccgcccggagccgggagcgccgctccagcgaggcgcgggctgtggggccgccgcgtgcctggccccgctcgcccgtgccggccgctcgcccgccatgcctggcttcgactacaagttcctggagaagcccaagcgacggctgctgtgcccactgtgcgggaagcccatgcgcgagcctgtgcaggtttccacctgcggccaccgtttctgcgatacctgcctgcaggagttcctcagatcatgaaacgagattcaaagaaaggctgcgacttgcccagggtcacatagttacttaaaggcttaactaggatttaaacccggactgcttatgatcacacaatggaggaaggactgaatcctcccccgaagaaggacccctctaggcggctcccctctctcccgggggctggagtaaggcgggtggtccataagtcatgaagaagggggtcgcactcgtgttgttactgaactcccgctgccctctcaggacgcagcctgggccggctcctgccctcacatatgctccggcacaagctgcaggactgccccctccccctcggcagtgtacacatttactctcctacagacacagccccattgtctccgccactgctcttccccggccctctgggttccagatgaggccagctgagccccccgacccccccacagctgacccaccctgactgcctcgggaaaggagcgggggagggggcc

SEQ ID NO: 22143 - DNA, 787 bp, Homo sapiens
  misc_feature 1..787: note = ENST00000461195
  source 1..787: mol_type = unassigned DNA; mol_type = unassigned DNA
ccgcccggagccgggagcgccgctccagcgaggcgcgggctgtggggccgccgcgtgcctggccccgctcgcccgtgccggccgctcgcccgccatgcctggcttcgactacaagttcctggagaagcccaagcgacggctgctgtgcccactgtgcgggaagcccatgcgcgagcctgtgcaggtttccacctgcggccaccgtttctgcgatacctgcctgcaggagttcctcagtgaaggagtcttcaagtgccctgaggaccagcttcctctggactatgccaagatctacccagacccggagctggaagtacaagtattgggcctgcctatccgctgcatccacagtgaggagggctgccgctggagtgggccactacgtcatctacaggtgaggctctgatgtgagggctggcaccacctctcccttggcaggcactaattgcagccttcccaccagggccacctgaatacctgcagcttcaatgtcattccctgccctaatcgctgccccatgaagctgagccgccgtgatctacctgcacacttgcagcatgactgccccaagcggcgcctcaagtgcgagttttgtggctgtgacttcagtggggaggcctatgagagccatgagggtatgtgcccccaggagagtgtctactgtgagaataagtgtggtgcccgcatgatgcggcggctgctggcccagcatgccacctctgagtgccccaagcgcactcagccctgcacctactgcactaaggagttcgtctttgacaccatccag

SEQ ID NO: 22144 - DNA, 748 bp, Homo sapiens
  misc_feature 1..748: note = ENST00000498540
  source 1..748: mol_type = unassigned DNA; mol_type = unassigned DNA
ccggagccgggagcgccgctccagcgaggcgcgggctgtggggccgccgcgtgcctggccccgctcgcccgtgccggccgctcgcccgccatgcctggcttcgactacaagttcctggagaagcccaagcgacggctgctgtgcccactgtgcgggaagcccatgcgcgagcctgtgcaggtttccacctgcggccaccgtttctgcgatacctgcctgcaggagttcctcaggagtcttcaagtgccctgaggaccagcttcctctggactatgccaaggtgagtccacactgccaggaagaagcccaagcacagtctgttgcccttggaggccggagctgctggcagccagtgggctcagggccagtgtcaaccaaaagccttgggatggtgcgcctccacaaaggtagcctgttccctcccaccaggccagtttgcaaacgaggcccctgtttgccctggagggcatgcacaatgcccagcctgtaggggtgcacagagctgctctgtgcccgcaagaagtgttccctccccttccggtggcaagccagacctgtggctgagggccagtatccctccaccaggggaaaggaagcagagccccagggacagcctgggattgagcaggctgattggctgcctcttcaaaggaagcgtcctgtgcaggcatgttaggacccagcatcagagcagatgctgcctgctgtgcccttcatccctggactcaagaggggcaaagagcccaag

SEQ ID NO: 22145 - DNA, 631 bp, Homo sapiens
  misc_feature 1..631: note = ENST00000422344
  source 1..631: mol_type = unassigned DNA; mol_type = unassigned DNA
cgggagcgccgctccagcgaggcgcgggctgtggggccgccgcgtgcctggccccgctcgcccgtgccggccgctcgcccgccatgcctggcttcgactacaagttcctggagaagcccaagcgacggctgctgtgcccactgtgcgggaagcccatgcgcgagcctgtgcaggtttccacctgcggccaccgtttctgcgatacctgcctgcaggagttcctcagtgaaggagtcttcaagtgccctgaggaccagcttcctctggactatgccaagttcccccatccctacccccagatctacccagacccggagctggaagtacaagtattgggcctgcctatccgctgcatccacagtgaggagggctgccgctggagtgggccactacgtcatctacagggccacctgaatacctgcagcttcaatgtcattccctgccctaatcgctgccccatgaagctgagccgccgtgatctacctgcacacttgcagcatgactgccccaagcggcgcctcaagtgcgagttttgtggctgtgacttcagtggggaggcctatgagagccatgagggtatgtgcccccaggagagtgtctactgtgagaataagtgtggtgcccgcatgat

SEQ ID NO: 22146 - DNA, 789 bp, Homo sapiens
  misc_feature 1..789: note = ENST00000586813
  source 1..789: mol_type = unassigned DNA; mol_type = unassigned DNA
cgccgctccagcgaggcgcgggctgtggggccgccgcgtgcctggccccgctcgcccgtgccggccgctcgcccgccatgcctggcttcgactacaagttcctggagaagcccaagcgacggctgctgtgcccactgtgcgggaagcccatgcgcgagcctgtgcaggtttccacctgcggccaccgtttctgcgatacctgcctgcaggagttcctcaggagtcttcaagtgccctgaggaccagcttcctctggactatgccaagatctacccagacccggagctggaagtacaagtattgggcctgcctatccgctgcatccacagtgaggagggctgccgctggagtgggccactacgtcatctacagggccacctgaatacctgcagcttcaatgtcattccctgccctaatcgctgccccatgaagctgagccgccgtgatctacctgcacacttgcagcatgactgccccaagcggcgcctcaagtgcgagttttgtggctgtgacttcagtggggaggcctatgagagccatgagggtatgtgcccccaggagagtgtctactgtgagaataagtgtggtgcccgcatgatgcggcggctgctggcccagcatgccacctctgagtgccccaagcgcactcagccctgcacctactgcactaaggagttcgtctttgacaccatccagagccaccagtaccagtgcccaaggctgcctgttgcctgccccaaccaatgtggtgtgggcactgtggctcgggaggacctgccaggccatctg

SEQ ID NO: 22147 - DNA, 1456 bp, Homo sapiens
  misc_feature 1..1456: note = ENST00000444415
  source 1..1456: mol_type = unassigned DNA; mol_type = unassigned DNA
gctccagcgaggcgcgggctgtggggccgccgcgtgcctggccccgctcgcccgtgccggccgctcgcccgccatgcctggcttcgactacaagttcctggagaagcccaagcgacggctgctgtgcccactgtgcgggaagcccatgcgcgagcctgtgcaggtttccacctgcggccaccgtttctgcgatacctgcctgcaggagttcctcagtgaaggagtcttcaagtgccctgaggaccagcttcctctggactatgccaagatctacccagacccggagctggaagtacaagtattgggcctgcctatccgctgcatccacagtgaggagggctgccgctggagtgggccactacgtcatctacagggccacctgaatacctgcagcttcaatgtcattccctgccctaatcgctgccccatgaagctgagccgccgtgatctacctgcacacttgcagcatgactgccccaagcggcgcctcaagtgcgagttttgtggctgtgacttcagtggggaggcctatgagagccatgagggtatgtgcccccaggagagtgtctactgtgagaataagtgtggtgcccgcatgatgcggcggctgctggcccagcatgccacctctgagtgccccaagcgcactcagccctgcacctactgcactaaggagttcgtctttgacaccatccagagccaccagtaccagtgcccaaggctgcctgttgcctgccccaaccaatgtggtgtgggcactgtggctcgggaggacctgccaggccatctgaaggacagctgtaacaccgccctggtgctctgcccattcaaagactccggctgcaagcacaggtgccctaagctggcaatggcacggcatgtggaggagagtgtgaagccacatctggccatgatgtgtgccctggtgagccggcaacggcaggagctgcaggagcttcggcgagagctggaggagctatcagtgggcagtgatggcgtgctcatctggaagattggcagctatggacggcggctacaggaggccaaggccaagcccaaccttgagtgcttcagcccagccttctacacacataagtatggttacaagctgcaggtgtctgcattcctcaatggcaatggcagtggtgagggcacacacctctcactgtacattcgtgtgctgcctggtgcctttgacaatctccttgagtggccctttgcccgccgtggcctgtctcccttcttgggtagggcagacatgccttggtgccggtcacactctacacggactgaggtgcctgctcaggtgctatgtcccaagagccataagggggtgggaattggggagggagaaagggtagttcaaagagtctgtcttgagatctgattttttccccctttacctagctgtgccccctctggttatttatttccttagtgccaggagggcacagca

SEQ ID NO: 22148 - DNA, 702 bp, Homo sapiens
  misc_feature 1..702: note = ENST00000394925
  source 1..702: mol_type = unassigned DNA; mol_type = unassigned DNA
gggctgtggggccgccgcgtgcctggccccgctcgcccgtgccggccgctcgcccgccatgcctggcttcgactacaagttcctggagaagcccaagcgacggctgctgtgcccactgtgcgggaagcccatgcgcgagcctgtgcaggtttccacctgcggccaccgtttctgcgatacctgcctgcaggagttcctcagtgaaggagtcttcaagtgccctgaggaccagcttcctctggactatgccaaggtgagtccacactgccaggaagaagcccaagcacagtctgttgcccttggaggccggagctgctggcagccagtgggctcagggccagtgtcaaccaaaagccttgggatggtgcgcctccacaaaggtagcctgttccctcccaccaggccagtttgcaaacgaggcccctgtttgccctggagggcatgcacaatgcccagcctgtaggggtgcacagagctgctctgtgcccgcaagaagtgttccctccccttccggtggcaagccagacctgtggctgagggccagtatccctccaccaggggaaaggaagcagagccccagggacagcctgggattgagcaggctgattggctgcctcttcaaaggaagcgtcctgtgcaggcatgttaggacccagcatcagagcagatgctgcctgctgtgcccttcatccctggactcaa

SEQ ID NO: 22149 - DNA, 683 bp, Homo sapiens
  misc_feature 1..683: note = ENST00000262396
  source 1..683: mol_type = unassigned DNA; mol_type = unassigned DNA
gctcgcccgtgccggccgctcgcccgccatgcctggcttcgactacaagttcctggagaagcccaagcgacggctgctgtgcccactgtgcgggaagcccatgcgcgagcctgtgcaggtttccacctgcggccaccgtttctgcgatacctgcctgcaggagttcctcagtgaaggagtcttcaagtgccctgaggaccagcttcctctggactatgccaagatctacccagacccggagctggaagtacaagtattgggcctgcctatccgctgcatccacagtgaggagggctgccgctggagtgggccactacgtcatctacagggccacctgaatacctgcagcttcaatgtcattccctgccctaatcgctgccccatgaagctgagccgccgtgatctacctgcacacttgcagcatgactgccccaagcggcgcctcaagtgcgagttttgtggctgtgacttcagtggggaggcctatgagagttctctgggctttggttatcccaagttcatctcccaccaggacattcgaaagcgaaactatgtgcgggatgatgcagtcttcatccgtgctgctgttgaactgccccggaagatcctcagctgagtgcaggtggggttcgaggggaaaggacgatggggcatgacctcagtcaggcactggctgaacttgg

SEQ ID NO: 22150 - DNA, 544 bp, Homo sapiens
  misc_feature 1..544: note = ENST00000475329
  source 1..544: mol_type = unassigned DNA; mol_type = unassigned DNA
tttctgcgatacctgcctgcaggagttcctcagtgaaggagtcttcaagtgccctgaggaccagcttcctctggactatgccaaggtgagtccacactgccaggaagaagcccaagcacagtctgttgcccttggaggccggagctgctggcagccagtgggctcagggccagtgtcaaccaaaagccttgggatggtgcgcctccacaaagatctacccagacccggagctggaagtacaagtattgggcctgcctatccgctgcatccacagtgaggagggctgccgctggagtgggccactacgtcatctacagggccacctgaatacctgcagcttcaatgtcattccctgccctaatcgctgccccatgaagctgagccgccgtgatctacctgcacacttgcagcatgactgccccaagcggcgcctcaagtgcgagttttgtggctgtgacttcagtggggaggcctatgagagccatgagggtatgtgcccccaggagagtgtctactgtgagaataagtgtggtgcccgcatgat

SEQ ID NO: 22151 - DNA, 825 bp, Homo sapiens
  misc_feature 1..825: note = ENST00000584944
  source 1..825: mol_type = unassigned DNA; mol_type = unassigned DNA
gtggccgcaagctgacctttgccctggttcttggcagaggaccttcctggggactgggcagccttcgcacttaatctcagcccatccctgttccccctcccagtcagctttcagcgcagccaatgaaaactaacctagggggagggggtgactgtgcagcgtgttcctttcccagtccagctgccatcctgggggagggggtgccagctgccacctgttggccaagtcctgactgaggcagctgtctgtgcctcctctaggcccagaccccccttcccaggacaggggctggggtcttctgggatcctggggaagtagagcccctcaggcctctgcttgcccttttgtctcatctaggctggttgggaaccggtctggtgaggaagggaggctgcctcagtggagggggtggggccaggcctccctttcccctaatgagaaacctttttcctgcccctcccccatttcagtgaaggagtcttcaagtgccctgaggaccagcttcctctggactatgccaagatctacccagacccggagctggaagtacaagtattgggcctgcctatccgctgcatccacagtgaggagggctgccgctggagtgggccactacgtcatctacagggccacctgaatacctgcagcttcaatgtcattccctgccctaatcgctgccccatgaagctgagccgccgtgatctacctgcacacttgcagcatgactgccccaagcggcgcctcaagtgcgagttttgtggctgtgacttcagtggggaggcctatgagagccatgagggtatgtgcccccaggagagtgtctac

SEQ ID NO: 22152 - DNA, 585 bp, Homo sapiens
  misc_feature 1..585: note = ENST00000473421
  source 1..585: mol_type = unassigned DNA; mol_type = unassigned DNA
ttcccaggacaggggctggggtcttctgggatcctggggaagtagagcccctcaggcctctgcttgcccttttgtctcatctaggctggttgggaaccggtctgtgaaggagtcttcaagtgccctgaggaccagcttcctctggactatgccaagatctacccagacccggagctggaagtacaagtattgggcctgcctatccgctgcatccacagtgaggagggctgccgctggagtgggccactacgtcatctacagggccacctgaatacctgcagcttcaatgtcattccctgccctaatcgctgccccatgaagctgagccgccgtgatctacctgcacacttgcagcatgactgccccaagcggcgcctcaagtgcgagttttgtggctgtgacttcagtggggaggcctatgagagccatgagggtatgtgcccccaggagagtgtctactgtgagaataagtgtggtgcccgcatgatgcggcggctgctggcccagcatgccacctctgagtgccccaagcgcactcagccctgcacctactgcactaaggagttcgtctttgacaccatccag

SEQ ID NO: 22153 - DNA, 672 bp, Homo sapiens
  misc_feature 1..672: note = ENST00000454852
  source 1..672: mol_type = unassigned DNA; mol_type = unassigned DNA
gaaggagtcttcaagtgccctgaggaccagcttcctctggactatgccaagatctacccagacccggagctggaagtacaagtattgggcctgcctatccgctgcatccacagtgaggagggctgccgctggagtgggccactacgtcatctacagggccacctgaatacctgcagcttcaatgtcattccctgccctaatcgctgccccatgaagctgagccgccgtgatctacctgcacacttgcagcatgactgccccaagcggcgcctcaaagccatgagggtatgtgcccccaggagagtgtctactgtgagaataagtgtggtgcccgcatgatgcggcggctgctggcccagcatgccacctctgagtgccccaagcgcactcagccctgcacctactgcactaaggagttcgtctttgacaccatccagagccaccagtaccagtgcccaaggctgcctgttgcctgccccaaccaatgtggtgtgggcactgtggctcgggaggacctgccaggccatctgaaggacagctgtaacaccgccctggtgctctgcccattcaaagactccggctgcaagcacaggtgccctaagctggcaatggcacggcatgtggaggagagtgtgaagccacatctggccatgatgtgtgccctggtgagcc

SEQ ID NO: 22154 - DNA, 484 bp, Homo sapiens
  misc_feature 1..484: note = ENST00000578917
  source 1..484: mol_type = unassigned DNA; mol_type = unassigned DNA
agagccccagggacagcctgggattgagcaggctgattggctgcctcttcaaaggaagcgtcctgtgcaggcatgttaggacccagcatcagagcagatgctgcctgctgtgcccttcatccctggactcaagaggggcaaagagcccaagagaggctattacaggctccaagatctacccagacccggagctggaagtacaagtattgggcctgcctatccgctgcatccacagtgaggagggctgccgctggagtgggccactacgtcatctacaggtgaggctctgatgtgagggctggcaccacctctcccttggcaggcactaattgcagccttcccaccagggccacctgaatacctgcagcttcaatgtcattccctgccctaatcgctgccccatgaagctgagccgccgtgatctacctgcacacttgcagcatgactgccccaagcggcgcctcaagtgcgagttttgtggctg

SEQ ID NO: 22155 - DNA, 788 bp, Homo sapiens
  misc_feature 1..788: note = ENST00000469529
  source 1..788: mol_type = unassigned DNA; mol_type = unassigned DNA
aagagaggctattacaggctccaaggtagagccagcccagttgggtctaggggtgggaactgggcactgcagtcagctctgaccctggccagttcccccatccctacccccagatctacccagacccggagctggaagtacaagtattgggcctgcctatccgctgcatccacagtgaggagggctgccgctggagtgggccactacgtcatctacagggccacctgaatacctgcagcttcaatgtcattccctgccctaatcgctgccccatgaagctgagccgccgtgatctacctgcacacttgcagcatgactgccccaagcggcgcctcaagtgcgagttttgtggctgtgacttcagtggggaggcctatgagagccatgagggtatgtgcccccaggagagtgtctactgtgagaataagtgtggtgcccgcatgatgcggcggctgctggcccagcatgccacctctgagtgccccaagcgcactcagccctgcacctactgcactaaggagttcgtctttgacaccatccagagccaccagtaccagtgcccaaggctgcctgttgcctgccccaaccaatgtggtgtgggcactgtggctcgggaggacctgccaggccatctgaaggacagctgtaacaccgccctggtgctctgcccattcaaagactccggctgcaagcacaggtgccctaagctggcaatggcacggcatgtggaggagagtgtgaagccacatctggccatgatgtgtgccctggtgagccggcaacggcag

SEQ ID NO: 22156 - DNA, 449 bp, Homo sapiens
  misc_feature 1..449: note = ENST00000580073
  source 1..449: mol_type = unassigned DNA; mol_type = unassigned DNA
gcggcgcctcaagtgcgagttttgtggctgtgacttcagtggggaggcctatgagagccatgagggtatgtgcccccaggagagtgtctactgtgagaataagtgtggtgcccgcatgatgcggcggctgctggcccagcatgccacctctgagtgccccaagcgcactcagccctgcacctactgcactaaggagttcgtctttgacaccatccagagccaccagtaccagtgcccaaggctgcctgttgcctgccccaaccaatgtggtgtgggcactgtggctcgggaggacctgccaggccatctgaaggacagctgtaacaccgccctggtgctctgcccattcaaagactccggctgcaagcacagggtgagatgccccttttcctgtcagcccccttttgcccttgaagccctagacagaggctcagcttctgatgtactta

SEQ ID NO: 22157 - DNA, 543 bp, Homo sapiens
  misc_feature 1..543: note = ENST00000618771
  source 1..543: mol_type = unassigned DNA; mol_type = unassigned DNA
accgccagtcggcgccgcccggagccgggagcgccgctccagcgaggcgcgggctgtggggccgccgcgtgcctggccccgctcgcccgtgccggccgctcgcccgccatgcctggcttcgactacaagttcctggagaagcccaagcgacggctgctgtgcccactgtgcgggaagcccatgcgcgagcctgtgcaggtttccacctgcggccaccgtttctgcgatacctgcctgcaggagttcctcagtgaaggagtcttcaagtggccctttgcccgccgtgtcaccttctccctgctggatcagagcgaccctgggctggctaaaccacagcacgtcactgagaccttccaccccgacccaaactggaagaatttccagaagccaggcacgtggcggggctccctggatgagagttctctgggctttggttatcccaagttcatctcccaccaggacattcgaaagcgaaactatgtgcgggatgatgcagtcttcatccgtgctgctgttgaactgccccggaagatcctcagctga

SEQ ID NO: 22158 - DNA, 4958 bp, Homo sapiens
  misc_feature 1..4958: note = ENST00000462410
  source 1..4958: mol_type = unassigned DNA; mol_type = unassigned DNA
agacgcacgtgagggaaatcagatgactggacttgtagatactaacggttctgaagcggaatggcttattcagaagagcataaaggtatgccctgtggtttcatccgccagaattccggcaactccatttccttggactttgagcccagtatagagtaccagtttgtggagcggttggaagagcgctacaaatgtgccttctgccactcggtgcttcacaacccccaccagacaggatgtgggcaccgcttctgccagcactgcatcctgtccctgagagaattaaacacagtgccaatctgccctgtagataaagaggtcatcaaatctcaggaggtttttaaagacaattgttgcaaaagagaagtcctcaacttatatgtatattgcagcaatgctcctggatgtaatgccaaggttattctgggccggtaccaggttggtattactcatgaacgatatctgcttttgccatttttccaggaatgtgtgttgaacccctttatgtgacagttactgagctaagcatggtacagggattcagtgaattgccctcaaggattcccagtctagcaatacaggtggctacagtgctgtagcccacctacggctgaggtgtgagtgaagaggttcgtcctgtatggagcgcatggaggacatcttgtatccactagaccttaattgtgtggtagggatcattgagccaaaagagagggcgtgggacatgctggacaaaacaaacactcaagaatatgccattttgggggaactgtgtgggacccagggcatgactacagaaagacacaattgtgaggtccttccccaaaagcatttgctctctcacttggtgctgtcgtaggtgtttcccagcaactgtgggacctggcctcatggggtttatgatctaacggagatcactcagaccaggacagagacaggctgtgggttaaaggtgaagcattgataggagagacaaaccaacaaggtgtaggggaaatgtgagtgaaggggaattgatgcctttcaaatgaagtgaccccagctgctcttccttccagctagggaaggtggttaaaggggaagctggaagtgtggcgctgcctggcaggcccatgtcaagtttgatcacactgcaagtgaacatgactcaggcttctctaacttctagggaattgctgagaggctgctgaaatttctcccgcacacccacacattttggaacacatatttcagatgattcagtcttttctctatcacacctccaaatccctcagggactgagcttataaatgtgtaaatgatttccttgttaatccaggaatttatttggaggttcatagaacttttgttatgttttcatgtgtcttttgccccttgttttgaatagtcgagtcctagagcaaggccttttttccaactttgttgtcactaagcctaaaaagtaagtgaggctcaaatggaccattgaacagctttagtgaccaaaactggcttatggagagcagggcctgggttctctccacctgtttcttttatatttcccctcattccttgtttcccacccacccacttctatggtaaggtgtagaatcttacaggtagcagagttttgatgaatgttgactgtttgggtgagagttgaggagtaatatcaaccaattttggagaagagatggattccaactgtgatcaccatatgattcttactaccagaggtgaaggagaatagctgcatttgtttatctcactgtcaaaaaactgtttgctttttcttctgagaagggatcagcaaactctcttaagagtcaaacaataataataataatcatcatcataatcataaaagagccagatagtaactattttaggctttgcaggccatacagtctctgtcacaattactcagctctcccattttagaggcaaagcagctatagacaatatgtgaaggaataggtgtggctcctctccaataaaactttaattataaaaacaagtagcaggccagatttggcctgtgagtcttagcttgccaattttgtcttaaaggaccctcagggggacaagttctctaacattttgttaacttgccagcatcacaataactgcagtgattcaaaggttttcactgagatatgcctgcttttaaacctctagaatgttggccaggcgtggtggttcatgcctgtaataccagcactttgggaggccgaggtgggcagattactggagatcaggagtttgagaccagcctggccaatgtggcaaaaccctgtctttactaataatacaaaaattagccgggcatggtagctggtgtctgtaatcccagctacttgggaggctgaggcaggagaatcgcttgaaacctgggaggcggaggttgcagtgagccaagattgcgccactgcacttcagcctgggtgacggtgcgagactctgtctaaaaaaaaaaaaaaacaaaaaaaaacctagaatgtccagcctggccaacatggtgaaaccctgtctctactaaaaatacaaaaattagctgggtgtggtgcacacctgtaatcccagctaatctggaggctgaggcacaagaagctcttcaacccaggaggtggaggttgcagtgaacggagattgcgccacttcactccagcttgggtgacagagagagaccctgactcaaaaataaaattaaaaaaaataaaatagaatgtgaagaaccctggaatgaacactgtccatgtaatcattctctaatattaaataatattaaatagtatatatagttatatattacatataatatattaaatactataatatattgtttataataaatacattattgacatgtaaataaatgtttatttttaataataaataacagaatatttaaaataacttttaaaataaaattagagaatatttaaaataaaatttaaataacttattatttgtgttacctaggctggagcgcagtggcacaatcatagctcactgcagcctcaaacttctggactcaactgatcctcccacctcagcctcctgtgtagttgggaccataggtgtacaccgcaacacttggctaattaaaaaaaaaaaattgtggagacaaggtattggggtctcactgtgttgcccaggctggacttgagtcctggccttaagtgatcctcccatctcagcctcccaaatttctgggattacaagcatgagccaccacacgtggccaataaagtattattaatggttaaaaatatttcctgactttaccagtctgaccattcctagcttctcttgggcttgcacacctatatttcctctgcctccttttctttatcatttctggaatagcttactgtcccttcttttcatcttcttaatcctttccctttcttccttgagttaggatatgcccttctctccttttttccttttcctgtgtccttttaccatctgctatgcagagacccatacctgatgctggaggttgggatgaagagtccacaaaagaaataaaaatgtccttgaagaactggtaaattaaggaaaatatccaagaactaacctgagaatatgagcacattattagatcatctaaaacaaacttggtgtacttccctcttcacctatcttcccctgtcctctgaatttcccccagccaagactggctttcccatctctggtacaagcagccctccccatgccctctcctcagcagagacagtgggcagcatcccctgagagcctaccctctgccttgccctgtgcaagcctttctgcccagctgcccaccctgttctctctccctccctaggccttccagctgacttctttcctaccaccctggtcagcaggtcccactggcctgttgttatctgttgcaggatcaccttcagcagtgcttatttcaacctgtgcagtgttctaatgagaagtgccgggagccagtcctacggaaagacctgaaagagcatttgagtgcatcctgtcagtttcgaaaggaaaaatgcctttattgcaaaaaggatgtggtagtcatcaatctacaggtgaaaaacaacacatacaacagtcatctttatggagctaaattatgcctgagtggtcacagtgaatcaggtggaatgccagaagaacattcctgcatttatttttgtacagaattaggtctaaagaatttgctttttggagagaagttctgtgaaaagcttaaaaccttcttgttggtagcactccatttattattggcaaaaatattatttgaacacatgctgtgtatgtgtaatgaatgctgggtgctgagtcacaaggaggtgacaataatgtctactctctgaattctgcagtgtagctggggaggcaggatgcaggcataaaaagaaagcatgggtaccttttacatgtcccgaaggagctatgctggcagttccccaatctaccttctttgaatcctgtgttctatgactttcttttggaataattggaaaatttaatattttaattaagttcatttacacctagaaagtggacatctttaatccttttttggaattaggcaataacttcctgtagagagtaagccacgtgacatataatccccaaagagacacaggtgtaatcactgtgaggccatgaaagacaaccctttgttttattgcactttctctatttcagaatcatgaggaaaacttgtgtcctgaatacccagtattttgtcccaacaattgtgcgaagattattctaaaaactgaggtagatgaacacctggctgtatgtcctgaagctgagcaagactgtccttttaagcactatggctgtgctgtaacggataaacggaggaacctgcagcaacatgagcattcagccttacgggagcacatgcgtttggttttagaaaagaatgtccaattagaagaacaggtaaatcttcaaaggttcaaataaaaagtgaggcaacagaa

SEQ ID NO: 22159 - DNA, 905 bp, Homo sapiens
  misc_feature 1..905: note = ENST00000488428
  source 1..905: mol_type = unassigned DNA; mol_type = unassigned DNA
gatgacggtctcagcctcctcccgaccccttcctgcgcgtccgctcttcccctgcgcccgcccgcgcccctccgcccgcgccccggccccgccccaggcctcgcctccgcttcgccgccgccgccggccgcagccaggagcagcagccgcgcctgcagaccggcctcgcggagcccgcgcgccgagccccacaatggcttattcagaagagcataaaggtatgccctgtggtttcatccgccagaattccggcaactccatttccttggactttgagcccagtatagagtaccagtttgtggagcggttggaagagcgctacaaatgtgccttctgccactcggtgcttcacaacccccaccagacaggatgtgggcaccgcttctgccagcactgcatcctgtccctgagagaattaaacacagtgccaatctgccctgtagataaagaggtcatcaaatctcaggaggtttttaaagacaattgttgcaaaagagaagtcctcaacttatatgtatattgcagcaatgctcctggatgtaatgccaaggttattctgggccggtaccaggtcccactggcctgttgttatctgttgcaggatcaccttcagcagtgcttatttcaacctgtgcagtgttctaatgagaagtgccgggagccagtcctacggaaagacctgaaagagcatttgagtgcatcctgtcagtttcgaaaggaaaaatgcctttattgcaaaaaggatgtggtagtcatcaatctacagaatcatgaggaaaacttgtgtcctgaatacccagtattttgtcccaacaattgtgcgaagattattctaaaaactgaggtagatgaacacctggctgtatgtcctgaagctgagcaagactgtccttttaagcactatg

SEQ ID NO: 22160 - DNA, 437 bp, Homo sapiens
  misc_feature 1..437: note = ENST00000494355
  source 1..437: mol_type = unassigned DNA; mol_type = unassigned DNA
aggagcagcagccgcgcctgcagaccggcctcgcggagcccgcgcgccgagccccacaatggcttattcagaagagcataaaggtatgccctgtggtttcatccgccagaattccggcaactccatttccttggactttgagcccagtatagagtaccagtttgtggagcggttggaagagcgctacaaatgtgccttctgccactcggtgcttcacaacccccaccagacaggatgtgggcaccgcttctgccagcactgcatcctgtccctgaggtgagtgggcagggcctgcaactctggccatggcagtcctagcatccaggtggcaactgtggccactcaactgttttcatgggttttggagttgttttacttggccacagaaccatgactgtaaggaaggactctcccagatcccctctgtgagggcctga

SEQ ID NO: 22161 - DNA, 3972 bp, Homo sapiens
  misc_feature 1..3972: note = ENST00000261464
  source 1..3972: mol_type = unassigned DNA; mol_type = unassigned DNA
gcagcagccgcgcctgcagaccggcctcgcggagcccgcgcgccgagccccacaatggcttattcagaagagcataaaggtatgccctgtggtttcatccgccagaattccggcaactccatttccttggactttgagcccagtatagagtaccagtttgtggagcggttggaagagcgctacaaatgtgccttctgccactcggtgcttcacaacccccaccagacaggatgtgggcaccgcttctgccagcactgcatcctgtccctgagagaattaaacacagtgccaatctgccctgtagataaagaggtcatcaaatctcaggaggtttttaaagacaattgttgcaaaagagaagtcctcaacttatatgtatattgcagcaatgctcctggatgtaatgccaaggttattctgggccggtaccaggatcaccttcagcagtgcttatttcaacctgtgcagtgttctaatgagaagtgccgggagccagtcctacggaaagacctgaaagagcatttgagtgcatcctgtcagtttcgaaaggaaaaatgcctttattgcaaaaaggatgtggtagtcatcaatctacagaatcatgaggaaaacttgtgtcctgaatacccagtattttgtcccaacaattgtgcgaagattattctaaaaactgaggtagatgaacacctggctgtatgtcctgaagctgagcaagactgtccttttaagcactatggctgtgctgtaacggataaacggaggaacctgcagcaacatgagcattcagccttacgggagcacatgcgtttggttttagaaaagaatgtccaattagaagaacagatttctgacttacacaagagcctagaacagaaagaaagtaaaatccagcagctagcagaaactataaagaaacttgaaaaggagttcaagcagtttgcacagttgtttggcaaaaatggaagcttcctcccaaacatccaggtttttgccagtcacattgacaagtcagcttggctagaagctcaagtgcatcaattattacaaatggttaaccagcaacaaaataaatttgacctgagacctttgatggaagcagttgatacagtgaaacagaaaattaccctgctagaaaacaatgatcaaagattagccgttttagaagaggaaactaacaaacatgatacccacattaatattcataaagcacagctgagtaaaaatgaagagcgatttaaactgctggagggtacttgctataatggaaagctcatttggaaggtgacagattacaagatgaagaagagagaggcggtggatgggcacacagtgtccatcttcagccagtccttctacaccagccgctgtggctaccggctctgtgctagagcatacctgaatggggatgggtcagggagggggtcacacctgtccctatactttgtggtcatgcgaggagagtttgactcactgttgcagtggccattcaggcagagggtgaccctgatgcttctggaccagagtggcaaaaagaacattatggagaccttcaaacctgaccccaatagcagcagctttaaaagacctgatggggagatgaacattgcatctggctgtccccgctttgtggctcattctgttttggagaatgccaagaacgcctacattaaagatgacactctgttcttgaaagtggccgtggacttaactgacctggaggatctctagtcactgttatggggtgataagaggacttcttggggccagaactgtggaggagagcacatttgattatcatattgacctggatttagactcaaagcacatttgtatttgcctttttccttaacgtttgaagtcagtttaaaacttctgaagtgctgtctttttacattttactctgtcccagtttgaaacttaaaactcttagaatattctcttattatttatatttttatatttcttgaaagatggtaagtttcttgaagtttttggggcgtttctcttttactggtgcttagcgcagtgtctcgggcactctaaatattgagtgttatggaggacacagaggtagcagaatcccagttgaaaatgttttgatattttattgtttggcctattgattctagacctggccttaagtctgcaaaagccatctttataaggtaggctgttccagttaagtagtgggtgatgtagttacaaagataatatgctcagtttggacctttttttcagttaaatgctaaatatatgaaaattactatacctctaagtattttcatgaaattcaccagcagtttgcaagcacagttttgcaaggctgcataagaactggtgaatggggtaagcattttcattcttcctgctgaagtaaagcagaaagtactgcatagtatatgagatatagccagctagctaaagttcagattttgttaggttcaaccctatgaaaaaaactattttcataggtcaaaaatggtaaaaaattagcagtttcataagattcaaccaaataaatatatatatacacacacacatacatatacacctatatatgtgtgtatacaaacagttcgaatgtattttggtgacagtaataaatcaatgtgaggatggatagaatttagtatatgatagagaaaatgtcataaatggataaaaggaatttacaacttgaggagaaaacctttacaatttcctatgggtgtcagaagtactctcagcgaaaactgatggctaaaacagtatctactattctctgataactttttttttgagacagagtttcattgtcacccaggctggagtacagtggcatgatctcagctcactgcaaactctgcctcccgaattcaagtgattctcctgcctcagcctcctgagtagctgggattacaggcgcccgtcaccacacccaggtaatttttgtatttttagtagagacggagttttgccatgttggccaagctgatctcaaactcctgacctcaagtgatctgcccgcctcggcctcccaaagtgctgagattacaggcatgacccaccgcgtcaagcctctgacaactattgaatttgtaagctgctatgcaaatgggcatttatataaacttgtgatgtttcttgtcagaattctgagtactctgtgaagaacagaaatgatcatattcttatgcatctatctgtatgggtctgaaggtgtatatacaaactgagatgagtccttatgactcttgataagcctgagtttaacaacaacaaaaatgccaagttgtcctgagcccttctgcgttgttatgccacttccctactgctcatatgcacgctggctcccctgggcacgcaaggatgagtatgggccatgggcccctgtagagctgcttacctggtgatgaccatgcaccttacaatttctgaacagttaaccctatagaagcatgctttatatgagtgtcttctgggaagaggaaccttcttaatctcttctgtgggattttcaaaatgctaaagactcacactgcagcaatcatcccagatgattaaattcaaagaaataggttcacaacaggaatatactgaagaactagagtgtcactgctggtgaactgtggcacggttgctcaacacatcacctcggacaaattcaggaagcatttctttagcccacaagtccagacccaggtgctctgtatgtttgtttttaatattcatcatatccaagttcactctgtcttcctgagcagtggaagatcatattgctgtaacttcttttaagtagttgatgtggaaaacattttaaagtgaatttgtcaaaatgctggttttgtgttttatccaacttttgtgcatatatataaagtatgtcatggcatggtttgcttaggagttcagagttccttcatcatcgaaatagtgattaagtgatcccagaacaaggaatactagagtaaaaagcacctctttttcacaaaa

SEQ ID NO: 22162 - DNA, 1827 bp, Homo sapiens
  misc_feature 1..1827: note = ENST00000367004
  source 1..1827: mol_type = unassigned DNA; mol_type = unassigned DNA
agtgcagggatgtgcagatgagtgggctgtggggtgtcctgctcacggtttcatggatgaatggcttattcagaagagcataaaggtatgccctgtggtttcatccgccagaattccggcaactccatttccttggactttgagcccagtatagagtaccagtttgtggagcggttggaagagcgctacaaatgtgccttctgccactcggtgcttcacaacccccaccagacaggatgtgggcaccgcttctgccagcactgcatcctgtccctgagagaattaaacacagtgccaatctgccctgtagataaagaggtcatcaaatctcaggaggtttttaaagacaattgttgcaaaagagaagtcctcaacttatatgtatattgcagcaatgctcctggatgtaatgccaaggttattctgggccggtaccaggatcaccttcagcagtgcttatttcaacctgtgcagtgttctaatgagaagtgccgggagccagtcctacggaaagacctgaaagagcatttgagtgcatcctgtcagtttcgaaaggaaaaatgcctttattgcaaaaaggatgtggtagtcatcaatctacagaatcatgaggaaaacttgtgtcctgaatacccagtattttgtcccaacaattgtgcgaagattattctaaaaactgaggtagatgaacacctggctgtatgtcctgaagctgagcaagactgtccttttaagcactatggctgtgctgtaacggataaacggaggaacctgcagcaacatgagcattcagccttacgggagcacatgcgtttggttttagaaaagaatgtccaattagaagaacagatttctgacttacacaagagcctagaacagaaagaaagtaaaatccagcagctagcagaaactataaagaaacttgaaaaggagttcaagcagtttgcacagttgtttggcaaaaatggaagcttcctcccaaacatccaggtttttgccagtcacattgacaagtcagcttggctagaagctcaagtgcatcaattattacaaatggttaaccagcaacaaaataaatttgacctgagacctttgatggaagcagttgatacagtgaaacagaaaattaccctgctagaaaacaatgatcaaagattagccgttttagaagaggaaactaacaaacatgatacccacattaatattcataaagcacagctgagtaaaaatgaagagcgatttaaactgctggagggtacttgctataatggaaagctcatttggaaggtgacagattacaagatgaagaagagagaggcggtggatgggcacacagtgtccatcttcagccagtccttctacaccagccgctgtggctaccggctctgtgctagagcatacctgaatggggatgggtcagggagggggtcacacctgtccctatactttgtggtcatgcgaggagagtttgactcactgttgcagtggccattcaggcagagggtgaccctgatgcttctggaccagagtggcaaaaagaacattatggagaccttcaaacctgaccccaatagcagcagctttaaaagacctgatggggagatgaacattgcatctggctgtccccgctttgtggctcattctgttttggagaatgccaagaacgcctacattaaagatgacactctgttcttgaaagtggccgtggacttaactgacctggaggatctctagtcactgttatggggtgataagaggacttcttggggccagaactgtggaggagagcacatttgattatcatattgacctggatttagactcaaa

SEQ ID NO: 22163 - DNA, 3491 bp, Homo sapiens
  misc_feature 1..3491: note = ENST00000473385
  source 1..3491: mol_type = unassigned DNA; mol_type = unassigned DNA
tttgtcattattacttttgctactgtgcatgtaacatttaatgtggtatggtgatcagtactctttggtggtagttttattttgttttaagagacaaggtgtcactatgttgcccaggctagactcaatctcctggactcaagtgatcctccccatcagcttcccaggtacctgagattacaggggcctggcttctgtggttgcttaataagtccatgttgaatgaatgaagagaaccagttcagtaaattcagtcaggtgatgtctgtcattaggtgaaccatcatagtaggttaggtatagaaaaggctgatgagaaattctgtagatgtggctttttggaaccacctgtgaatatcttcctataattatgtaggaatctaccctgtaaatattttcctagaaataaatatgtagattttttcctagaaatactttcttagctgcaagtgcatgcatattttaactatatgcatgcagttatattcagtgactttatttttcctcacgttcctgttattagatttctgacttacacaagagcctagaacagaaagaaagtaaaatccagcagctagcagaaactataaagaaacttgaaaaggagttcaagcagtttgcacagttgtttggcaaaaatggaagcttcctcccaaacatccaggtttttgccagtcacattgacaagtcagcttggctagaagctcaagtgcatcaattattacaaatggttaaccagcaacaaaataaatttgacctgagacctttgatggaagcagttgatacagtgaaacagaaaattaccctgctagaaaacaatgatcaaagattagccgttttagaagaggaaactaacaaacatgatacccacattaatattcataaagcacagctgagtaaaaatgaagagcgatttaaactgctggagggtacttgctataatggaaagctcatttggaaggtgacagattacaagatgaagaagagagaggcggtggatgggcacacagtgtccatcttcagccagtccttctacaccagccgctgtggctaccggctctgtgctagagcatacctgaatggggatgggtcagggagggggtcacacctgtccctatactttgtggtcatgcgaggagagtttgactcactgttgcagtggccattcaggcagagggtgaccctgatgcttctggaccagagtggcaaaaagaacattatggagaccttcaaacctgaccccaatagcagcagctttaaaagacctgatggggagatgaacattgcatctggctgtccccgctttgtggctcattctgttttggagaatgccaagaacgcctacattaaagatgacactctgttcttgaaagtggccgtggacttaactgacctggaggatctctagtcactgttatggggtgataagaggacttcttggggccagaactgtggaggagagcacatttgattatcatattgacctggatttagactcaaagcacatttgtatttgcctttttccttaacgtttgaagtcagtttaaaacttctgaagtgctgtctttttacattttactctgtcccagtttgaaacttaaaactcttagaatattctcttattatttatatttttatatttcttgaaagatggtaagtttcttgaagtttttggggcgtttctcttttactggtgcttagcgcagtgtctcgggcactctaaatattgagtgttatggaggacacagaggtagcagaatcccagttgaaaatgttttgatattttattgtttggcctattgattctagacctggccttaagtctgcaaaagccatctttataaggtaggctgttccagttaagtagtgggtgatgtagttacaaagataatatgctcagtttggacctttttttcagttaaatgctaaatatatgaaaattactatacctctaagtattttcatgaaattcaccagcagtttgcaagcacagttttgcaaggctgcataagaactggtgaatggggtaagcattttcattcttcctgctgaagtaaagcagaaagtactgcatagtatatgagatatagccagctagctaaagttcagattttgttaggttcaaccctatgaaaaaaactattttcataggtcaaaaatggtaaaaaattagcagtttcataagattcaaccaaataaatatatatatacacacacacatacatatacacctatatatgtgtgtatacaaacagttcgaatgtattttggtgacagtaataaatcaatgtgaggatggatagaatttagtatatgatagagaaaatgtcataaatggataaaaggaatttacaacttgaggagaaaacctttacaatttcctatgggtgtcagaagtactctcagcgaaaactgatggctaaaacagtatctactattctctgataactttttttttgagacagagtttcattgtcacccaggctggagtacagtggcatgatctcagctcactgcaaactctgcctcccgaattcaagtgattctcctgcctcagcctcctgagtagctgggattacaggcgcccgtcaccacacccaggtaatttttgtatttttagtagagacggagttttgccatgttggccaagctgatctcaaactcctgacctcaagtgatctgcccgcctcggcctcccaaagtgctgagattacaggcatgacccaccgcgtcaagcctctgacaactattgaatttgtaagctgctatgcaaatgggcatttatataaacttgtgatgtttcttgtcagaattctgagtactctgtgaagaacagaaatgatcatattcttatgcatctatctgtatgggtctgaaggtgtatatacaaactgagatgagtccttatgactcttgataagcctgagtttaacaacaacaaaaatgccaagttgtcctgagcccttctgcgttgttatgccacttccctactgctcatatgcacgctggctcccctgggcacgcaaggatgagtatgggccatgggcccctgtagagctgcttacctggtgatgaccatgcaccttacaatttctgaacagttaaccctatagaagcatgctttatatgagtgtcttctgggaagaggaaccttcttaatctcttctgtgggattttcaaaatgctaaagactcacactgcagcaatcatcccagatgattaaattcaaagaaataggttcacaacaggaatatactgaagaactagagtgtcactgctggtgaactgtggcacggttgctcaacacatcacctcggacaaattcaggaagcatttctttagcccacaagtccagacccaggtgctctgtatgtttgtttttaatattcatcatatccaagttcactctgtcttcctgagcagtggaagatcatattgctgtaacttcttttaagtagttgatgtggaaaacattttaaagtgaatttgtc

SEQ ID NO: 22164 - DNA, 3972 bp, Homo sapiens
  misc_feature 1..3972: note = ENST00000336184
  source 1..3972: mol_type = unassigned DNA; mol_type = unassigned DNA
agacgcacgtgagggaaatcagatgactggacttgtagatactaacggttctgaagcggaatggcttattcagaagagcataaaggtatgccctgtggtttcatccgccagaattccggcaactccatttccttggactttgagcccagtatagagtaccagtttgtggagcggttggaagagcgctacaaatgtgccttctgccactcggtgcttcacaacccccaccagacaggatgtgggcaccgcttctgccagcactgcatcctgtccctgagagaattaaacacagtgccaatctgccctgtagataaagaggtcatcaaatctcaggaggtttttaaagacaattgttgcaaaagagaagtcctcaacttatatgtatattgcagcaatgctcctggatgtaatgccaaggttattctgggccggtaccaggatcaccttcagcagtgcttatttcaacctgtgcagtgttctaatgagaagtgccgggagccagtcctacggaaagacctgaaagagcatttgagtgcatcctgtcagtttcgaaaggaaaaatgcctttattgcaaaaaggatgtggtagtcatcaatctacagaatcatgaggaaaacttgtgtcctgaatacccagtattttgtcccaacaattgtgcgaagattattctaaaaactgaggtagatgaacacctggctgtatgtcctgaagctgagcaagactgtccttttaagcactatggctgtgctgtaacggataaacggaggaacctgcagcaacatgagcattcagccttacgggagcacatgcgtttggttttagaaaagaatgtccaattagaagaacagatttctgacttacacaagagcctagaacagaaagaaagtaaaatccagcagctagcagaaactataaagaaacttgaaaaggagttcaagcagtttgcacagttgtttggcaaaaatggaagcttcctcccaaacatccaggtttttgccagtcacattgacaagtcagcttggctagaagctcaagtgcatcaattattacaaatggttaaccagcaacaaaataaatttgacctgagacctttgatggaagcagttgatacagtgaaacagaaaattaccctgctagaaaacaatgatcaaagattagccgttttagaagaggaaactaacaaacatgatacccacattaatattcataaagcacagctgagtaaaaatgaagagcgatttaaactgctggagggtacttgctataatggaaagctcatttggaaggtgacagattacaagatgaagaagagagaggcggtggatgggcacacagtgtccatcttcagccagtccttctacaccagccgctgtggctaccggctctgtgctagagcatacctgaatggggatgggtcagggagggggtcacacctgtccctatactttgtggtcatgcgaggagagtttgactcactgttgcagtggccattcaggcagagggtgaccctgatgcttctggaccagagtggcaaaaagaacattatggagaccttcaaacctgaccccaatagcagcagctttaaaagacctgatggggagatgaacattgcatctggctgtccccgctttgtggctcattctgttttggagaatgccaagaacgcctacattaaagatgacactctgttcttgaaagtggccgtggacttaactgacctggaggatctctagtcactgttatggggtgataagaggacttcttggggccagaactgtggaggagagcacatttgattatcatattgacctggatttagactcaaagcacatttgtatttgcctttttccttaacgtttgaagtcagtttaaaacttctgaagtgctgtctttttacattttactctgtcccagtttgaaacttaaaactcttagaatattctcttattatttatatttttatatttcttgaaagatggtaagtttcttgaagtttttggggcgtttctcttttactggtgcttagcgcagtgtctcgggcactctaaatattgagtgttatggaggacacagaggtagcagaatcccagttgaaaatgttttgatattttattgtttggcctattgattctagacctggccttaagtctgcaaaagccatctttataaggtaggctgttccagttaagtagtgggtgatgtagttacaaagataatatgctcagtttggacctttttttcagttaaatgctaaatatatgaaaattactatacctctaagtattttcatgaaattcaccagcagtttgcaagcacagttttgcaaggctgcataagaactggtgaatggggtaagcattttcattcttcctgctgaagtaaagcagaaagtactgcatagtatatgagatatagccagctagctaaagttcagattttgttaggttcaaccctatgaaaaaaactattttcataggtcaaaaatggtaaaaaattagcagtttcataagattcaaccaaataaatatatatatacacacacacatacatatacacctatatatgtgtgtatacaaacagttcgaatgtattttggtgacagtaataaatcaatgtgaggatggatagaatttagtatatgatagagaaaatgtcataaatggataaaaggaatttacaacttgaggagaaaacctttacaatttcctatgggtgtcagaagtactctcagcgaaaactgatggctaaaacagtatctactattctctgataactttttttttgagacagagtttcattgtcacccaggctggagtacagtggcatgatctcagctcactgcaaactctgcctcccgaattcaagtgattctcctgcctcagcctcctgagtagctgggattacaggcgcccgtcaccacacccaggtaatttttgtatttttagtagagacggagttttgccatgttggccaagctgatctcaaactcctgacctcaagtgatctgcccgcctcggcctcccaaagtgctgagattacaggcatgacccaccgcgtcaagcctctgacaactattgaatttgtaagctgctatgcaaatgggcatttatataaacttgtgatgtttcttgtcagaattctgagtactctgtgaagaacagaaatgatcatattcttatgcatctatctgtatgggtctgaaggtgtatatacaaactgagatgagtccttatgactcttgataagcctgagtttaacaacaacaaaaatgccaagttgtcctgagcccttctgcgttgttatgccacttccctactgctcatatgcacgctggctcccctgggcacgcaaggatgagtatgggccatgggcccctgtagagctgcttacctggtgatgaccatgcaccttacaatttctgaacagttaaccctatagaagcatgctttatatgagtgtcttctgggaagaggaaccttcttaatctcttctgtgggattttcaaaatgctaaagactcacactgcagcaatcatcccagatgattaaattcaaagaaataggttcacaacaggaatatactgaagaactagagtgtcactgctggtgaactgtggcacggttgctcaacacatcacctcggacaaattcaggaagcatttctttagcccacaagtccagacccaggtgctctgtatgtttgtttttaatattcatcatatccaagttcactctgtcttcctgagcagtggaagatcatattgctgtaacttcttttaagtagttgatgtggaaaacattttaaagtgaatttgtcaaaatgctggttttgtgttttatccaacttttgtgcatatatataaagtatgtcatggcatggtttgcttaggagttcagagttccttcatcatcgaaatagtgattaagtgatcccagaacaaggaatactagagtaaaaagcacctctttttc

SEQ ID NO: 22165 - DNA, 4770 bp, Homo sapiens
  misc_feature 1..4770: note = ENST00000334268
  source 1..4770: mol_type = unassigned DNA; mol_type = unassigned DNA
ctctagagtgccaaaaaagaaaaaaaaaagtgctgaagagtcctagggagatgaggctatttttgtttgaagctgatacttctagctgagccacaagtgctgcttggaaagggcttaggttgtttccagggggagaactctgcagaggagaggcaaagttcaacaggacaacaaagaagcagcagaaacagccaggaaaacgaagagcccccaggttttgacacagaaccctccaccagagttctcaaatccccaaatactctgcaaagtgcaacttgacgggaacttttcaactgacttttacttttgacgaccaccatgactgagatcactgctgaaggaaatgcatctacaaccacaactgtgatagacagcaaaaatggatctgtgcccaaatcccccggaaaagtgctgaagaggacagtcacagaagacatagtgacgacgttcagctcccctgcagcctggcttctggtcattgccctgataatcacgtggtcagctgttgccatcgttatgtttgatttagtggattacaaaaacttttcagcaagctctattgccaagattggctcagatcctttaaaactggtacgtgatgctatggaggaaaccacggactggatctatggcttcttttctttgttatctgacatcatctcatctgaagatgaagaagatgatgatggtgacgaagatactgataaaggagaaatagatgagcctcccttgagaaaaaaagaaatacacaaagataagactgaaaaacaagagaaacctgaaaggaaaatacaaactaaagttacacacaaagaaaaagaaaaaggaaaagaaaaagtaagagaaaaagaaaaacctgaaaagaaagcaactcacaaggaaaaaattgagaaaaaagaaaaaccagaaacaaagacactggcgaaagaacagaagaaagctaagactgcagaaaagagtgaagaaaagactaaaaaggaagtgaaaggtggaaaacaggagaaagtgaagcaaacagctgcaaaagtaaaagaagtacagaaaacaccatcaaaacccaaagaaaaggaggacaaagagaaagcagctgtgtcaaagcatgaacagaaagatcagtatgcattctgtcgatatatgattgacatatttgtccatggggatttaaaaccaggacaaagcccagccattccacctcccttaccgacagaacaagcttccagacccactccggcatcacctgcccttgaagaaaaagaaggggaaaagaagaaggctgagaagaaagttacttctgaaacaaaaaagaaagaaaaagaagatatcaaaaagaaaagtgagaaggaaactgccattgatgtggaaaaaaaagagccgggaaaagcttctgaaaccaaacaagggactgtaaaaattgcagcacaagcagcagctaagaaggatgaaaagaaggaagattccaagaaaacaaaaaaacctgcagaagtagaacaacccaagggaaaaaaacaggaaaagaaagaaaaacatgtggaaccagcaaagtcaccaaagaaagaacactcagttccaagtgacaaacaagtaaaagcaaaaactgaacgagccaaagaggagattggtgcggtttcaattaaaaaagctgtacctggaaagaaggaagagaaaacaaccaagacagtggagcaagaaattagaaaagaaaaatctgggaagacttcttcaattctgaaagataaagaacctattaaagggaaagaagagaaagttccagcttccctaaaggaaaaagaacctgaaactaaaaaagatgaaaagatgtccaaagcaggcaaagaagtcaagcctaaacctccacaactacaaggaaaaaaggaagagaagccagagccccaaattaaaaaagaagcaaaaccagctatatctgaaaaagtgcaaatacacaaacaagacatagtgaaaccagaaaagactgtttctcatggtaaaccagaagaaaaagttctcaagcaggtaaaagctgtcacaatagaaaaaacagccaagcccaaaccaacaaaaaaagctgaacatcgagaaagagaacctccatctataaaaacagacaaaccaaaaccaactccaaaaggaacatcagaagtcacagaatcaggaaagaagaaaactgaaatatctgaaaaagaaagtaaagaaaaagcagacatgaagcatcttagagaagaaaaagtctcaacaagaaaagaaagtcttcaattacacaatgtgacaaaagcagaaaaacctgcaagagtatcaaaagatgttgaagatgtaccagcttcaaagaaagctaaagaaggaactgaagatgtgtctcccacaaagcagaaaagtcccatcagtttcttccagtgtgtctacttggatgggtacaatggctatggatttcagtttcctttcactcctgcagaccgccctggagagagctctggtcaagcaaattctccaggacagaagcaacaaggacagtaaacacacatgtatgacccttacaagtgctttaagattttaaaaatgtgatgttttgtccacagtagttcaggcaattaagaatatgcaacccagagaatttctgtgaaaacattttgctctttggcctggtgtggacggaaagggtggccaaatggattgagtgatgagcagacatgtttaagggtctaagtctcaagaatctgttatgtgtgtttgctgcggtgggagggggtgcttgtatttatcttatttccagtcactataaggttgtacacaaactaatttaaagtttacttaataatggtatctttaaaataattgacacaattgcaaaatgaattcctggcttcagttagctattatttttttaatgacaacatagactgtgctctaagtttaaaagatggggaagcttatataaaagtgacccttttgcatcatatgggtatctaaacttaatttacccaataagttgatgcttaatgattttattttatttttgtctatttctattttagttgtggctttgctctaagaatgggtaatagttgtactacagactgctataaatttcttgtgatactcttttagagctcaaaatatctctgagctttagacatggtaaggtggagagtaaatgcttgataaatctttaagatatgtcttgaatgataattaggacattcagtccagtggaaatacaccattcaattagtcaggtctggtgaatcgtttgtttaaaatattagcaaatgagatgtggaattctgaaatttctccagactgtgtcttaataaaaatgtcacctgggtgaaattttagatcaatcactaaatttgggtgacaaatataaaaatattttcatttcactttaatacattctttctgtgaagtaaaatgtttttctttctcataatggcaaaatatgaatgccatcaaagtttaaggaattcattttagccttaaatgccttcgtgagatgtcttacttgtattttaggtaactggtcatcagtgccaatgacatggataacaatttttaatctactcgacagtgcatccctgggaatgactgttatgtttttgtcatattcctggtaatataaatactcgtgttctttactacattgtttttatcaactctaaaagtcatgcctctgtgacctttatcatgtttacaattgcaactgaacttatgacaaattaactcaggaaataaattgagttatcctttctagcattgtaattaccatcagcaaggcctgagatagccagagccaatactagccaagtgatttattttcaaggattgccactaactacggttctttaggaccaagatataaaacagtcactaaaaatcattaggctaggtatcagtaatacattcattactaataatgcatttttggagacttttgtgaaagaagttggtctctgccaaaagctggtggaccacattcacaccacgaaagccagtgtcacatgaaccagattaatgactctctttatggggtatgtgggacatcctggaagtgtataatttcaggaatgaccagacaataccatcttgcaaagccccttcaggtgacaatctaaacttgtgggtaggagagtgcataaagtttattgctcaactgctcctccagcctgctgaatttactgagtaaagaaatagcaaatatgatagatgttttagatttcatagaacagaatggtttgtccattaattctttcattcaatgactgtttattgaatacctactcttttagggcgctgtgttaggtgctgtattgtacaagaaaaatataataaattagattcccagcgctattctgacatagtgaatgaccttgaaaaatttactaaacatactatgtttgtttctccatgagtaaaatagggatatagggacaaacagtctaatatctcatagaaataccatggagacaaataaaatattttaatataaatatgatattaaagtaaatttctgaagtaatacttttgggtatggcactagtttttcctctgactattttactgtttctttcactctcaatataaaaactatttgataagataaaacgatatattttattgtaattagaatttagacaaatcagctataatgtaaaaatgttaataataattacgttttatctgattaaagttacaatgatcatagcactttaaaaatattatctgaactgtcatttgtttatatattaccgtctaataaaatagttatagatcttccaa

SEQ ID NO: 22166 - DNA, 1661 bp, Homo sapiens
  misc_feature 1..1661: note = ENST00000628709
  source 1..1661: mol_type = unassigned DNA; mol_type = unassigned DNA
gaaacagccaggaaaacgaagagcccccaggttttgacacagaaccctccaccagagttctcaaatccccaaatactctgcaaagtgcaacttgacgggaacttttcaactgacttttacttttgacgaccaccatgactgagatcactgctgaaggaaatgcatctacaaccacaactgtgatagacagcaaaaatggatctgtgcccaaatcccccggaaaagtgctgaagaggacagtcacagaagacatagtgacgacgttcagctcccctgcagcctggcttctggtcattgccctgataatcacgtggtcagctgttgccatcgttatgtttgatttagtggattacaaaaacttttcagcaagctctattgccaagattggctcagatcctttaaaactggtacgtgatgctatggaggaaaccacggactggatctatggcttcttttctttgttatctgacatcatctcatctgaagatgaagaagatgatgatggtgacgaagatactgataaaggagaaatagatgagcctcccttgagaaaaaaagaaatacacaaagataagactgaaaaacaagagaaacctgaaaggaaaatacaaactaaagttacacacaaagaaaaagaaaaaggaaaagaaaaagtaagagaaaaagaaaaacctgaaaagaaagcaactcacaaggaaaaaattgagaaaaaagaaaaaccagaaacaaagacactggcgaaagaacagaagaaagctaagactgcagaaaagagtgaagaaaagactaaaaaggaagtgaaaggtggaaaacaggagaaagtgaagcaaacagctgcaaaagtaaaagaagtacagaaaacaccatcaaaacccaaagaaaaggaggacaaagagaaagcagctgtgtcaaagcatgaacagaaaggacaaagcccagccattccacctcccttaccgacagaacaagcttccagacccactccggcatcacctgcccttgaaggcaagtacttttttttttcttaaagatctctattgtagataaaatagaatgtagaggaacagcaacaacaaaaatagtcacaaagaaacagcaaaatccaatattttcttaaatacttttagtatgtctaaactatacttttcctaaaattgcaatttgcttcttttagaaaaccaaaaatgtccccttaagattctatattggtgaccctcagcttccagaaggatgcccactctagcactttgggaatcaagcaaaaaaatatagggacaaatagataaggctatgccttgcaactctgggagttttaccacaacttgatcaatttagtctctgaagaggctggtgccagatttgctgggtttgaatctgagctccaccttttcctagctttgtaaatttggaaagttatttaaattaactcttcatgagttttgccatctctaagatgatataagcagagcactgatctcctagcgttattgtgaggattgaaatatatatatacacacacactcacacacacacaaatactgttttatgtatatgtatagtttataagtactatatacaactggtggttaatactactaataattcttgaaaatatgatgtctcaagatcagctttgtaataaattttgctggaacgttaaa

SEQ ID NO: 22167 - DNA, 766 bp, Homo sapiens
  misc_feature 1..766: note = ENST00000361029
  source 1..766: mol_type = unassigned DNA; mol_type = unassigned DNA
ttacacacaaagaaaaagaaaaaggaaaagaaaaagtaagagaaaaagaaaaacctgaaaagaaagcaactcacaaggaaaaaattgagaaaaaagaaaaaccagaaacaaagacactggcgaaagaacagaagaaagctaagactgcagaaaagagtgaagaaaagactaaaaaggaagtgaaaggtggaaaacaggagaaagtgaagcaaacagctgcaaaagtaaaagaagtacagaaaacaccatcaaaacccaaagaaaaggaggacaaagagaaagcagctgtgtcaaagcatgaacagaaagggttcccaggtcctgggatcagaaactccagctattactgccagtacatcaaagggcaaatcaatgcatggaatgacctgaggactagcctccttcccattccctacctctcctgtgggaaaatgtgctccaatttcaacaactaaaatacatctaaatttttggaactttatgagttttggcctgcccttatttaggtattaatgaaaaagattatatttttatatcttcttcaataactatatttattttttaaagacctaacagaatttcataataaaatggattcctctaaaaatgctgttactactctaaaaagaacgagatttacaaaaatccttagaggtgtatctgtttagtaacaagctttgttatttcatatgtttgatatgcataatttggagcaattaagaatgtaacatgttgcttaaattcaataaactctcttggtcctaaa

SEQ ID NO: 22168 - DNA, 1294 bp, Homo sapiens
  misc_feature 1..1294: note = ENST00000542443
  source 1..1294: mol_type = unassigned DNA; mol_type = unassigned DNA
gtttccagggggagaactctgcagaggagaggcaaagttcaacaggacaacaaagaagcagcagaaacagccaggaaaacgaagagcccccaggttttgacacagaaccctccaccagagttctcaaatccccaaatactctgcaaagtgcaacttgacgggaacttttcaactgacttttacttttgacgaccaccatgactgagatcactgctgaaggaaatgcatctacaaccacaactgtgatagacagcaaaaatggatctgtgcccaaatcccccggaaaagtgctgaagaggacagtcacagaagacatagtgacgacgttcagctcccctgcagcctggcttctggtcattgccctgataatcacgtggtcagctgttgccatcgttatgtttgatttagtggattacaaaaacttttcagcaagctctattgccaagattggctcagatcctttaaaactggtacgtgatgctatggaggaaaccacggactggatctatggcttcttttctttgttatctgacatcatctcatctgaagatgaagaagatgatgatggtgacgaagatactgataaaggagaaatagatgagcctcccttgagaaaaaaagaaatacacaaagataagactgaaaaacaagagaaacctgaaaggaaaatacaaactaaagaagttggacacagctcttgagtacggattgactaagcgaaccatgactgaactggctctgtgtttctatctgctgaaggttaaacagaaactcaactggttccacaccatttgggtccctgctgtttttttcttgcagactgtgctattaatttaataacagtgctgctggagtggcggtagtaatgtagatggcaccatttgcattttggacctggctatattagaattctgatgtcaaagaccgagcagtgggctgtagagtaggtttattaaactagcaagtcttccataattaagacagtgaatttggctgaagtctaaaataaatttctcaaagactgagctggagattatcaacctgaatatatttcttgagtagaccaaatatgttttgtaaaagtaactatttcttaagaaagtgaaagtagagcttcagttgctccacactgagctggaaatcagagagagcttatgttttccacagtttttctgtgtgaatatgaacaaaagatttcactttattgcttagtttcccgtctgtaaatggggtagactaatgcctgctctttattctcaaatagttcagtgaaaataaatgttttgctttacaa

SEQ ID NO: 22169 - DNA, 776 bp, Homo sapiens
  misc_feature 1..776: note = ENST00000422596
  source 1..776: mol_type = unassigned DNA; mol_type = unassigned DNA
aaatacacaaagataagactgaaaaacaagagaaacctgaaaggaaaatacaaactaaagattggtcagccaattcttcaacaatcagaacattgaagctcactcagttgaaacctatttatatttgtacttaggaaactaatgtctccttactgttctctttccttttttcggttcttaattcctttgatcacagaagttggacacagctcttgagtacggattgactaagcgaaccatgactgaactggctctgtgtttctatctgctgaaggttaaacagaaactcaactggttccacaccatttgggtccctgctgtttttttcttgcagactgtgctattaatttaataacagtgctgctggagtggcggtagtaatgtagatggcaccatttgcattttggacctggctatattagaattctgatgtcaaagaccgagcagtgggctgtagagtaggtttattaaactagcaagtcttccataattaagacagtgaatttggctgaagtctaaaataaatttctcaaagactgagctggagattatcaacctgaatatatttcttgagtagaccaaatatgttttgtaaaagtaactatttcttaagaaagtgaaagtagagcttcagttgctccacactgagctggaaatcagagagagcttatgttttccacagtttttctgtgtgaatatgaacaaaagatttcactttattgcttagtttcccgtctgtaaatggggtagactaatgcctgctctttattctcaaa

SEQ ID NO: 22170 - DNA, 1179 bp, Homo sapiens
  misc_feature 1..1179: note = ENST00000546248
  source 1..1179: mol_type = unassigned DNA; mol_type = unassigned DNA
ctctagagtgccaaaaaagaaaaaaaaaagtgctgaagagtcctagggagatgaggctatttttgtttgaagctgatacttctagctgagccacaagtgctgcttggaaagggcttaggttgtttccagggggagaactctgcagaggagaggcaaagttcaacaggacaacaaagaagcagcagaaacagccaggaaaacgaagagcccccaggttttgacacagaaccctccaccagagttctcaaatccccaaatactctgcaaagtgcaacttgacgggaacttttcaactgacttttacttttgacgaccaccatgactgagatcactgctgaaggaaatgcatctacaaccacaactgtgatagacagcaaaaatggatctgtgcccaaatcccccggaaaagtgctgaagaggacagtcacagaagacatagtgacgacgttcagctcccctgcagcctggcttctggtcattgccctgataatcacgtggtcagctgttgccatcgttatgtttgatttagtggattacaaaaacttttcagcaagctctattgccaagattggctcagatcctttaaaactggtacgtgatgctatggaggaaaccacggactggatctatggcttcttttctttgttatctgacatcatctcatctgaagatgaagaagatgatgatggtgacgaagatactgataaaggagaaatagatgagcctcccttgagaaaaaaagaaatacacaaagataagactgaaaaacaagagaaacctgaaaggaaaatacaaactaaagttacacacaaagaaaaagaaaaaggaaaagaaaaagtaagagaaaaagaaaaacctgaaaagaaagcaactcacaaggaaaaaattgagaaaaaagaaaaaccagaaacaaagacactggcgaaagaacagaagaaagctaagactgcagaaaagagtgaagaaaagactaaaaaggaagtgaaaggtggaaaacaggagaaagtgaagcaaacagctgcaaaagtaaaagaagtacagaaaacaccatcaaaacccaaagaaaaggaggacaaagagaaagcagctgtgtcaaagcatgaacagaaaggtaaacattcagagcaggaggctgccggaggttctaagagaatattgggcaagaagcacatgcagtga

SEQ ID NO: 22171 - DNA, 2771 bp, Homo sapiens
  misc_feature 1..2771: note = ENST00000264029
  source 1..2771: mol_type = unassigned DNA; mol_type = unassigned DNA
gccgaaggtgcctgggcttgctcattcagtcacagtcacagccaccatgccagggaggacctgggagctgtgcctgctactgctgctggggctgggactggggtcccaggaggccctacccccaccctgtgagagtgagatttactgccacggggagctcctaaaccaagttcaaatggccaagctctaccaggatgacaagcagtttgtggacatgccactgtctatagctccagaacaagtcctgcagaccttcactgagctgtccagggaccacaatcacagcatccccagggagcagctgcaggcgtttgtccacgaacacttccaggccaaggggcaggagctgcagccctggacccctgcagactggaaagacagcccccagttcctgcagaagatttcagatgccaaactgcgtgcctgggcagggcagctgcatcagctctggaagaagctggggaagaagatgaagccagaggttctcagccaccctgagcggttctctctcatctactcagaacatcccttcattgtgcctggcggtcgctttgttgagttctactactgggactcctactgggtcatggagggtctgctcctctcagagatggctgagacggtgaagggcatgctgcagaacttcttggacctggtgaaaacctatgggcatgtccccaatggtgggcgcgtgtactacctgcagcggagccagcccccactcttgaccctcatgatggattgctacttgactcacaccaatgacaccgcctttctacaggaaaacattgaaacactagccttggaattggacttttggaccaagaacaggactgtctctgtgagcttggagggaaagaactacctcctgaatcgctattatgtcccttatgggggacccaggcctgagtcctacagcaaagatgtggagttggctgacaccttgccagaaggagaccgggaggctctgtgggctgagctcaaggctggggctgagtctggctgggacttctcttcacgctggctcattggaggcccaaaccccaactcgcttagcggcatccgaacaagcaaactggtgcctgttgacctgaatgccttcctatgccaagcagaggagctgatgagcaacttctattccaggctggggaacgactcccaggccacgaagtacagaatcctgcggtcgcagcgcttggccgccctgaacacagtcctgtgggatgagcagaccggagcctggttcgattacgaccttgagaagaagaagaaaaaccgggagttttacccatccaacctcactccactctgggccgggtgtttctctgaccctggcgtggcggacaaggctctgaaatacctggaggacaaccggatcctgacttaccagtatgggatcccgacctctctccagaagacaggccagcagtgggatttccccaatgcctgggcccccctgcaggacctggtcatcagaggcctggccaaggcacctttacgtcgggcccaggaagtggctttccagctggctcagaattggatccgaaccaattttgatgtctactcgcagaagtcagccatgtatgagaagtatgacgtcagcaacggtggacagcccggtgggggaggagaatatgaagttcaggagggatttggctggacgaatggcgtggtcctgatgctgctggaccgctatggtgaccggctgacctcaggggccaagctggctttcctggagccccactgcctggcggccacccttctgcccagcctcctgctcagcctcctgccatggtgacagccctcctctcctcacctggccccagctcctgccccattaaacctctgcaccagttcctgccttcccctgcctcttcatgccctcctacctcccagcctgtcctcagagcgaagtggagggcagggtcacgacctggaggtcatgggtaggggcctagctccctcctggaaccttgaatagggtggaaatcctgctctggagggaagacctatccccaagtgcctcagcgccaagccccacaccggccttccactcacttccgtagtccaaaggctttattgttctgctgaaatgcttacaaatactgaaaacccccagcctgggcccaggcaaccaagggctcaatgctgggaaggagagcaggggaggtgggcttagtgttaaggcgtgaagggcgaggccagacagctggaggcctggtcctccactctccatttccatcacccttcggaggctgaaggaagggcggcggcaccacagggcccttcccctctgctgcatcatctcctgctcaggctttctctctaggagcattggaggaatcctctttccctgtcggaaactcaacactgtacagaactccaaccataacccttctagcttcctctcccaactgcatcgctcctcctctgttccatagatcccccggcttcatcccttctggctctaagcaaggcaccagtggaagggagagggctggactggggggctggcagcctgtgcatcagggctgaagacacaggcagggggaaggaaaaaggtattcagtcccttccccccagcatgagatgcccaggggcctgggctggagagatgatggcacgtaccctcagatggcccacagctgaagcagtgggctgggccacagagctgcagcaattagtatgtaaccatggcaatgaagcagtcactatggtaaccatggtgatgagtctgcaactaggggatggagctgggacctcaaggttga

SEQ ID NO: 22172 - DNA, 1723 bp, Homo sapiens
  misc_feature 1..1723: note = ENST00000613915
  source 1..1723: mol_type = unassigned DNA; mol_type = unassigned DNA
attcagtcacagtcacagccaccatgccagggaggacctgggagctgtgcctgctactgctgctggggctgggactggggtcccaggaggccctacccccaccctgtgagagaacaagtcctgcagaccttcactgagctgtccagggaccacaatcacagcatccccagggagcagctgcaggcgtttgtccacgaacacttccaggccaaggggcaggagctgcagccctggacccctgcagactggaaagacagcccccagttcctgcagaagatttcagatgccaaactgcgtgcctgggcagggcagctgcatcagctctggaagaagctggggaagaaggtatcagcgtcctgggcctgcccaaggcctgaccaagggaactgaagagaggaatgtgcctggggcccacagtgtcttcggagcacagatcagggactcctactgggtcatggagggtctgctcctctcagagatggctgagacggtgaagggcatgctgcagaacttcttggacctggtgaaaacctatgggcatgtccccaatggtgggcgcgtgtactacctgcagcggagccagcccccactcttgaccctcatgatggattgctacttgactcacaccaatgacaccgcctttctacaggaaaacattgaaacactagccttggaattggacttttggaccaagaacaggactgtctctgtgagcttggagggaaagaactacctcctgaatcgctattatgtcccttatgggggacccaggcctgagtcctacagcaaagatgtggagttggctgacaccttgccagaaggagaccgggaggctctgtgggctgagctcaaggctggggctgagtctggctgggacttctcttcacgctggctcattggaggcccaaaccccaactcgcttagcggcatccgaacaagcaaactggtgcctgttgacctgaatgccttcctatgccaagcagaggagctgatgagcaacttctattccaggctggggaacgactcccaggccacgaagtacagaatcctgcggtcgcagcgcttggccgccctgaacacagtcctgtgggatgagcagaccggagcctggttcgattacgaccttgagaagaagaagaaaaaccgggagttttacccatccaacctcactccactctgggccgggtgtttctctgaccctggcgtggcggacaaggctctgaaatacctggaggacaaccggatcctgacttaccagtatgggatcccgacctctctccagaagacaggccagcagtgggatttccccaatgcctgggcccccctgcaggacctggtcatcagaggcctggccaaggcacctttacgtcgggcccaggaagtggctttccagctggctcagaattggatccgaaccaattttgatgtctactcgcagaagtcagccatgtatgagaagtatgacgtcagcaacggtggacagcccggtgggggaggagaatatgaagttcaggagggatttggctggacgaatggcgtggtcctgatgctgctggaccgctatggtgaccggctgacctcaggggccaagctggctttcctggagccccactgcctggcggccacccttctgcccagcctcctgctcagcctcctgccatggtgacagccctcctctcctcacctggccccagctcctgccccattaaacctctgcaccagt

SEQ ID NO: 22173 - DNA, 1718 bp, Homo sapiens
  misc_feature 1..1718: note = ENST00000397925
  source 1..1718: mol_type = unassigned DNA; mol_type = unassigned DNA
gtgcctgggcttgctcattcagtcacagtcacagccaccatgccagggaggacctgggagctgtgcctgctactgctgctggggctgggactggggtcccaggaggccctacccccaccctgtgagagtgagatttactgccacggggagctcctaaaccaagttcaaatggccaagctctaccaggatgacaagcagtttgtggacatgccactgtctatagctccagaacaagtcctgcagaccttcactgagctgtccagggaccacaatcacagcatccccagggagcagctgcaggcgtttgtccacgaacacttccaggccaaggggcaggagctgcagccctggacccctgcagactggaaagacagcccccagttcctgcagaagatttcagatgccaaactgcgtgcctgggcagggcagctgcatcagctctggaagaagctggggaagaagatgaagccagaggttctcagccaccctgagcggttctctctcatctactcagaacatcccttcattgtgcctggcggtcgctttgttgagttctactactgctatgggcatgtccccaatggtgggcgcgtgtactacctgcagcggagccagcccccactcttgaccctcatgatggattgctacttgactcacaccaatgacaccgcctttctacaggaaaacattgaaacactagccttggaattggacttttggaccaagaacaggactgtctctgtgagcttggagggaaagaactacctcctgaatcgctattatgtcccttatgggggacccaggcctgagtcctacagcaaagatgtggagttggctgacaccttgccagaaggagaccgggaggctctgtgggctgagctcaaggctggggctgagtctggctgggacttctcttcacgctggctcattggaggcccaaaccccaactcgcttagcggcatccgaacaagcaaactggtgcctgttgacctgaatgccttcctatgccaagcagaggagctgatgagcaacttctattccaggctggggaacgactcccaggccacgaagtacagaatcctgcggtcgcagcgcttggccgccctgaacacagtcctgtgggatgagcagaccggagcctggttcgattacgaccttgagaagaagaagaaaaaccgggagttttacccatccaacctcactccactctgggccgggtgtttctctgaccctggcgtggcggacaaggctctgaaatacctggaggacaaccggatcctgacttaccagtatgggatcccgacctctctccagaagacaggccagcagtgggatttccccaatgcctgggcccccctgcaggacctggtcatcagaggcctggccaaggcacctttacgtcgggcccaggaagtggctttccagctggctcagaattggatccgaaccaattttgatgtctactcgcagaagtcagccatgtatgagaagtatgacgtcagcaacggtggacagcccggtgggggaggagaatatgaagttcaggagggatttggctggacgaatggcgtggtcctgatgctgctggaccgctatggtgaccggctgacctcaggggccaagctggctttcctggagccccactgcctggcggccacccttctgcccagcctcctgctcagcctcctgccatggtgacagccctcctctcctcacct

SEQ ID NO: 22174 - DNA, 1521 bp, Homo sapiens
  misc_feature 1..1521: note = ENST00000531295
  source 1..1521: mol_type = unassigned DNA; mol_type = unassigned DNA
agtcacagtcacagccaccatgccagggaggacctgggagctgtgcctgctactgctgctggggctgggactggggtcccaggaggccctacccccaccctgtgagagtgagatttactgccacggggagctcctaaaccaagttcaaatggccaagctctaccaggatgacaagcagtttgtggacatgccactgtctatagctccagaacaagtcctgcagaccttcactgagctgtccagggaccacaatcacagcatccccagggagcagctgcaggcgtttgtccacgaacacttccaggccaaggggcaggagctgcagccctggacccctgcagactggaaagacagcccccagttcctgcagaagatttcagatgccaaactgcgtgcctgggcagggcagctgcatcagctctggaagaagctggggaagaagatgaagccagaggttctcagccaccctgagcggttctctctcatctactcagaacatcccttcattgtgcctggcggtcgctttgttgagttctactactgggactcctactgggtcatggagggtctgctcctctcagagatggctgagacggtgaagggcatgctgcagaacttcttggacctggtgaaaacctatgggcatgtccccaatggtgggcgcgtgtactacctgcagcggagccagcccccactcttgaccctcatgatggattgctacttgactcacaccaatgacaccgcctttctacaggaaaacattgaaacactagccttggaattggacttttggaccaagaacaggactgtctctgtgagcttggagggaaagaactacctcctgaatcgctattatgtcccttatgggggacccaggtgaggaactgggcagcccacccctcaatctcttacctgctcactctggttagagcatcacaatgccccgggcaggaggaggagtgacttagcctggcctctcagatggtgacaccgagagccctctgcaatcctgggctgtggggcccaagggcagctggatcaagatggctcagcctcttcttgaccacagaggggcttagtagctactagtgccaggctgcccacctctcctctttgccaggcctgagtcctacagcaaagatgtggagttggctgacaccttgccagaaggagaccgggaggctctgtgggctgagctcaaggctggggctgagtctggctgggacttctcttcacgctggctcattggaggcccaaaccccaactcgcttagcggcatccgaacaagcaaactggtgcctgttgacctgaatgccttcctatgccaagcagaggagctgatgagcaacttctattccaggctggggaacgactcccaggccacgaagtacagaatcctgcggtcgcagcgcttggccgccctgaacacagtcctgtgggatgagcagaccggagcctggttcgattacgaccttgagaagaagaagaaaaaccgggagttttacccatccaacctcactc

SEQ ID NO: 22175 - DNA, 535 bp, Homo sapiens
  misc_feature 1..535: note = ENST00000527558
  source 1..535: mol_type = unassigned DNA; mol_type = unassigned DNA
caggctgtgcccagcaagccgaaggtgcctgggcttgctcattcagtcacagtcacagccaccatgccagggaggacctgggagctgtgcctgctactgctgctggggctgggactggggtcccaggaggccctacccccaccctgtgagagaacaagtcctgcagaccttcactgagctgtccagggaccacaatcacagcatccccagggagcagctgcaggcgtttgtccacgaacacttccaggccaaggggcaggagctgcagccctggacccctgcagactggaaagacagcccccagttcctgcagaagatttcagatgccaaactgcgtgcctgggcagggcagctgcatcagctctggaagaagctggggaagaaggtatcagcgtcctgggcctgcccaaggcctgaccaagggaactgaagagaggaatgtgcctggggcccacagtgtcttcggagcacagatcaggtttcctttcctgagaaaccagtccctggcccctgggtccccaaatagaggccctct

SEQ ID NO: 22176 - DNA, 1012 bp, Homo sapiens
  misc_feature 1..1012: note = ENST00000373122
  source 1..1012: mol_type = unassigned DNA; mol_type = unassigned DNA
ccttggctggggaagggtggcatggagcctctccggctgctcatcttactctttgtcacagagctgtccggagcccacaacaccacagtgttccagggcgtggcgggccagtccctgcaggtgtcttgcccctatgactccatgaagcactgggggaggcgcaaggcctggtgccgccagctgggagagaagggcccatgccagcgtgtggtcagcacgcacaacttgtggctgctgtccttcctgaggaggtggaatgggagcacagccatcacagacgataccctgggtggcactctcaccattacgctgcggaatctacaaccccatgatgcgggtctctaccagtgccagagcctccatggcagtgaggctgacaccctcaggaaggtcctggtggaggtgctggcagaccccctggatcaccgggatgctggagatctctggttccccggggagtctgagagcttcgaggatgcccatgtggagcacagcatctccaggccatctcaaggctcccatctgccttcttgtctctccaaggagcctcttggaaggagaaatccccttcccacccacttccatccttctcctcctggcctgcatctttctcatcaagattctagcagccagcgccctctgggctgcagcctggcatggacagaagccagggacacatccacccagtgaactggactgtggccatgacccagggtatcagctccaaactctgccagggctgagagacacgtgaaggaagatgatgggaggaaaagcccaggagaagtcccaccagggaccagcccagcctgcatacttgccacttggccaccaggactccttgttctgctctggcaagagactactctgcctgaacactgcttctcctggaccctggaagcagggactggttgagggagtggggaggtggtaagaacacctgacaacttctgaatattggacattttaaacacttacaaataaatccaagactgtcatatttagctggata

SEQ ID NO: 22177 - DNA, 1044 bp, Homo sapiens
  misc_feature 1..1044: note = ENST00000373113
  source 1..1044: mol_type = unassigned DNA; mol_type = unassigned DNA
tgacatgcctgatcctctcttttctgcagttcaagggaaagacgagatcttgcacaaggcactctgcttctgcccttggctggggaagggtggcatggagcctctccggctgctcatcttactctttgtcacagagctgtccggagcccacaacaccacagtgttccagggcgtggcgggccagtccctgcaggtgtcttgcccctatgactccatgaagcactgggggaggcgcaaggcctggtgccgccagctgggagagaagggcccatgccagcgtgtggtcagcacgcacaacttgtggctgctgtccttcctgaggaggtggaatgggagcacagccatcacagacgataccctgggtggcactctcaccattacgctgcggaatctacaaccccatgatgcgggtctctaccagtgccagagcctccatggcagtgaggctgacaccctcaggaaggtcctggtggaggtgctggcagaccccctggatcaccgggatgctggagatctctggttccccggggagtctgagagcttcgaggatgcccatgtggagcacagcatctccaggagcctcttggaaggagaaatccccttcccacccacttccatccttctcctcctggcctgcatctttctcatcaagattctagcagccagcgccctctgggctgcagcctggcatggacagaagccagggacacatccacccagtgaactggactgtggccatgacccagggtatcagctccaaactctgccagggctgagagacacgtgaaggaagatgatgggaggaaaagcccaggagaagtcccaccagggaccagcccagcctgcatacttgccacttggccaccaggactccttgttctgctctggcaagagactactctgcctgaacactgcttctcctggaccctggaagcagggactggttgagggagtggggaggtggtaagaacacctgacaacttctgaatattggacattttaaacacttacaaataaatccaagactgtcatatttagctggat

SEQ ID NO: 22178 - DNA, 860 bp, Homo sapiens
  misc_feature 1..860: note = ENST00000338469
  source 1..860: mol_type = unassigned DNA; mol_type = unassigned DNA
gggcagcgcctgacatgcctgatcctctcttttctgcagttcaagggaaagacgagatcttgcacaaggcactctgcttctgcccttggctggggaagggtggcatggagcctctccggctgctcatcttactctttgtcacagagctgtccggagcccacaacaccacagtgttccagggcgtggcgggccagtccctgcaggtgtcttgcccctatgactccatgaagcactgggggaggcgcaaggcctggtgccgccagctgggagagaagggcccatgccagcgtgtggtcagcacgcacaacttgtggctgctgtccttcctgaggaggtggaatgggagcacagccatcacagacgataccctgggtggcactctcaccattacgctgcggaatctacaaccccatgatgcgggtctctaccagtgccagagcctccatggcagtgaggctgacaccctcaggaaggtcctggtggaggtgctggcagaccccctggatcaccgggatgctggagatctctggttccccggggagtctgagagcttcgaggatgcccatgtggagcacagcatctccagggctgagagacacgtgaaggaagatgatgggaggaaaagcccaggagaagtcccaccagggaccagcccagcctgcatacttgccacttggccaccaggactccttgttctgctctggcaagagactactctgcctgaacactgcttctcctggaccctggaagcagggactggttgagggagtggggaggtggtaagaacacctgacaacttctgaatattggacattttaaacacttacaaataaatccaagactgtcatatttagctggat

SEQ ID NO: 22179 - DNA, 590 bp, Homo sapiens
  misc_feature 1..590: note = ENST00000548156
  source 1..590: mol_type = unassigned DNA; mol_type = unassigned DNA
agaagagaaggcattcctgacccaaagagcatcagaagaaaagtccatataaacttgcttaccttatcacattagagcctgtttgtttgctgcaggagaaagcaaagggcaagataaaacctgaagacacagaagaaagatgggatcaataatagaacatggcttggtgaagagaagagaaactgaggcacaagtgttatgtggtcaagatcatacagctaataggtggcagtctgactccaagtctgtgcttttcactgctgtgctatgccactaaaggtacgattatatgcaagacctgatgctatcagaagaggatccggggactatgctctccatataacaaagagattaatagaattttatgaagactactttaaagtgccctattccttgccaaaactagatcttttagctgtgcctaagcatccgtatgctgctatggagaactggggactaagtatttttgtggaacaaagaatactgctggatcccagtgtttcatctatttcttatttgctggatgtcaccatggtcattgttcatgagatatgtcaccagtggtttggtgaccttgtgacgcctgtgtg

SEQ ID NO: 22180 - DNA, 10733 bp, Homo sapiens
  misc_feature 1..10733: note = ENST00000261180
  source 1..10733: mol_type = unassigned DNA; mol_type = unassigned DNA
aagaaaaagaagaagaaaaagaagaggaagaagaagaaggaggaggaggaggaggaggagggggccgagaagagcagctcacccttcgcagccgcgatgggggaagacgacgccgcgcttcgggctggcagcagggggctctccgacccgtgggcagactcagtgggagtgcgaccccgcaccacggagcgccacatcgccgtacacaagcggcttgtgctggccttcgctgtgtccctcgtggcattgctcgcggtcacaatgctcgctgtgctgctcagcctgcgcttcgacgagtgcggggcgagtgccacgccaggcgccgacggtggcccctcaggctttccggagcgcggcggcaacgggagcctccctggatcggcccggcgcaaccaccacgcaggcggggactcctggcagcccgaggcgggtggggtggccagtccggggaccacgtcggcccagccgccgtcggaggaggagcgggagccgtgggagccgtggacgcagctgcgcctgtcgggccacctgaagccgctgcactacaatctgatgctcaccgccttcatggagaacttcaccttctccggggaggtcaacgtggagatcgcgtgccggaacgccacccgctacgtagtgctgcacgcttcccgagtggcggtggagaaagtgcagctggccgaggaccgggcgttcggggctgtccctgtagccggttttttcctctacccgcaaacccaggtcttagtggtggtgctgaataggacactggacgcgcagaggaattacaatctgaagattatctacaacgcgctcatcgagaatgagctcctgggcttcttccgcagctcctatgtgctccacggggagagaagattccttggtgttactcagttttcgcctacacatgccagaaaggcatttccttgttttgatgagccaatctacaaggctactttcaaaatcagcatcaagcatcaagcaacctatttatctttatctaatatgccagtggaaacttccgtgtttgaggaagatggatgggttacggatcacttttcacagacccctctcatgtccacatattatttagcctgggcaatttgcaacttcacatacagagaaactaccaccaagagtggggttgtagtacgattatatgcaagacctgatgctatcagaagaggatccggggactatgctctccatataacaaagagattaatagaattttatgaagactactttaaagtgccctattccttgccaaaactagatcttttagctgtgcctaagcatccgtatgctgctatggagaactggggactaagtatttttgtggaacaaagaatactgctggatcccagtgtttcatctatttcttatttgctggatgtcaccatggtcattgttcatgagatatgtcaccagtggtttggtgaccttgtgacgcctgtgtggtgggaagacgtgtggctgaaggaagggtttgctcactactttgaatttgttggtacagactacctctatcctggctggaacatggaaaagcagaggtttctgaccgatgttctgcatgaagtgatgctgctggacggtttggccagttcccatccagtatcacaggaagtgctgcaggcaacagatattgacagggtgtttgactggatcgcatataaaaagggtgctgctttaataagaatgctggctaattttatgggccattcagttttccagaggggtttgcaagattatttaaccattcataagtatggtaatgcagccagaaatgatctctggaatacattatcggaggctttaaaaagaaatgggaaatatgtaaatatacaagaagtaatggatcagtggacactccagatgggttatcctgttatcaccatcttgggaaacacaacagcagaaaatagaataataattacccaacagcattttatctatgatatcagtgctaaaactaaagcacttaaacttcagaataacagttacctgtggcagattccattaactattgtggtaggaaatagaagccatgtgtcttcagaagcaattatttgggtgtctaacaaatcagagcaccacagaataacttatttggacaaaggaagctggctgctggggaacatcaatcaaactggctattttagagtcaactatgacctaaggaactggagattattaattgatcaattaatccggaatcatgaggttctttctgtcagtaaccgagcgggcttgatcgatgatgccttcagcctagccagggctggctatttgcctcagaatattcctctggagattatcagatacctgtctgaggagaaggattttcttccttggcatgctgccagccgagctctttatcctctagataaattactggaccgcatggaaaactacaacattttcaatgaatatattttaaagcaagttgcaacaacatatatcaagcttgggtggccgaaaaataattttaatggatctcttgttcaagcatcctaccaacatgaagaactacgtagagaagttataatgctggcctgcagttttggcaacaagcactgtcaccaacaggcatcaacacttatttcagattggatttccagcaacaggaacagaataccactaaatgttagagacatcgtatactgtacaggagtgtcactactggatgaggatgtctgggaattcatatggatgaaattccattccaccacagcagtttctgagaagaaaatattattggaagccttaacttgcagtgatgacaggaatttattaaacaggcttctaaatctgtcactgaattctgaggtggtgctggatcaagatgcaattgatgtcataatccatgtagctcgaaatccacatggtcgagaccttgcctggaagtttttcagggataaatggaagatattaaataccaggtatggagaagcattgtttatgaattccaaactcatcagtggtgtcacagaatttcttaatactgaaggtgaactcaaagagctcaagaacttcatgaaaaactatgatggggtagctgctgcttctttctcacgagctgtggaaactgtcgaagccaatgtgcgctggaaaatgctttaccaagacgagcttttccaatggttaggaaaagctctaagacactaatatatgtatcttataaacaaacaattcaactcagaagtttatgagaagacacgctttttgtggaatgaggaaaatgtactacctagaaaatggccagattttcagtgttaacgtgtgggaggaattttttttttagtttttattttttggttttgggggatattttttatttgtttcattcattctgttctgtttctctactgggtgttcctctctaaagaaactcttgcaagtgaaactagccatgattgcttcagctgtacattccttgctgtacaggaccaaatatgatagtgatgcatgttgatgttacagtcaatttggaaaaacatattcagaatatctgtgcatggatatattgtcctgcctgtgttccagcatgcttatttcaaacgtccagtgttgtgtgtgaatatgtgttacacctaggatgggcattatgcaaaagcacaaagattatatatgacaatcagtattgcaatgaaagaaaaactaaaaacagaaatgatattctcaattttgggcaatgtgagaggtaaaatagcccttgacatgatgaacatcacttatttcagcacttggattgtctggcaatgattactgtgttgctaactcattttctttgagttaaagctgtgtatacattttaaaaggcatatagatagtgtatgcatatgtatatgtacatagggaagccccatatgtatatagtatgttgtacactgcacatgtacaaagaatgtcttcagatcaaagaaaatttatctctttttataaacttaaggacagttgcaaaaggcttcaaggaatttatctcaacattattctttctatgtcctaactaaatttctcaactgttatgaatttttcatctacttcttgaacagtggtctattctgctacatgaagatgaatacaaacaaaatttttgtataaactactattccagttctcctgtgtcagtcttgcctatagattttgccatcgttttctgtcaaagttccttttgcatgaaacaattatgcaaacttataattattagtgctgaaaaagagtttattttccatcttgtttgttttcctaccttatgctgagtagtccagagagttaaaaaaattctctgcatgttggtcttttaagtctgttttgctctaatcctccattaagcgagcatacctcaagtgggtctattagcatttaatgaccttttgtgccagttgtgccatcccttaagatgaaaagttccttttcttgtgttaatgtacaaagcttttcttttggcactgacaactgtgttctacctgggaattttgaatagccattttcatggctgtgtgttgtgtaacacaaatgtttttaaatggtattctcacccagtaggccagctctccaaacgttgcttagatgcttcaaaattagcatattttaagtttaccagtataaaataccaatgcaactactctacatagccaaatgtttgtaaatcacgtcttattttcctgaggtttttcactccaccaaatcttacaaatcattgaaagaaatatattctaacagtacgcactgaatagtgaaaataattagacattttaagaaccagagccatagaattattttaaattagtagaaaagaggagctatttccgaatctatagaataaagtaccacctaaaactgaattttatcatataagcaagtaatacctattagtcatacctaaatttttcagcacttcattcaattaaaatacatgaattttaaatattttacatgatgtgaataggcatgataatacttttagtataaaatctaaactttttccatttatcagaaatgataaaatccagttaccacatatcacgtttataaaatccttaattaaatgagtaacttctaaaatataacaatactaaatatcacactgcgatggaggtcccaaatatgtggtctatcaccactgaattcatgtaatagataagaaaaaaattagaggtggatgtcttgttttgtgtcatgaattactaaaatctcttagtagttgtggtatatttttgagtaaaattaccatttccagatttgagtttgaagggcttttatagttgtattttcctcctcactgttaataatcataatcctttttcagtattttagtggccttgaacaactggtttatctacaatctcaaatcctaagtgtataattatgtgcaatgttcaatacctcatataatacttgctcaacagtatagtggtaccaatggcattaagatggtgtttttgttctacatatttttcaataatttattctttctaatgttgaaattatatcaggctttaccggtttttttagttgtttaaataagtaatattttcaaaagaataaaataaccaatgatatctcttggaataatctgtaaaacgtagttataaaattctattttctacttagagtttttatcttttcttttttgtcggctttacaaattatatgtatgcatgaaataactaactgttgaaagtgtccaacctccagccatagcaatttgctgtgccaatatgtgtacaaaaaagtagtttcaattagaaaggacaacattatttatcacattgagtattaaacatttccaggtaactcgtaaataaaaagatttccccatttttacacattttttcttaaaatttttctataatctttgaagtttctaaaatacacaatctcaacctctaagactaacatctacaatactaggtctattcttgagtttcaataacatgtattttagttgggtcataaacttgcattattttatattatctccaggacaattatatcataggactaagatttttgtgatagtattatttacaaatattataagtataatatcttgtgaggctattattaaggttatgccatgtattgataaaatgcattgctttctcaaagaactgttacacattttgttttatttgactcatcacaaaaacataataaatgttgtgagccctaatattctgatgagaaaactggggctcaggtagcaacatgagctatttaaaactacaaaatagggctgggcacagtggctcatgcctgtaatcccagcactttgggaggctgagggtgggaggatcacttgagcccaggggtttgagaccagtctgggaaacatattgaggccccatttctataaaaataaaaatgaaaactagccaggcatggtggtgtgcacctgttgtcccagctactggggaggctgaggtgggagaattatttaagtccaaaagttcagtgctctagtgagctatgatcactgtactccagcctgggtgacagagtgagatcctgtctctaaaaaaataaaataaaatcacaatgtttgttgttattttgggaaccaatataacaacctaagtctatcacaacatcattccccaactaaaatataaatatatgttgaaaatatctctatcgattgcattaattggagattttccaaatactagaccagcatcaaaatacacagttaaatatatttgcaataattccattgtttgttaacttttgcatttctaatttgcaggatgttaaacaactggatgaaatgttatgatttaatttggtcagtataaataatcaaatattgggacaaataatttaattcatttagtttattaattatatttcctgtctgtatcttttattgaacattgtttaaacataaccttaaagtactgataatttgcttaattttcaacacaaatttatctgacaaattctgtctatagtaacagatggtcagaatgcagataaattgtgtgcatctcaatcagtaaaaataatattcagtaaaatgtctataaatctatgcagattaagttgtgaaaaacaatgcaattttagtactactggattagatgcagtaaaggaatccctaaggaagtttacaataatatatttaattaaaatctactggcaattagaattttaaggaattcttttctaagaagttggagaacctaaaatagcttgcttattcgcctgggtactctcatgaagtaaccatgtacacctaataaagaaatagtaaaagcacatataatgaaaaataattaagatttcttacacctgattttttcattatcagagataattatcagagataatttttcattatcagagatcatagctgaattatcatttgacaatacataagaatatatattgtatagatacaatatataactatacttaaagaaatatttattgagcatcttttatttcacaaggcacttagtgagggaaaggaatacagagatgaatatggcctgaaggaatgaactcatattacaataaatgaaaaagaaaaagaaataatgaaccaagggaatgagggcaacaggaaaaataattccttgctacagacgggaagtcaatcatttttaggtatacataatattatacaactatttttgtacactagttctcaaaacatttatgatacctagtataatttttattgtttgatttcctagtgcttacttgtgttttacagaaatatgttacattttgaaattataataaaataatagagtttaaactctaataattggaatataaattgggatggaatttatccttaagaaaagctgtttaaacaatttagtagtattagtaagttgcaggaatactttaatctacttacgaaaaagtagttcaagttttctaaaatggtttcagcatactatcggtatctcacaatgtgttaattttaagttaattatatattctttaaagcagattaaataatacttgtcctaagcataatttatttgttgaaattagtatatgtgaacttatgaaaaaatgttcttgtaaattattctagaatcccaaattttaattatataagaacaaccttttgttcaattgctttgaactaatgatgaagttttttaaaatattaagtattttatttaatgtgatatagattcaggaaaagtctaacaaaaatgtacttcagtagttttatttttattttgtgaaattttattttaaagtttaggtaaggaaagtttttaaactgtcttaaatatttaataaaagcagttgttaaaaatatatgttctaatgttaactatatgacatatatgccattgcatgcattttgttttttaaataggtttttcaccactggccccactagtagatgattttaccccagattttgaaaacataccactttaatggcctttatttcaaatacttcgtactttagggatagtattttgaagatgtttatcttttgtacattcctagttcatttattaatgtactaagaaaaagaaaacaaaatgactgattcttttgttttgaattaaatgtttgtgctgtattaatgttaagtgagttaagataaagggaagctacaaaaatttgaatgcctactaaatgctaggcactttataggtgtcttctaatatatgtctattggtatcacatcaattaataaccctgtgaaatgtcattagctctaattcaccaaagagtagatggaggcagagttgttatcagtttacataattaattagtggtattcacttggattcaaaactctgcaaactgaagccttatatagctcaaactagtcattaatctgccctcagcatgtatgaaaacataatgtttatccgtacagaccattctctatagcagatttgaataggtacttagcacactttatcattgtcactggctctttcgaaagaagtattaatttgtgcattctggtttaccattcatttcttaacaaagttgctttatacgttccataaaaagttttcatgaaaacattttacattagcatgttgtgtagtgggttttaagttataacaggtaattaacagatatttcggccaacgagacacacacacacatgaaaaaaataagtgaaaagacagaataaattgcaaaggttttacgagtggaccacaaagttaaggttaaacttctgtctttgcatgtggaggagacatattagtctagccagaactttccttttgcttagcagtgaggtcagagaagtatctctgtcattctgcttagaagtatacatggactgcaattgcttaatttacttaaacttaacattttcaatgggtttgctgtgtgaagatacagtctaagataagtgctttgacttgcctctgcagaggtcaacttatttctcatcacacacatttttcttatgtcatataagtaaaggaaagagtgaaacgttttatagaaaatattacagtggagttaagaacatctgcctcaaatgtacagtgcatttactttttaagttaatcatttagtagctacccttttaacctctactatgttcacagtattgcatttgctcttgtaaacaattttgttcccacctttacatagcgtatgacctactcagtgagaacattcattattaagtttttgctattaattttcatttaaaataggtttattaactagcaaatctcaaatgcaaaacatttttgagtgaatttttcctcaaatgttgtattctacctttcaaaatattgtgtaacagcaattccacattatccttttgaatgctacctatatattgccacatataaagatatttttcatttttcatttttcattgctatcttttaatccctttgcattttgataatatcgaaaacagattagggctgaaaaactaaaaaagattagggcttgtattatgcattgtctagttacttgaacaataagagaaattctatctttgagctttcataattggctttctggacaccactgagtttattagataatctttaaaaatattatgaactattttgagtggacctaaatttattcagtaataaagtttactttcctaaatccattccccaagtgaacaggcttatttaaaatatgtcatataaaagcacttttcctttctaacattttatgatttaggaattaaaaagtagctgttctttcagtaaataagtgttaataaagcagtgaccaaataaataaccttttgttagtttagcagataaatgttttcaatgtatgcctttaaaattattcagtaaaaattgaattagtacgtattcaacatgaaatttttagtcttttctgaccaagcactaataaaattgatttccctaaatgagaaaatttgtcttctgtattttaagcagaaaaaatatgaattctgcctctgataatcaaattttgtacagcaatgtgtaatgtgtcacaatttaaaaagttttaattttctgacatgcagataaggccaaaataaataataccatctgtttttttcacttgaaaatacatttttaaaattttgagtatatatattatagaggtccatgcaaatggaaaaaaattattctcttctgacatggactttttcatgactatacacatgctgaggctagaataaaaacatatatttgtgctatattgtaaaaataaaaacaatttgttctcctttctaattatatgcctttagaataaatgaaatgatctgc

SEQ ID NO: 22181 - DNA, 582 bp, Homo sapiens
  misc_feature 1..582: note = ENST00000547300
  source 1..582: mol_type = unassigned DNA; mol_type = unassigned DNA
tatctacaacgcgctcatcgagaatgagctcctgggcttcttccgcagctcctatgtgctccacggggagagaagattccttggtgttactcagttttcgcctacacatgccagaaaggcatttccttgttttgatgagccaatctacaaggctactttcaaaatcagcatcaagcatcaagcaacctatttatctttatctaatatgccagtggaaacttccgtgtttgaggaagatggatgggttacggatcacttttcacagacccctctcatgtccacatattatttagcctgggcaatttgcaacttcacatacagagaaactaccaccaagagtggggttgtaggtgctgctttaataagaatgctggctaattttatgggccattcagttttccagaggggtttgcaagattatttaaccattcataagtatggtaatgcagccagaaatgatctctggaatacattatcggaggctttaaaaagaaatgggaaatatgtaaatatacaagaagtaatggatcagtggacactccagatgggttatcctgttatcaccatcttgggaaacacaac

SEQ ID NO: 22182 - DNA, 574 bp, Homo sapiens
  misc_feature 1..574: note = ENST00000552503
  source 1..574: mol_type = unassigned DNA; mol_type = unassigned DNA
aattaaccttttcctgacatgactacttctagtgcttattgcacgcccatgtactcaatccgacaagaaccctatgagattccttggtgttactcagttttcgcctacacatgccagaaaggcatttccttgttttgatgagccaatctacaaggctactttcaaaatcagcatcaagcatcaagcaacctatttatctttatctaatatgccagtggaaacttccgtgtttgaggaagatggatgggttacggatcacttttcacagacccctctcatgtccacatattatttagcctgggcaatttgcaacttcacatacagagaaactaccaccaagagtggggttgtaataaacgtggacccaaatgcaatgagaagaaacctagtatatatcactagagatgttaggaattaaaacaaaagggggactgttctaggcactggggacacagcagtaaataaaatgggcaaagcttcatgaagcttacattgtttctattccagtgggttgctctttgtggccaggatgtagcagaaaaataaaaaaaagaagatggagttttttgatact

SEQ ID NO: 22183 - DNA, 812 bp, Homo sapiens
  misc_feature 1..812: note = ENST00000549138
  source 1..812: mol_type = unassigned DNA; mol_type = unassigned DNA
aagttaggcctggtggctaaggcctgtaatcgcaaccctttggcaggccatggagggagactagctcgagcccaggagctcaaggccagcatgggccacataatggaatcctgttgctacaaaaaattaaaaaaaaacagctggatgtggtggtgtgtgcacctgcagtcctagctactgaggaggctgaggaaggaggatcacttgagcctgggaggattatttaaccattcataagtatggtaatgcagccagaaatgatctctggaatacattatcggaggctttaaaaagaaatgggaaatatgtaaatatacaagaagtaatggatcagtggacactccagatgggttatcctgttatcaccatcttgggaaacacaacagcagaaaatagaataataattacccaacagcattttatctatgatatcagtgctaaaactaaagcacttaaacttcagaataacagttacctgtggcagattccattaactattgtggtaggaaatagaagccatgtgtcttcagaagcaattatttgggtgtctaacaaatcagagcaccacagaataacttatttggacaaaggaagctggctgctggggaacatcaatcaaactggctattttagagtcaactatgacctaaggaactggagattattaattgatcaattaatccggaatcatgaggttctttctgtcagtaaccgagcgggcttgatcgatgatgccttcagcctagccagggctggctatttgcctcagaatattcctctggagattatcagatacctgtctgaggagaagg

SEQ ID NO: 22184 - DNA, 762 bp, Homo sapiens
  misc_feature 1..762: note = ENST00000549401
  source 1..762: mol_type = unassigned DNA; mol_type = unassigned DNA
ggctttaaaaagaaatgggaaatatgtaaatatacaagaagtaatggatcagtggacactccagatgggttatcctgttatcaccatcttgggaaacacaacagcagaaaatagaataataattacccaacagcattttatctatgatatcagtgctaaaactaaagcacttaaacttcagaataacagttacctgtggcagattccattaactattgtggtaggaaatagaagccatgtgtcttcagaagcaattatttgggtgtctaacaaatcagagcaccacagaataacttatttggacaaaggaagctggctgctggggaacatcaatcaaactggctattttagagtcaactatgacctaaggaactggagattattaattgatcaattaatccggaatcatgaggttctttctgtcagtaaccgagcgggcttgatcgatgatgccttcagcctagccagcttatacatttgagatatattagaagcctgggaattcagcataatagccactgaaaatataatggctaaagaagaagaaaattatgagaacatttcaaaaacttacagattttttttttcatttctgagcctggtttcagaaatggaaacagcattgttaaaataaccttaacaacatttgcaaactgtggaagtaatttgctccttttgggacatttttcggcatggcttttgttagaagtttttttgtgtcttctggatggctctcttgtacctcgtttaaggtttctcttg

SEQ ID NO: 22185 - DNA, 589 bp, Homo sapiens
  misc_feature 1..589: note = ENST00000549922
  source 1..589: mol_type = unassigned DNA; mol_type = unassigned DNA
caattatttgggtgtctaacaaatcagagcaccacagaataacttatttggacaaaggaagctggctgctggggaacatcaatcaaactggctattttagagtcaactatgacctaaggaactggagattattaattgatcaattaatccggaatcatgaggttctttctgtcagtaaccgagcgggcttgatcgatgatgccttcagcctagccagggctggctatttgcctcagaatattcctctggagattatcagatacctgtctgaggagaaggattttcttccttggcatgctgccagccgagctctttatcctctagataaattactggaccgcatggaaaactacaacattttcaatgaatatattttaaagcaagttgcaacaacatatatcaagcttgggtggccgaaaaataattttaatggatctcttgttcaagcatcctaccaacatgagtactgttttattttcttatcctcttctttacccctagagctgtataataatgtactactagtgccattgtgactttagctgcatgagacaatcttcctttcattcttcatcttacatttcacttt

SEQ ID NO: 22186 - DNA, 4935 bp, Homo sapiens
  misc_feature 1..4935: note = ENST00000539664
  source 1..4935: mol_type = unassigned DNA; mol_type = unassigned DNA
cagaaatgcaacaagtagtacccggggtctgcagagcgccccgcgccgcctgacttggccgggcgaagcccgcctgcagagacccgggccggcctccggacaaaggacggaggaggggctggacggcgctgcgaagtccgaaagaggccatttagcgactctggccaggctaaggggaatgcagaggagacacagagccggcgggccaagaggacgatccggccgctgcacgcagggcgggaggcgatggaggctgcccgcgccttgcgcctcctgctcgtggtgtgcggctgcctcgcgctcccgccgctggccgagcccgtgtgcccggagcgctgcgactgccagcatccccagcatctcctgtgcaccaacagggggctccgcgtagtgcccaagaccagctcgctgccgagcccccacgacgtgctcacctacagcctcggcggcaacttcataaccaacatcacggccttcgacttccaccgtctggggcagctcagacggctggacctgcagtacaaccagatccgctctctgcaccccaagaccttcgagaagctctcgcggctggaagagctgtacctggggaacaacctcttgcaggcgctcgccccgggcacgctggccccgctgcgcaagctgcgcatcctctacgccaacgggaacgagatcagccgcctaagccgcggctccttcgagggcctggagagtctagtcaagctgcggctggacgggaacgccctgggggcgctgccggacgcggtcttcgctcccttgggcaacctgctctacctacatctggagtccaaccggatccgctttctgggcaagaacgccttcgcccagctaggcaagctgcgcttcctcaacctctctgccaacgagctacagccctccctgcgccacgcggccaccttcgcaccgctgcgctccctctcctccctcatcctctcggccaacaacctgcagcacctcgggccgcgcatcttccagcacctgccacgtctcggcctgctctcgctcaggggcaaccagctcacgcacctcgcgcctgaggccttttggggcttggaggccctgcgcgagctgcgcctggagggtaatcggctgagccagctgccaactgcgctgctggagcctctgcacagcctggaggcgctggacctgagcggcaatgagctgtccgccctgcacccggccaccttcggccacctgggccggctgcgcgagctcagcctgcgcaacaacgcgctcagcgccctatccggggacatcttcgccgccagcccagccctttatcggctggatctagacggcaacggctggacctgcgactgccggctgcgaggcctgaagcgctggatgggcgactggcactcgcagggccggctcctcactgtcttcgtgcagtgtcgccaccccccggccctgcgaggcaaatacctggattacctggatgaccagcagctgcaaaatggatcctgcgcggatccctcgccctcagcttccctgaccgctgaccgcaggcggcagcccctacccacggccgcaggggaggagatgacgccacctgcaggtctcgcggaggagctgccgccgcagccgcagctccagcagcaggggcgatttctagctggggtggcctgggatggggccgccagggagctggtaggcaaccgcagcgccctaaggctgagtcggcggggcccgggcctccagcagcccagcccctccgtcgctgccgccgcgggcccggctccacagtccctagacctgcacaagaagccccagcggggccgtccgactcgggcagatcccgccctcgcggagcccaccccaacggcctctcctggctctgcgccatcgcccgccggcgacccctggcagcgcgcgacgaagcatcgtctgggcacggagcaccaggagcgtgccgcccagtccgacggtggggccgggctgccgccgctggtgtccgacccatgcgacttcaacaagttcattctgtgcaacctgacggtggaggcggtgggcgcagacagcgcctcggtgcgctgggccgtgcgcgagcaccgcagtccccggccgctgggcggcgcgcgcttccgcctgctctttgaccgctttggccagcagcccaagttccaccgcttcgtctacctgcctgagagcagcgactcggccacgctgcgcgagctgcgcggggacaccccctacctggtgtgcgtggagggcgtgcttgggggccgtgtctgccctgtggctccccgggaccactgcgcggggctggtcaccctaccggaggccgggagccggggcggcgtcgactaccagctgctgaccttggccctgctgacggtcaacgcgctgctggtgctcctggccttggcggcctgggcgtctcgctggctgcgtaggaaactgcgggctaggcggaagggcggggccccggtccacgttcggcacatgtactccacccgacggcccctgcgctccatgggcaccggcgtgtccgccgacttctcgggattccagtcgcaccggccacgcaccaccgtgtgcgcgctcagtgaggcggacctcatcgaattcccctgcgaccgcttcatggacagtgcgggcggcggcgcgggcggcagcctgagacgggaggaccgtctcctgcagcgatttgccgactaggtccagggcatatagagaccatctcattggccctaaggagccgcctctccgtgaggcccaccagcccacctcaggggaagtgccgttttgtgcacttgccagagaggccggtggggacagagggccaattcgggcaccatcccccaattcccaatactcgagaagtaaatggatggtacttggtggtcagagccagagtaggggacaaatggatggtgggatgctgaggtcggaggcttcgcttggaggctttgacacagctatgcgaatggcttttgtagcactgcaatgcagaagccaggctttgggggtagaaagggggtgcttgtgcccccaacatggccagaaatatttgggtgcatgctttttgtttgctcagtgtcaaacagagaagttttgtttctatttaaggaaggaacttattaccattacaaaggaggcttggccagggactccactggtttggtgatctctgccaagaagggggatgtaaacaggtggtaaagtttaacatacccgccaaggaactcgtttatgttggctgatagagcattcaggataccttaaagtttaataagagacgcatttttttttttcaaaaatgtgaaaagctctgacatttaacgaactgaccaatagactcaaggactgttttagttggactgggccattttattatgttccttttaatattaacagtacaagagcgcttgctgacttcgaggataactaagattacatactttctcaggagaaggctgcatgcaagacttctctgtcagggttgctcctgtggcttttttaattttatttttttaaacctatatatggaaaaggaaatttcaatgccagatttgataaaagaatgtgatgtatatgtagctgatgacccactggggaacaccagtgttccagttcacttaccacatctgtgacagtgtgtttagattggaataaatgtgatgcattacttcttatgtttttatcagtgacatggttgactgtgccctaattctcttgagttgcagttaagcaatgaaggttatttcctaatagggaagcaaaaggtgattgtcaattgatagtttaatgtttgaccacattagtgtctttatatgaaatagtagaggggaagaaattatagaaaacaaatgtgaaaaaaatacaccagtgggtatctgttctactaaaaccagaagattgttatgagtacttaaacctcactgtgaaataatgatatattttgcaattaatccctccccaactgagtgtcttactgtgttattaaatcttatcttttagttaatagttgcagtatttcttttaaatgtttttgttttaaacttaggggtaggatcctttatttgttcagttgtttccaactatttgggatactttcattccctgctatttatgaagtacatgtttatcactaagtgtagtggtttggtttacattaataattttatgtgtggtctaaaaatgcagtcactaagagaatgtacactgtggttatggtcacagtggttatggatttattggcagtggagtaccatggaggtcactgcaatggtgctaaggctgacagtggaatcttctgtttagggccttaagcccctgagggtcctggtgactcagggaatccatcacagccccgggtctttcaccccagttcactccttttatgtttggcctagattgacccatgcctgccctcttctcaacagctgagtagggaaccagccatctgaatgagctgatcgttgtttatgttcaaatgagtaaatgtccagaccacttaaaactacagctgcttttctggcagtctcgtctgcggggccaaaacttaataaaccacaggaaatagactgtcattcttagtttgctgccagggcttattttagattgagagcatactggtacatgagagcagtagtgttgtttgctcttattttcaaccagggagctatctggcaccttttgtgctcctggcttttttcaatcatagcactattgcatctcctagctatttcttttgcccagcagggtaatattgagtcccattgcaagtatggacaaggcctctggttctcctcaccacccaccttttcagccatagaacatcactgaaaatgcctaatgcctggatctgtgttctactttagtttcactgggaagtctttcagtgggagatgaataaatgttatacattgttatgtccagttatgtcaataaacccactaatagagataa

SEQ ID NO: 22187 - DNA, 2214 bp, Homo sapiens
  misc_feature 1..2214: note = ENST00000421984
  source 1..2214: mol_type = unassigned DNA; mol_type = unassigned DNA
tgtgggcacgcctcagagccagaagtttatggctcccacctgctcaatctgacaggaagcttctgctccccagttctccccagccactgtggtctacagattccaggaaacccatccccctgtgacctcatggtgtgctctgttctccaccctagggaccagaaggagccaggagtaaagaactggcttacttggccgccactgggaaattctgggtaattcgagacgccctggaatttggacccactccgctgataggtggtggccagggttctagggaacacaagaggcggagccaggtggcttccctgtgctggcattcttgcctctctctctctttctctctctctgtctctcagccttgcagccgtttccctctgcgattcatgtaagtgtgactcgatttcagggaaagggaactcgcgtgggctgaggagaccggagtggacgggctggggaaggcaccgtgatgcccgcaaccccgtccctgaaggtggtccatgagctgcctgcctgtaccctctgtgcggggccgctggaggatgcggtgaccattccctgtggacacaccttctgccggctctgcctccccgcgctctcccagatgggggcccaatcctcgggcaagatcctgctctgcccgctctgccaagaggaggagcaggcagagactcccatggcccctgtgcccctgggcccgctgggagaaacttactgcgaggagcacggcgagaagatctacttcttctgcgagaacgatgccgagttcctctgtgtgttctgcagggagggtcccacgcaccaggcgcacaccgtggggttcctggacgaggccattcagccctaccgggatcgtctcaggagtcgactggaagctctgagcacggagagagatgagattgaggatgtaaagtgtcaagaagaccagaagcttcaagtgctgctgactcagatcgaaagcaagaagcatcaggtggaaacagcttttgagaggctgcagcaggagctggagcagcagcgatgtctcctgctggccaggctgagggagctggagcagcagatttggaaggagagggatgaatatatcacaaaggtctctgaggaagtcacccggcttggagcccaggtcaaggagctggaggagaagtgtcagcagccagcaagtgagcttctacaagatgtcagagtcaaccagagcaggtgtgagatgaagacttttgtgagtcctgaggccatttctcctgaccttgtcaagaagatccgtgatttccacaggaaaatactcaccctcccagagatgatgaggatgttctcagaaaacttggcgcatcatctggaaatagattcaggggtcatcactctggaccctcagaccgccagccggagcctggttctctcggaagacaggaagtcagtgaggtacacccggcagaagaagagcctgccagacagccccctgcgcttcgacggcctcccggcggttctgggcttcccgggcttctcctccgggcgccaccgctggcaggttgacctgcagctgggcgacggcggcggctgcacggtgggggtggccggggagggggtgaggaggaagggagagatgggactcagcgccgaggacggcgtctgggccgtgatcatctcgcaccagcagtgctgggccagcacctccccgggcaccgacctgccgctgagcgagatcccgcgcggcgtgagagtcgccctggactacgaggcggggcaggtgaccctccacaacgcccagacccaggagcccatcttcaccttcactgcctctttctccggcaaagtcttccctttctttgccgtctggaaaaaaggttcctgccttacgctgaaaggctgaagtggggcgcgcgaagggcggcgaagcggagacggcggctctccgggatccagctccgcccctggccagtgtgcggcccgggggctccctgtgcccgcgtgaggcgagagaacaggggacttgagtctcgaacagcggttgtttttactttatttatcttaggccctcagctccctgacgtcctgagcctccctgtgacgctctggccttctctgcacctcagagtgcagaaccacagacggcttcggctgtgcctagggcaacagccaacctaggagccagcgggctttcggggaaaaaaaagaaaaagacatctaaaataaaatgtttaaactgtttcaaaataa

SEQ ID NO: 22188 - DNA, 491 bp, Homo sapiens
  misc_feature 1..491: note = ENST00000423220
  source 1..491: mol_type = unassigned DNA; mol_type = unassigned DNA
gcaagaagcatcaggtggaaacagcttttgagaggctgcagcaggagctggagcagcagcgatgtctcctgctggccaggctgagggagctggagcagcagatttggaaggagagggatgaatatatcacaaaggtctctgaggaagtcacccggcttggagcccaggtcaaggagctggaggagaagtgtcagcagccagcaagtgagcttctacaagatgtcagagtcaaccagagcaggtgtgagatgaagacttttgtgagtcctgaggccatttctcctgaccttgtcaagaagatccgtgatttccacaggaaaatactcaccctcccagagatgatgaggatgttctcagaaaacttggcgcatcatctggaaatagattcagaccgccagccggagcctggttctctcggaagacaggaagtcagtgaggtacacccggcagaagaagagcctgccagacagccccctgcgcttcgacggcct

SEQ ID NO: 22189 - DNA, 535 bp, Homo sapiens
  misc_feature 1..535: note = ENST00000476225
  source 1..535: mol_type = unassigned DNA; mol_type = unassigned DNA
gagctggagcagcagcgatgtctcctgctggccaggctgagggagctggagcagcagatttggaaggagagggatgaatatatcacaaaggtctctgaggaagtcacccggcttggagcccaggtcaaggagctggaggagaagtgtcagcagccagcaagtgagcttctacaagatgtcagagtcaaccagagcaggtgtgagatgaagacttttgtgagtcctgaggccatttctcctgaccttgtcaagaagatccgtgatttccacaggaaaatactcaccctcccagagatgatgaggatgttctcagaaaacttggcgcatcatctggaaatagattcaggggtcatcactctggaccctcagaccgccagccggagcctggttctctcggaagacaggaagtcaagtgcagaaccacagacggcttcggctgtgcctagggcaacagccaacctaggagccagcgggctttcggggaaaaaaaagaaaaagacatctaaaataaaatgtttaaactgtttcaaaataa

SEQ ID NO: 22190 - DNA, 426 bp, Homo sapiens
  misc_feature 1..426: note = ENST00000478964
  source 1..426: mol_type = unassigned DNA; mol_type = unassigned DNA
ggtttaactgaaatgcctactattttagtaactacacatttccagcaaaagtaaagaaatgatactcaatttgattattcaccacagacgccaagatcattctttagtctgattttagcctcacgtggtctcacccgaacatttgtttttggaatttggacctaactggttaccaaacctgtctgcaggtgtgagatgaagacttttgtgagtcctgaggccatttctcctgaccttgtcaagaagatccgtgatttccacaggaaaatactcaccctcccagagatgatgaggatgttctcagaaaacttggcgcatcatctggaaatagattcaggtaaacagcttgggatttggggagtcattcttccattcatccattcaatccatggcagcaaacagagcaataaaatgcatgaattctgg

SEQ ID NO: 22191 - DNA, 2217 bp, Homo sapiens
  misc_feature 1..2217: note = ENST00000548732
  source 1..2217: mol_type = unassigned DNA; mol_type = unassigned DNA
actttgatgctgtgggcacgcctcagagccagaagtttatggctcccacctgctcaatctgacaggaagcttctgctccccagttctccccagccactgtggtctacagattccaggaaacccatccccctgtgacctcatggtgtgctctgttctccaccctagggaccagaaggagccaggagtaaagaactggcttacttggccgccactgggaaattctgggtaattcgagacgccctggaatttggacccactccgctgataggtggtggccagggttctagggaacacaagaggcggagccaggtggcttccctgtgctggcattcttgcctctctctctctttctctctctctgtctctcagccttgcagccgtttccctctgcgattcatgtaagtgtgactcgatttcagggaaagggaactcgcgtgggctgaggagaccggagtggacgggctggggaaggcaccgtgatgcccgcaaccccgtccctgaaggtggtccatgagctgcctgcctgtaccctctgtgcggggccgctggaggatgcggtgaccattccctgtggacacaccttctgccggctctgcctccccgcgctctcccagatgggggcccaatcctcgggcaagatcctgctctgcccgctctgccaagaggaggagcaggcagagactcccatggcccctgtgcccctgggcccgctgggagaaacttactgcgaggagcacggcgagaagatctacttcttctgcgagaacgatgccgagttcctctgtgtgttctgcagggagggtcccacgcaccaggcgcacaccgtggggttcctggacgaggccattcagccctaccgggatcgtctcaggagtcgactggaagctctgagcacggagagagatgagattgaggatgtaaagtgtcaagaagaccagaagcttcaagtgctgctgactcagatcgaaagcaagaagcatcaggtggaaacagcttttgagaggctgcagcaggagctggagcagcagcgatgtctcctgctggccaggctgagggagctggagcagcagatttggaaggagagggatgaatatatcacaaaggtctctgaggaagtcacccggcttggagcccaggtcaaggagctggaggagaagtgtcagcagccagcaagtgagcttctacaagatgtcagaggaacaattgtcacgtgtgagatgaagacttttgtgagtcctgaggccatttctcctgaccttgtcaagaagatccgtgatttccacaggaaaatactcaccctcccagagatgatgaggatgttctcagaaaacttggcgcatcatctggaaatagattcaggggtcatcactctggaccctcagaccgccagccggagcctggttctctcggaagacaggaagtcagtgaggtacacccggcagaagaagagcctgccagacagccccctgcgcttcgacggcctcccggcggttctgggcttcccgggcttctcctccgggcgccaccgctggcaggttgacctgcagctgggcgacggcggcggctgcacggtgggggtggccggggagggggtgaggaggaagggagagatgggactcagcgccgaggacggcgtctgggccgtgatcatctcgcaccagcagtgctgggccagcacctccccgggcaccgacctgccgctgagcgagatcccgcgcggcgtgagagtcgccctggactacgaggcggggcaggtgaccctccacaacgcccagacccaggagcccatcttcaccttcactgcctctttctccggcaaagtcttccctttctttgccgtctggaaaaaaggttcctgccttacgctgaaaggctgaagtggggcgcgcgaagggcggcgaagcggagacggcggctctccgggatccagctccgcccctggccagtgtgcggcccgggggctccctgtgcccgcgtgaggcgagagaacaggggacttgagtctcgaacagcggttgtttttactttatttatcttaggccctcagctccctgacgtcctgagcctccctgtgacgctctggccttctctgcacctcagagtgcagaaccacagacggcttcggctgtgcctagggcaacagccaacctaggagccagcgggctttcggggaaaaaaaagaaaaagacatctaaaataaaatgtttaaactgtttc

SEQ ID NO: 22192 - DNA, 2214 bp, Homo sapiens
  misc_feature 1..2214: note = ENST00000431059
  source 1..2214: mol_type = unassigned DNA; mol_type = unassigned DNA
tgtgggcacgcctcagagccagaagtttatggctcccacctgctcaatctgacaggaagcttctgctccccagttctccccagccactgtggtctacagattccaggaaacccatccccctgtgacctcatggtgtgctctgttctccaccctagggaccagaaggagccaggagtaaagaactggcttacttggccgccactgggaaattctgggtaattcgagacgccctggaatttggacccactccgctgataggtggtggccagggttctagggaacacaagaggcggagccaggtggcttccctgtgctggcattcttgcctctctctctctttctctctctctgtctctcagccttgcagccgtttccctctgcgattcatgtaagtgtgactcgatttcagggaaagggaactcgcgtgggctgaggagaccggagtggacgggctggggaaggcaccgtgatgcccgcaaccccgtccctgaaggtggtccatgagctgcctgcctgtaccctatgtgcggggccgctggaggatgcggtgaccattccctgtggacacaccttctgccggctctgcctccccgcgctctcccagatgggggcccaatcctcgggcaagatcctgctctgcccgctctgccaagaggaggagcaggcagagactcccatggcccctgtgcccctgggcccgctgggagaaacttactgcgaggagcacggcgagaagatctacttcttctgcgagaacgatgccgagttcctctgtgtgttctgcagggagggtcccacgcaccaggcgcacaccgtggggttcctggacgaggccattcagccctaccgggatcgtctcaggagtcgactggaagctctgagcacggagagagatgagattgaggatgtaaagtgtcaagaagaccagaagcttcaagtgctgctgactcagatcgaaagcaagaagcatcaggtggaaacagcttttgagaggctgcagcaggagctggagcagcagcgatgtctcctgctggccaggctgagggagctggagcagcagatttggaaggagagggatgaatatatcacaaaggtctctgaggaagtcacccggcttggagcccaggtcaaggagctggaggagaagtgtcagcagccagcaagtgagcttctacaagatgtcagagtcaaccagagcaggtgtgagatgaagacttttgtgagtcctgaggccatttctcctgaccttgtcaagaagatccgtgatttccacaggaaaatactcaccctcccagagatgatgaggatgttctcagaaaacttggcgcatcatctggaaatagattcaggggtcatcactctggaccctcagaccgccagccggagcctggttctctcggaagacaggaagtcagtgaggtacacccggcagaagaagagcctgccagacagccccctgcgcttcgacggcctcccggcggttctgggcttcccgggcttctcctccgggcgccaccgctggcaggttgacctgcagctgggcgacggcggcggctgcacggtgggggtggccggggagggggtgaggaggaagggagagatgggactcagcgccgaggacggcgtctgggccgtgatcatctcgcaccagcagtgctgggccagcacctccccgggcaccgacctgccgctgagcgagatcccgcgcggcgtgagagtcgccctggactacgaggcggggcaggtgaccctccacaacgcccagacccaggagcccatcttcaccttcactgcctctttctccggcaaagtcttccctttctttgccgtctggaaaaaaggttcctgccttacgctgaaaggctgaagtggggcgcgcgaagggcggcgaagcggagacggcggctctccgggatccagctccgcccctggccagtgtgcggcccgggggctccctgtgcccgcgtgaggcgagagaacaggggacttgagtctcgaacagcggttgtttttactttatttatcttaggccctcagctccctgacgtcctgagcctccctgtgacgctctggccttctctgcacctcagagtgcagaaccacagacggcttcggctgtgcctagggcaacagccaacctaggagccagcgggctttcggggaaaaaaaagaaaaagacatctaaaataaaatgtttaaactgtttcaaaataa

SEQ ID NO: 22193 - DNA, 491 bp, Homo sapiens; identical to SEQ ID NO: 22188
  misc_feature 1..491: note = ENST00000426765
  source 1..491: mol_type = unassigned DNA; mol_type = unassigned DNA

SEQ ID NO: 22194 - DNA, 535 bp, Homo sapiens; identical to SEQ ID NO: 22189
  misc_feature 1..535: note = ENST00000490570
  source 1..535: mol_type = unassigned DNA; mol_type = unassigned DNA

SEQ ID NO: 22195 - DNA, 426 bp, Homo sapiens; identical to SEQ ID NO: 22190
  misc_feature 1..426: note = ENST00000474092
  source 1..426: mol_type = unassigned DNA; mol_type = unassigned DNA

SEQ ID NO: 22196 - DNA, 2217 bp, Homo sapiens
  misc_feature 1..2217: note = ENST00000548653
  source 1..2217: mol_type = unassigned DNA; mol_type = unassigned DNA
actttgatgctgtgggcacgcctcagagccagaagtttatggctcccacctgctcaatctgacaggaagcttctgctccccagttctccccagccactgtggtctacagattccaggaaacccatccccctgtgacctcatggtgtgctctgttctccaccctagggaccagaaggagccaggagtaaagaactggcttacttggccgccactgggaaattctgggtaattcgagacgccctggaatttggacccactccgctgataggtggtggccagggttctagggaacacaagaggcggagccaggtggcttccctgtgctggcattcttgcctctctctctctttctctctctctgtctctcagccttgcagccgtttccctctgcgattcatgtaagtgtgactcgatttcagggaaagggaactcgcgtgggctgaggagaccggagtggacgggctggggaaggcaccgtgatgcccgcaaccccgtccctgaaggtggtccatgagctgcctgcctgtaccctatgtgcggggccgctggaggatgcggtgaccattccctgtggacacaccttctgccggctctgcctccccgcgctctcccagatgggggcccaatcctcgggcaagatcctgctctgcccgctctgccaagaggaggagcaggcagagactcccatggcccctgtgcccctgggcccgctgggagaaacttactgcgaggagcacggcgagaagatctacttcttctgcgagaacgatgccgagttcctctgtgtgttctgcagggagggtcccacgcaccaggcgcacaccgtggggttcctggacgaggccattcagccctaccgggatcgtctcaggagtcgactggaagctctgagcacggagagagatgagattgaggatgtaaagtgtcaagaagaccagaagcttcaagtgctgctgactcagatcgaaagcaagaagcatcaggtggaaacagcttttgagaggctgcagcaggagctggagcagcagcgatgtctcctgctggccaggctgagggagctggagcagcagatttggaaggagagggatgaatatatcacaaaggtctctgaggaagtcacccggcttggagcccaggtcaaggagctggaggagaagtgtcagcagccagcaagtgagcttctacaagatgtcagaggaacaattgtcacgtgtgagatgaagacttttgtgagtcctgaggccatttctcctgaccttgtcaagaagatccgtgatttccacaggaaaatactcaccctcccagagatgatgaggatgttctcagaaaacttggcgcatcatctggaaatagattcaggggtcatcactctggaccctcagaccgccagccggagcctggttctctcggaagacaggaagtcagtgaggtacacccggcagaagaagagcctgccagacagccccctgcgcttcgacggcctcccggcggttctgggcttcccgggcttctcctccgggcgccaccgctggcaggttgacctgcagctgggcgacggcggcggctgcacggtgggggtggccggggagggggtgaggaggaagggagagatgggactcagcgccgaggacggcgtctgggccgtgatcatctcgcaccagcagtgctgggccagcacctccccgggcaccgacctgccgctgagcgagatcccgcgcggcgtgagagtcgccctggactacgaggcggggcaggtgaccctccacaacgcccagacccaggagcccatcttcaccttcactgcctctttctccggcaaagtcttccctttctttgccgtctggaaaaaaggttcctgccttacgctgaaaggctgaagtggggcgcgcgaagggcggcgaagcggagacggcggctctccgggatccagctccgcccctggccagtgtgcggcccgggggctccctgtgcccgcgtgaggcgagagaacaggggacttgagtctcgaacagcggttgtttttactttatttatcttaggccctcagctccctgacgtcctgagcctccctgtgacgctctggccttctctgcacctcagagtgcagaaccacagacggcttcggctgtgcctagggcaacagccaacctaggagccagcgggctttcggggaaaaaaaagaaaaagacatctaaaataaaatgtttaaactgtttc

SEQ ID NO: 22197 - DNA, 426 bp, Homo sapiens
  misc_feature 1..426: note = ENST00000550400
  source 1..426: mol_type = unassigned DNA; mol_type = unassigned DNA
atgcccgcaaccccgtccctgaaggtggtccatgagctgcctgcctgtaccctatgtgcggggccgctggaggatgcggtgaccattccctgtggacacaccttctgccggctctgcctccccgcgctctcccagatgggggcccaatcctcgggcaagatcctgctctgcccgctctgccaagaggaggagcaggcagagactcccatggcccctgtgcccctgggcccgctgggagaaacttactgcgaggagcacggcgagaagatctacttcttctgcgagaacgatgccgagttcctctgtacctcagagtgcagaaccacagacggcttcggctgtgcctagggcaacagccaacctaggagccagcgggctttcggggaaaaaaaagaaaaagacatctaaaataaaatgtttaaactg

SEQ ID NO: 22198 - DNA, 2214 bp, Homo sapiens
  misc_feature 1..2214: note = ENST00000429524
  source 1..2214: mol_type = unassigned DNA; mol_type = unassigned DNA
tgtgggcacgcctcagagccagaagtttatggctcccacctgctcaatctgacaggaagcttctgctccccagttctccccagccactgtggtctacagattccaggaaacccatccccctgtgacctcatggtgtgctctgttctccaccctagggaccagaaggagccaggagtaaagaactggcttacttggccgccactgggaaattctgggtaattcgagacgccctggaatttggacccactccgctgataggtggtggccagggttctagggaacacaagaggcggagccaggtggcttccctgtgctggcattcttgcctctctctctctttctctctctctgtctctcagccttgcagccgtttccctctgcgattcatgtaagtgtgactcgatttcagggaaagggaactcgcgtgggctgaggagaccggagtggacgggctggggaaggcaccgtgatgcccgcaaccccgtccctgaaggtggtccatgagctgcctgcctgtaccctctgtgcggggccgctggaggatgcggtgaccattccctgtggacacaccttctgccggctctgcctccccgcgctctcccagatgggggcccaatcctcgggcaagatcctgctctgcccgctctgccaagaggaggagcaggcagagactcccatggcccctgtgcccctgggcccgctgggagaaacttactgcgaggagcacggcgagaagatctacttcttctgcgagaacgatgccgagttcctctgtgtgttctgcagggagggtcccacgcaccaggcgcacaccgtggggttcctggacgaggccattcagccctaccgggatcgtctcaggagtcgactggaagctctgagcacggagagagatgagattgaggatgtaaagtgtcaagaagaccagaagcttcaagtgctgctgactcagatcgaaagcaagaagcatcaggtggaaacagcttttgagaggctgcagcaggagctggagcagcagcgatgtctcctgctggccaggctgagggagctggagcagcagatttggaaggagagggatgaatatatcacaaaggtctctgaggaagtcacccggcttggagcccaggtcaaggagctggaggagaagtgtcagcagccagcaagtgagcttctacaagatgtcagagtcaaccagagcaggtgtgagatgaagacttttgtgagtcctgaggccatttctcctgaccttgtcaagaagatccgtgatttccacaggaaaatactcaccctcccagagatgatgaggatgttctcagaaaacttggcgcatcatctggaaatagattcaggggtcatcactctggaccctcagaccgccagccggagcctggttctctcggaagacaggaagtcagtgaggtacacccggcagaagaagaacctgccagacagccccctgcgcttcgacggcctcccggcggttctgggcttcccgggcttctcctccgggcgccaccgctggcaggttgacctgcagctgggcgacggcggcggctgcacggtgggggtggccggggagggggtgaggaggaagggagagatgggactcagcgccgaggacggcgtctgggccgtgatcatctcgcaccagcagtgctgggccagcacctccccgggcaccgacctgccgctgagcgagatcccgcgcggcgtgagagtcgccctggactacgaggcggggcaggtgaccctccacaacgcccagacccaggagcccatcttcaccttcactgcctctttctccggcaaagtcttccctttctttgccgtctggaaaaaaggttcctgccttacgctgaaaggctgaagtggggcgcgcgaagggcggcgaagcggagacggcggctctccgggatccagctccgcccctggccagtgtgcggcccgggggctccctgtgcccgcgtgaggcgagagaacaggggacttgagtctcgaacagcggttgtttttactttatttatcttaggccctcagctccctgacgtcctgagcctccctgtgacgctctggccttctctgcacctcagagtgcagaaccacagacggcttcggctgtgcctagggcaacagccaacctaggagccagcgggctttcggggaaaaaaaagaaaaagacatctaaaataaaatgtttaaactgtttcaaaataa

SEQ ID NO: 22199 - DNA, 491 bp, Homo sapiens
  misc_feature 1..491: note = ENST00000424597
  source 1..491: mol_type = unassigned DNA; mol_type = unassigned DNA
gcaagaagcatcaggtggaaacagcttttgagaggctgcagcaggagctggagcagcagcgatgtctcctgctggccaggctgagggagctggagcagcagatttggaaggagagggatgaatatatcacaaaggtctctgaggaagtcacccggcttggagcccaggtcaaggagctggaggagaagtgtcagcagccagcaagtgagcttctacaagatgtcagagtcaaccagagcaggtgtgagatgaagacttttgtgagtcctgaggccatttctcctgaccttgtcaagaagatccgtgatttccacaggaaaatactcaccctcccagagatgatgaggatgttctcagaaaacttggcgcatcatctggaaatagattcagaccgccagccggagcctggttctctcggaagacaggaagtcagtgaggtacacccggcagaagaagaacctgccagacagccccctgcgcttcgacggcct

SEQ ID NO: 22200 - DNA, 535 bp, Homo sapiens; identical to SEQ ID NO: 22189
  misc_feature 1..535: note = ENST00000493180
  source 1..535: mol_type = unassigned DNA; mol_type = unassigned DNA

SEQ ID NO: 22201 - DNA, 426 bp, Homo sapiens
  misc_feature 1..426: note = ENST00000496657
  source 1..426: mol_type = unassigned DNA; mol_type = unassigned DNA
ggtttaactgaaatgcctactattttagtaactacacatttccagcaaaagtaaagaaatgatactcaatttcattattcaccacagacgccaagatcattctttagtctgattttagcctcacgtggtctcacccgaacatttgtttttggaatttggacctaactggttaccaaacctgtctgcaggtgtgagatgaagacttttgtgagtcctgaggccatttctcctgaccttgtcaagaagatccgtgatttccacaggaaaatactcaccctcccagagatgatgaggatgttctcagaaaacttggcgcatcatctggaaatagattcaggtaaacagcttgggatttggggagtcattcttccattcatccattcaatccatggcagcaaacagagcaataaaatgcatgaattctgg

SEQ ID NO: 22202 - DNA, 426 bp, Homo sapiens
  misc_feature 1..426: note = ENST00000552676
  source 1..426: mol_type = unassigned DNA; mol_type = unassigned DNA
atgcccgcaaccccgtccctgaaggtggtccatgagctgcctgcctgtaccctctgtgcggggccgctggaggatgcggtgaccattccctgtggacacaccttctgccggctctgcctccccgcgctctcccagatgggggcccaatcctcgggcaagatcctgctctgcccgctctgccaagaggaggagcaggcagagactcccatggcccctgtgcccctgggcccgctgggagaaacttactgcgaggagcacggcgagaagatctacttcttctgcgagaacgatgccgagttcctctgtacctcagagtgcagaaccacagacggcttcggctgtgcctagggcaacagccaacctaggagccagcgggctttcggggaaaaaaaagaaaaagacatctaaaataaaatgtttaaactg

SEQ ID NO: 22203 - DNA, 2217 bp, Homo sapiens
  misc_feature 1..2217: note = ENST00000550702
  source 1..2217: mol_type = unassigned DNA
actttgatgctgtgggcacgcctcagagccagaagtttatggctcccacctgctcaatctgacaggaagcttctgctccccagttctccccagccactgtggtctacagattccaggaaacccatccccctgtgacctcatggtgtgctctgttctccaccctagggaccagaaggagccaggagtaaagaactggcttacttggccgccactgggaaattctgggtaattcgagacgccctggaatttggacccactccgctgataggtggtggccagggttctagggaacacaagaggcggagccaggtggcttccctgtgctggcattcttgcctctctctctctttctctctctctgtctctcagccttgcagccgtttccctctgcgattcatgtaagtgtgactcgatttcagggaaagggaactcgcgtgggctgaggagaccggagtggacgggctggggaaggcaccgtgatgcccgcaaccccgtccctgaaggtggtccatgagctgcctgcctgtaccctctgtgcggggccgctggaggatgcggtgaccattccctgtggacacaccttctgccggctctgcctccccgcgctctcccagatgggggcccaatcctcgggcaagatcctgctctgcccgctctgccaagaggaggagcaggcagagactcccatggcccctgtgcccctgggcccgctgggagaaacttactgcgaggagcacggcgagaagatctacttcttctgcgagaacgatgccgagttcctctgtgtgttctgcagggagggtcccacgcaccaggcgcacaccgtggggttcctggacgaggccattcagccctaccgggatcgtctcaggagtcgactggaagctctgagcacggagagagatgagattgaggatgtaaagtgtcaagaagaccagaagcttcaagtgctgctgactcagatcgaaagcaagaagcatcaggtggaaacagcttttgagaggctgcagcaggagctggagcagcagcgatgtctcctgctggccaggctgagggagctggagcagcagatttggaaggagagggatgaatatatcacaaaggtctctgaggaagtcacccggcttggagcccaggtcaaggagctggaggagaagtgtcagcagccagcaagtgagcttctacaagatgtcagaggaacaattgtcacgtgtgagatgaagacttttgtgagtcctgaggccatttctcctgaccttgtcaagaagatccgtgatttccacaggaaaatactcaccctcccagagatgatgaggatgttctcagaaaacttggcgcatcatctggaaatagattcaggggtcatcactctggaccctcagaccgccagccggagcctggttctctcggaagacaggaagtcagtgaggtacacccggcagaagaagaacctgccagacagccccctgcgcttcgacggcctcccggcggttctgggcttcccgggcttctcctccgggcgccaccgctggcaggttgacctgcagctgggcgacggcggcggctgcacggtgggggtggccggggagggggtgaggaggaagggagagatgggactcagcgccgaggacggcgtctgggccgtgatcatctcgcaccagcagtgctgggccagcacctccccgggcaccgacctgccgctgagcgagatcccgcgcggcgtgagagtcgccctggactacgaggcggggcaggtgaccctccacaacgcccagacccaggagcccatcttcaccttcactgcctctttctccggcaaagtcttccctttctttgccgtctggaaaaaaggttcctgccttacgctgaaaggctgaagtggggcgcgcgaagggcggcgaagcggagacggcggctctccgggatccagctccgcccctggccagtgtgcggcccgggggctccctgtgcccgcgtgaggcgagagaacaggggacttgagtctcgaacagcggttgtttttactttatttatcttaggccctcagctccctgacgtcctgagcctccctgtgacgctctggccttctctgcacctcagagtgcagaaccacagacggcttcggctgtgcctagggcaacagccaacctaggagccagcgggctttcggggaaaaaaaagaaaaagacatctaaaataaaatgtttaaactgtttc

SEQ ID NO: 22204 - DNA, 2214 bp, Homo sapiens; identical to SEQ ID NO: 22187
  misc_feature 1..2214: note = ENST00000259930
  source 1..2214: mol_type = unassigned DNA; mol_type = unassigned DNA

SEQ ID NO: 22205 - DNA, 491 bp, Homo sapiens; identical to SEQ ID NO: 22188
  misc_feature 1..491: note = ENST00000427952
  source 1..491: mol_type = unassigned DNA; mol_type = unassigned DNA

SEQ ID NO: 22206 - DNA, 535 bp, Homo sapiens; identical to SEQ ID NO: 22189
  misc_feature 1..535: note = ENST00000492678
  source 1..535: mol_type = unassigned DNA; mol_type = unassigned DNA

SEQ ID NO: 22207 - DNA, 426 bp, Homo sapiens; identical to SEQ ID NO: 22201
  misc_feature 1..426: note = ENST00000479020
  source 1..426: mol_type = unassigned DNA; mol_type = unassigned DNA

SEQ ID NO: 22208 - DNA, 2217 bp, Homo sapiens; identical to SEQ ID NO: 22191
  misc_feature 1..2217: note = ENST00000550969
  source 1..2217: mol_type = unassigned DNA; mol_type = unassigned DNA

SEQ ID NO: 22209 - DNA, 2214 bp, Homo sapiens
  misc_feature 1..2214: note = ENST00000376694
  source 1..2214: mol_type = unassigned DNA; mol_type = unassigned DNA
tgtgggcacgcctcagagccagaagtttatggctcccacctgctcaatctgacaggaagcttctgctccccagttctccccagccactgtggtctacagattccaggaaacccatccccctgtgacctcatggtgtgctctgttctccaccctagggaccagaaggagccaggagtaaagaactggcttacttggccgccactgggaaattctgggtaattcgagacgccctggaatttggacccactccgctgataggtggtggccagggttctagggaacacaagaggcggagccaggtggcttccctgtgctggcattcttgcctctctctctctttctctctctctgtctcttagccttgcagccgtttccctctgcgattcatgtaagtgtgactcgatttcagggaaagggaactcgcgtgggctgaggagaccggagtggacgggctggggaaggcaccgtgatgcccgcaaccccgtccctgaaggtggtccatgagctgcctgcctgtaccctctgtgcggggccgctggaggatgcggtgaccattccctgtggacacaccttctgccggctctgcctccccgcgctctcccagatgggggcccaatcctcgggcaagatcctgctctgcccgctctgccaagaggaggagcaggcagagactcccatggcccctgtgcccctgggcccgctgggagaaacttactgcgaggagcacggcgagaagatctacttcttctgcgagaacgatgccgagttcctctgtgtgttctgcagggagggtcccacgcaccaggcgcacaccgtggggttcctggacgaggccattcagccctaccgggatcgtctcaggagtcgactggaagctctgagcacggagagagatgagattgaggatgtaaagtgtcaagaagaccagaagcttcaagtgctgctgactcagatcgaaagcaagaagcatcaggtggaaacagcttttgagaggctgcagcaggagctggagcagcagcgatgtctcctgctggccaggctgagggagctggagcagcagatttggaaggagagggatgaatatatcacaaaggtctctgaggaagtcacccggcttggagcccaggtcaaggagctggaggagaagtgtcagcagccagcaagtgagcttctacaagatgtcagagtcaaccagagcaggtgtgagatgaagacttttgtgagtcctgaggccatttctcctgaccttgtcaagaagatccgtgatttccacaggaaaatactcaccctcccagagatgatgaggatgttctcagaaaacttggcgcatcatctggaaatagattcaggggtcatcactctggaccctcagaccgccagccggagcctggttctctcggaagacaggaagtcagtgaggtacacccggcagaagaagagcctgccagacagccccctgcgcttcgacggcctcccggcggttctgggcttcccgggcttctcctccgggcgccaccgctggcaggttgacctgcagctgggcgacggcggcggctgcacggtgggggtggccggggagggggtgaggaggaagggagagatgggactcagcgccgaggacggcgtctgggccgtgatcatctcgcaccagcagtgctgggccagcacctccccgggcaccgacctgccgctgagcgagatcccgcgcggcgtgagagtcgccctggactacgaggcggggcaggtgaccctccacaacgcccagacccaggagcccatcttcaccttcactgcctctttctccggcaaagtcttccctttctttgccgtctggaaaaaaggttcctgccttacgctgaaaggctgaagtggggcgcgcgaagggcggcgaagcggagacggcggctctccgggatccagctccgcccctggccagtgtgcggcccgggggctccctgtgcccgcgtgaggcgagagaacaggggacttgagtctcgaacagcggttgtttttactttatttatcttaggccctcagctccctgacgtcctgagcctccctgtgacgctctggccttctctgtacctcagagtgcagaaccacagacggcttcggctgtgcctagggcaacagccaacctaggagccagcgggctttcggggaaaaaaaagaaaaagacatctaaaataaaatgtttaaactgtttcaaaataa

SEQ ID NO: 22210 - DNA, 491 bp, Homo sapiens; identical to SEQ ID NO: 22188
  misc_feature 1..491: note = ENST00000433744
  source 1..491: mol_type = unassigned DNA; mol_type = unassigned DNA

SEQ ID NO: 22211 - DNA, 426 bp, Homo sapiens; identical to SEQ ID NO: 22201
  misc_feature 1..426: note = ENST00000477944
  source 1..426: mol_type = unassigned DNA; mol_type = unassigned DNA

SEQ ID NO: 22212 - DNA, 426 bp, Homo sapiens; identical to SEQ ID NO: 22202
  misc_feature 1..426: note = ENST00000376688
  source 1..426: mol_type = unassigned DNA; mol_type = unassigned DNA

SEQ ID NO: 22213 - DNA, 2217 bp, Homo sapiens
  misc_feature 1..2217: note = ENST00000619857
  source 1..2217: mol_type = unassigned DNA; mol_type = unassigned DNA
actttgatgctgtgggcacgcctcagagccagaagtttatggctcccacctgctcaatctgacaggaagcttctgctccccagttctccccagccactgtggtctacagattccaggaaacccatccccctgtgacctcatggtgtgctctgttctccaccctagggaccagaaggagccaggagtaaagaactggcttacttggccgccactgggaaattctgggtaattcgagacgccctggaatttggacccactccgctgataggtggtggccagggttctagggaacacaagaggcggagccaggtggcttccctgtgctggcattcttgcctctctctctctttctctctctctgtctcttagccttgcagccgtttccctctgcgattcatgtaagtgtgactcgatttcagggaaagggaactcgcgtgggctgaggagaccggagtggacgggctggggaaggcaccgtgatgcccgcaaccccgtccctgaaggtggtccatgagctgcctgcctgtaccctctgtgcggggccgctggaggatgcggtgaccattccctgtggacacaccttctgccggctctgcctccccgcgctctcccagatgggggcccaatcctcgggcaagatcctgctctgcccgctctgccaagaggaggagcaggcagagactcccatggcccctgtgcccctgggcccgctgggagaaacttactgcgaggagcacggcgagaagatctacttcttctgcgagaacgatgccgagttcctctgtgtgttctgcagggagggtcccacgcaccaggcgcacaccgtggggttcctggacgaggccattcagccctaccgggatcgtctcaggagtcgactggaagctctgagcacggagagagatgagattgaggatgtaaagtgtcaagaagaccagaagcttcaagtgctgctgactcagatcgaaagcaagaagcatcaggtggaaacagcttttgagaggctgcagcaggagctggagcagcagcgatgtctcctgctggccaggctgagggagctggagcagcagatttggaaggagagggatgaatatatcacaaaggtctctgaggaagtcacccggcttggagcccaggtcaaggagctggaggagaagtgtcagcagccagcaagtgagcttctacaagatgtcagaggaacaattgtcacgtgtgagatgaagacttttgtgagtcctgaggccatttctcctgaccttgtcaagaagatccgtgatttccacaggaaaatactcaccctcccagagatgatgaggatgttctcagaaaacttggcgcatcatctggaaatagattcaggggtcatcactctggaccctcagaccgccagccggagcctggttctctcggaagacaggaagtcagtgaggtacacccggcagaagaagagcctgccagacagccccctgcgcttcgacggcctcccggcggttctgggcttcccgggcttctcctccgggcgccaccgctggcaggttgacctgcagctgggcgacggcggcggctgcacggtgggggtggccggggagggggtgaggaggaagggagagatgggactcagcgccgaggacggcgtctgggccgtgatcatctcgcaccagcagtgctgggccagcacctccccgggcaccgacctgccgctgagcgagatcccgcgcggcgtgagagtcgccctggactacgaggcggggcaggtgaccctccacaacgcccagacccaggagcccatcttcaccttcactgcctctttctccggcaaagtcttccctttctttgccgtctggaaaaaaggttcctgccttacgctgaaaggctgaagtggggcgcgcgaagggcggcgaagcggagacggcggctctccgggatccagctccgcccctggccagtgtgcggcccgggggctccctgtgcccgcgtgaggcgagagaacaggggacttgagtctcgaacagcggttgtttttactttatttatcttaggccctcagctccctgacgtcctgagcctccctgtgacgctctggccttctctgtacctcagagtgcagaaccacagacggcttcggctgtgcctagggcaacagccaacctaggagccagcgggctttcggggaaaaaaaagaaaaagacatctaaaataaaatgtttaaactgtttc

SEQ ID NO: 22214 - DNA, 2214 bp, Homo sapiens; identical to SEQ ID NO: 22192
  misc_feature 1..2214: note = ENST00000427091
  source 1..2214: mol_type = unassigned DNA; mol_type = unassigned DNA

SEQ ID NO: 22215 - DNA, 491 bp, Homo sapiens; identical to SEQ ID NO: 22188
  misc_feature 1..491: note = ENST00000444157
  source 1..491: mol_type = unassigned DNA; mol_type = unassigned DNA

SEQ ID NO: 22216 - DNA, 535 bp, Homo sapiens; identical to SEQ ID NO: 22189
  misc_feature 1..535: note = ENST00000498654
  source 1..535: mol_type = unassigned DNA; mol_type = unassigned DNA

SEQ ID NO: 22217 - DNA, 426 bp, Homo sapiens; identical to SEQ ID NO: 22190
  misc_feature 1..426: note = ENST00000465041
  source 1..426: mol_type = unassigned DNA; mol_type = unassigned DNA

SEQ ID NO: 22218 - DNA, 2217 bp, Homo sapiens; identical to SEQ ID NO: 22196
  misc_feature 1..2217: note = ENST00000550694
  source 1..2217: mol_type = unassigned DNA; mol_type = unassigned DNA

SEQ ID NO: 22219 - DNA, 2214 bp, Homo sapiens; identical to SEQ ID NO: 22198
  misc_feature 1..2214: note = ENST00000430090
  source 1..2214: mol_type = unassigned DNA; mol_type = unassigned DNA

SEQ ID NO: 22220 - DNA, 491 bp, Homo sapiens; identical to SEQ ID NO: 22199
  misc_feature 1..491: note = ENST00000440260
  source 1..491: mol_type = unassigned DNA; mol_type = unassigned DNA

SEQ ID NO: 22221 - DNA, 535 bp, Homo sapiens; identical to SEQ ID NO: 22189
  misc_feature 1..535: note = ENST00000469125
  source 1..535: mol_type = unassigned DNA; mol_type = unassigned DNA

SEQ ID NO: 22222 - DNA, 426 bp, Homo sapiens; identical to SEQ ID NO: 22201
  misc_feature 1..426: note = ENST00000473556
  source 1..426: mol_type = unassigned DNA; mol_type = unassigned DNA

SEQ ID NO: 22223 - DNA, 2217 bp, Homo sapiens; identical to SEQ ID NO: 22203
  misc_feature 1..2217: note = ENST00000546888
  source 1..2217: mol_type = unassigned DNA; mol_type = unassigned DNA

SEQ ID NO: 22224 - DNA, 426 bp, Homo sapiens; identical to SEQ ID NO: 22202
  misc_feature 1..426: note = ENST00000552836
  source 1..426: mol_type = unassigned DNA; mol_type = unassigned DNA

SEQ ID NO: 22225 - DNA, 2214 bp, Homo sapiens; identical to SEQ ID NO: 22192
  misc_feature 1..2214: note = ENST00000414873
  source 1..2214: mol_type = unassigned DNA; mol_type = unassigned DNA

SEQ ID NO: 22226 - DNA, 491 bp, Homo sapiens; identical to SEQ ID NO: 22188
  misc_feature 1..491: note = ENST00000425255
  source 1..491: mol_type = unassigned DNA; mol_type = unassigned DNA

SEQ ID NO: 22227 - DNA, 535 bp, Homo sapiens; identical to SEQ ID NO: 22189
  misc_feature 1..535: note = ENST00000485505
  source 1..535: mol_type = unassigned DNA; mol_type = unassigned DNA

SEQ ID NO: 22228 - DNA, 426 bp, Homo sapiens; identical to SEQ ID NO: 22190
  misc_feature 1..426: note = ENST00000479130
  source 1..426: mol_type = unassigned DNA; mol_type = unassigned DNA

SEQ ID NO: 22229 - DNA, 2217 bp, Homo sapiens; identical to SEQ ID NO: 22196
  misc_feature 1..2217: note = ENST00000552062
  source 1..2217: mol_type = unassigned DNA; mol_type = unassigned DNA

SEQ ID NO: 22230 - DNA, 513 bp, Homo sapiens
  misc_feature 1..513: note = ENST00000491446
  source 1..513: mol_type = unassigned DNA; mol_type = unassigned DNA
cctggggcgtggtcgccgggctgccgtgcgctcgggatcagtctttttatacatatatatatgtgtgtatatatatatatatatatatacacacatatatatatgttataaaattctaacttcggtggagtactttactttgatattccacttgcaaaacagaaccactgattccttcctgcttgacaagattgagtcgctatcaaggagctgcccgtgctttggaaatggtccaaatcgacgaggaactgccaaggagccccctcagacacctctctaagccacacaagccacggagtatagtatgtctccatcaccaaagaggagcaatcgacacctctctgcatagacaagactatcttgaccagaggcactgacagccttccagggtggcagagagacctgtgtgtgcaaggtggcagagatgtggcgcagaagagatgggcacttactccagtgctgatacacagaagccagctttgttcaaaacagtgttgtttagcaaggttgcac

SEQ ID NO: 22231 - DNA, 583 bp, Homo sapiens
  misc_feature 1..583: note = ENST00000441616
  source 1..583: mol_type = unassigned DNA; mol_type = unassigned DNA
ttgcaaaacagaaccactgattccttcctgcttgacaagattgagtcgctatcaaggagctgcccgtgctttggaaatggtccaaatcgacgaggaactgccaaggagccccctcagacacagcgtgcagggtcaaagacagccggccccccatgtcagtggtctaggatggccagtgaaggcaccaacatcccaagtcctgtggtgcgccagattgacaagcagtttctgatttgcagtatatgcctggaacggtacaagaatcccaaggttctcccctgtctgcacactttctgcgagaggtgcctgcagaactacattcctgcccacagtttaaccctctcctgcccagtgtgccgccagacctccatcctgcccgagaaaggggtggccgcgctccagaacaatttcttcatcacaaacctgatggacgtgctgcagcgaactccaggcagcaacgctgaggagtcttccatcctggagacagtcactgctgtggctgcgggaaagcctctctcttgcccaaaccacgatgggaatgtgatggaattttactgccagtcctgtgagactgccatgtgtc

SEQ ID NO: 22232 - DNA, 3832 bp, Homo sapiens
  misc_feature 1..3832: note = ENST00000437508
  source 1..3832: mol_type = unassigned DNA; mol_type = unassigned DNA
agcattttgagtgagcttgcagaaaatgaggggctttcagctggtcgcctgcttgtcacctctcgctgcctgaaaggcagctctcagagccctttcctgtccttctaattacagcggcgggggcagtgcgcgcttcgggacgcaattggaaaccagcgtgcagggtcaaagacagccggccccccatgtcagtggtctaggatggccagtgaaggcaccaacatcccaagtcctgtggtgcgccagattgacaagcagtttctgatttgcagtatatgcctggaacggtacaagaatcccaaggttctcccctgtctgcacactttctgcgagaggtgcctgcagaactacattcctgcccacagtttaaccctctcctgcccagtgtgccgccagacctccatcctgcccgagaaaggggtggccgcgctccagaacaatttcttcatcacaaacctgatggacgtgctgcagcgaactccaggcagcaacgctgaggagtcttccatcctggagacagtcactgctgtggctgcgggaaagcctctctcttgcccaaaccacgatgggaatgtgatggaattttactgccagtcctgtgagactgccatgtgtcgggagtgcacggagggggagcacgcagagcaccccacagttccactcaaggatgtggtggaacagcacaaggcctcgctccaggtccagctggatgctgtcaacaaaaggctcccagaaatagattctgctcttcagttcatctctgaaatcattcatcagttaaccaaccaaaaggccagcatcgtggatgacattcattccacctttgatgagctccagaagactttaaatgtgcgcaagagtgtgctgcttatggaattggaggtcaactatggcctcaaacacaaagtcctccagtcgcagctggatactctgctccaggggcaggagagcattaagagctgcagcaacttcacagcgcaggccctcaaccatggcacggagaccgaggtcctactggtgaagaagcagatgagcgagaagctgaacgagctggccgaccaggacttccccttgcacccgcgggagaacgaccagctggatttcatcgtggaaaccgaggggctgaagaagtccatccacaacctcgggacgatcttaaccaccaacgccgttgcctcagagacagtggccacgggcgaggggctgcggcagaccatcatcgggcagcccatgtccgtcaccatcaccaccaaggacaaagacggtgagctgtgcaaaaccggcaacgcctacctcaccgccgaactgagcacccccgacgggagcgtggcagacggggagatcctggacaacaagaacggcacctatgagtttttgtacactgtccagaaggaaggggactttaccctgtctctgagactctatgaccagcacatccgaggcagcccgtttaagctgaaagtgatccgatccgctgatgtgtctcccaccacagaaggcgtgaagaggcgcgttaagtccccggggagcggccacgtcaagcagaaagctgtgaaaagacccgcaagcatgtacagcactggaaaacgaaaagagaatcccatcgaagacgatttgatctttcgagtgggtaccaaaggaagaaataaaggagagtttacaaatcttcagggggtagctgcatctacaaatggaaagatattaattgcagacagtaacaaccaatgtgtgcagatattttccaatgatggccagttcaaaagtcgttttggcatacggggacgctctccggggcagctgcagcggcccacaggagtggctgtacatcccagtggggacataatcattgccgattatgataataaatgggtcagcattttctcctccgatgggaaatttaagacaaaaattggatcaggaaagctgatgggacccaaaggagtttctgtggaccgcaatgggcacattattgttgtggacaacaaggcgtgctgcgtgtttatcttccagccaaacgggaaaatagtcaccaggtttggtagccgaggaaatggggacaggcagtttgcaggtccccattttgcagctgtaaatagcaataatgagattattattacagatttccataatcattctgtcaaggtgtttaatcaggaaggagaattcatgttgaagtttggctcaaatggagaaggaaatgggcagtttaatgctccaacaggtgtagcagtggattcaaatggaaacatcattgtggccgactggggaaacagcaggatccaggtttttgatgggagtggatcatttttgtcctacattaacacatctgctgacccactctatggcccccaaggcctggccctaacttcagatggtcatgttgtggttgcagactctggaaatcactgtttcaaagtctatcgatacttacagtaatggtgggcaggtggatacccgcttccatggtcttgcactataaactggaatggatttctcaatgcgggaccagattatgactagagtttttatgccagaaggaatcattggtgaactttccaaggttatttctgaatgtaacaatttccttaaaaatgacttatccaatttctgtatttcacctttagggttaaaaaaaactcttctactgaatctataaaaactgcagttttacatctgtgaactatggcttaagggacaggatttatgtagctaaactaattttgcaaatcaaacagacacttaaaaaactagcatatgtaaaggtattcgttaatcctgtgaatggtagcttttgcacagaacttccaaaagcaaaacaaaaacaaaatctattgtagttatatacttcatttaacctaggtcacaagacccagggaatcttctaacctcacttttacagtaggtattactcttgtgacatttttttggttatcaacaactaaatataaattactttggaaaaagtaaggctgtcttgcaaaatgatcccagctctgattagcagccctctggagttcagaacttaagtatcagtgcaaatttctcaacctttctgggttagacaaagatccttttttgtgtgttcttttcaccacccctttggctcaccttgtatcagcaaacaaagtacttcttcagggaaacctgaaatttctaatgccttgaaaagcatattacaaaagtaatgctaccttttgggaaacaaactgccccgttaactccagatcattgcactggaatgtaatcaagaaagttagtcatgttttatgtaccatgttttcacacgtgtctcttctcttcgacttcctgaaagcgaaagctttacctcctgcaaatgtcagcacatgtagtaggacaccagtatcctaggacagagagccataagtagccctttggaggactgatggtgtcaaccaaaggcatgtgattgattaatgattcccccttagaaagcaagtgttaccaaagttgtgttatcttgaaagcattacaggtaagggcatgttatggttatttatcattgtttaatgaatagtagaggtgtcaagggactatgtatacatgattagggtaagatagaatgtattatatatatatatatatacacacacacatatatatagctgaatctttggtgtattgaaataggcagcactctgaaagacagaagcttcgtccagccactcttcagcacattcctttactaagcagtttaaagccgtcctagtggagcaagccctaaagcagatttaatttttgccattttccaagaatgacggtggtggcttttagtcagaaaatggccttctgtgctttcaaaaaaaaaaacaaa

SEQ ID NO: 22233 - DNA, 542 bp, Homo sapiens
  misc_feature 1..542: note = ENST00000496978
  source 1..542: mol_type = unassigned DNA; mol_type = unassigned DNA
agcttgatgactataatgggcccagttgtctgcgggctgcggggagctaagtccccagattggaggaggctggctctggtcttcgatgcacaggagtggccgttatggaacgcaggagctgtgcttgcttataatgaactgtcatgatggaggccggcccgtttcagctctctcagccccgtcaagctgaactcacttcccctgaaaggacagtgtttgcatttgtgtttacgggactggggaagaggatgcgttttcaggagacctgaaaaccgagccaacccccttttcctgccccgctgtgctgcgattggcccatcttggaggctggctgcaggagcctttagtcatcgcacagggaaatctttctggaaccgggcaccaacttgcgtgtttgttttcatgctctttgtgcggggattagctgtcgtgccgggcctgaaaatgctgcgagcgccgggcgacatctaatccaggatttgcctctgcctcgcggttgatggaaaacagatgtcttactgctctgggcctgagcacagaat

SEQ ID NO: 22234 - DNA, 909 bp, Homo sapiens
  misc_feature 1..909: note = ENST00000479711
  source 1..909: mol_type = unassigned DNA; mol_type = unassigned DNA
agcttgatgactataatgggcccagttgtctgcgggctgcggggagctaagtccccagattggaggaggctggctctggtcttcgatgcacaggagtggccgttatggaacgcagcagcagcgtgcagggtcaaagacagccggccccccatgtcagtggtctaggatggccagtgaaggcaccaacatcccaagtcctgtggtgcgccagattgacaagcagtttctgatttgcagtatatgcctggaacggtacaagaatcccaaggttctcccctgtctgcacactttctgcgagaggtgcctgcagaactacattcctgcccacagtttaaccctctcctgcccagtgtgccgccagacctccatcctgcccgagaaaggggtggccgcgctccagaacaatttcttcatcacaaacctgatggacgtgctgcagcgaactccaggcagcaacgctgaggagtcttccatcctggagacagtcactgctgtggctgcgggaaagcctctctcttgcccaaaccacgatgggaatgtcctccagtcgcagctggatactctgctccaggggcaggagagcattaagagctgcagcaacttcacagcgcaggccctcaaccatggcacggagaccgaggtcctactggtgaagaagcagatgagcgagaagctgaacgagctggccgaccaggacttccccttgcacccgcgggagaacgaccagctggatttcatcgtggaaaccgaggggctgaagaagtccatccacaacctcgggacgatcttaaccaccaacgccgttgcctcagagacagtggccacgggcgaggggctgcggcagaccatcatcgggcagcccatgtccgtcaccatcaccaccaaggacaaagacggtgagctgtgcaa

SEQ ID NO: 22235 - DNA, 2202 bp, Homo sapiens
  misc_feature 1..2202: note = ENST00000494872
  source 1..2202: mol_type = unassigned DNA; mol_type = unassigned DNA
agcttgatgactataatgggcccagttgtctgcgggctgcggggagctaagtccccagattggaggaggctggctctggtcttcgatgcacaggagtggccgttatggaacgcagcagcagcgtgcagggtcaaagacagccggccccccatgtcagtggtctaggatggccagtgaaggcaccaacatcccaagtcctgtggtgcgccagattgacaagcagtttctgatttgcagtatatgcctggaacggtacaagaatcccaaggttctcccctgtctgcacactttctgcgagaggtgcctgcagaactacattcctgcccacagtttaaccctctcctgcccagtgtgccgccagacctccatcctgcccgagaaaggggtggccgcgctccagaacaatttcttcatcacaaacctgatggacgtgctgcagcgaactccaggcagcaacgctgaggagtcttccatcctggagacagtcactgctgtggctgcgggaaagcctctctcttgcccaaaccacgatgggaatgtgatggaattttactgccagtcctgtgagactgccatgtgtcgggagtgcacggagggggagcacgcagagcaccccacagttccactcaaggatgtggtggaacagcacaaggcctcgctccaggtccagctggatgctgtcaacaaaaggctcccagaaatagattctgctcttcagttcatctctgaaatcattcatcagttaaccaaccaaaaggccagcatcgtggatgacattcattccacctttgatgagctccagaagactttaaatgtgcgcaagagtgtgctgcttatggaattggaggtcaactatggcctcaaacacaaagtcctccagtcgcagctggatactctgctccaggggcaggagagcattaagagctgcagcaacttcacagcgcaggccctcaaccatggcacggagaccgaggtcctactggtgaagaagcagatgagcgagaagctgaacgagctggccgaccaggacttccccttgcacccgcgggagaacgaccagctggatttcatcgtggaaaccgaggggctgaagaagtccatccacaacctcgggacgatcttaaccaccaacgccgttgcctcagagacagtggccacgggcgaggggctgcggcagaccatcatcgggcagcccatgtccgtcaccatcaccaccaaggacaaagacggtgagctgtgcaaaaccggcaacgcctacctcaccgccgaactgagcacccccgacgggagcgtggcagacggggagatcctggacaacaagaacggcacctatgagtttttgtacactgtccagaaggaaggggactttaccctgtctctgagactctatgaccagcacatccgaggcagcccgtttaagctgaaagtgatccgatccgctgatgtgtctcccaccacagaaggcgtgaagaggcgcgttaagtccccggggagcggccacgtcaagcagaaagctgtgaaaagacccgcaagcatgtacagcactggaaaacgaaaagagaatcccatcgaagacgatttgatctttcgagtggatggagtcttgcaggctgaagtacagtggcatgatctcagcccactgcaaccactgcctcctgggttcaaacaattctcctgcctcggcctcctgagtagctgggattacaggcatgcgccaccatgctcagctaattttttgtatttttagtagtagggatggggtttcattatgttggccaggctggtcttaaattcctgacctcaagtgatccacccaccttggcctcccaaagtgctgggattacaggtgtaagccattgtgcccggccagcattaatttcatattaagttggagtgggtggtgagaggaaatctgcatttattgatcccctatttcagtctaagggttcaccttatgtaatcttcctggaggggtaggtggaagtgaccaggaagaatatgggtgagaagctgttgaattaaaaattcattttgtgcttcataggctagacttgcatctggaaaaacaaaatgatttaattatggaattatagaataattgttaaattgattataattactttaaaaattcttgttattcattctactagctaatatgtaaccatcaaatgaaatcttttacattaaagtagatagaaaaat

SEQ ID NO: 22236 - DNA, 6735 bp, Homo sapiens
  misc_feature 1..6735: note = ENST00000338700
  source 1..6735: mol_type = unassigned DNA; mol_type = unassigned DNA
cccagttgtctgcgggctgcggggagctaagtccccagattggaggaggctggctctggtcttcgatgcacaggagtggccgttatggaacgcagcagcagcgtgcagggtcaaagacagccggccccccatgtcagtggtctaggatggccagtgaaggcaccaacatcccaagtcctgtggtgcgccagattgacaagcagtttctgatttgcagtatatgcctggaacggtacaagaatcccaaggttctcccctgtctgcacactttctgcgagaggtgcctgcagaactacattcctgcccacagtttaaccctctcctgcccagtgtgccgccagacctccatcctgcccgagaaaggggtggccgcgctccagaacaatttcttcatcacaaacctgatggacgtgctgcagcgaactccaggcagcaacgctgaggagtcttccatcctggagacagtcactgctgtggctgcgggaaagcctctctcttgcccaaaccacgatgggaatgtgatggaattttactgccagtcctgtgagactgccatgtgtcgggagtgcacggagggggagcacgcagagcaccccacagttccactcaaggatgtggtggaacagcacaaggcctcgctccaggtccagctggatgctgtcaacaaaaggctcccagaaatagattctgctcttcagttcatctctgaaatcattcatcagttaaccaaccaaaaggccagcatcgtggatgacattcattccacctttgatgagctccagaagactttaaatgtgcgcaagagtgtgctgcttatggaattggaggtcaactatggcctcaaacacaaagtcctccagtcgcagctggatactctgctccaggggcaggagagcattaagagctgcagcaacttcacagcgcaggccctcaaccatggcacggagaccgaggtcctactggtgaagaagcagatgagcgagaagctgaacgagctggccgaccaggacttccccttgcacccgcgggagaacgaccagctggatttcatcgtggaaaccgaggggctgaagaagtccatccacaacctcgggacgatcttaaccaccaacgccgttgcctcagagacagtggccacgggcgaggggctgcggcagaccatcatcgggcagcccatgtccgtcaccatcaccaccaaggacaaagacggtgagctgtgcaaaaccggcaacgcctacctcaccgccgaactgagcacccccgacgggagcgtggcagacggggagatcctggacaacaagaacggcacctatgagtttttgtacactgtccagaaggaaggggactttaccctgtctctgagactctatgaccagcacatccgaggcagcccgtttaagctgaaagtgatccgatccgctgatgtgtctcccaccacagaaggcgtgaagaggcgcgttaagtccccggggagcggccacgtcaagcagaaagctgtgaaaagacccgcaagcatgtacagcactggaaaacgaaaagagaatcccatcgaagacgatttgatctttcgagtgggtaccaaaggaagaaataaaggagagtttacaaatcttcagggggtagctgcatctacaaatggaaagatattaattgcagacagtaacaaccaatgtgtgcagatattttccaatgatggccagttcaaaagtcgttttggcatacggggacgctctccggggcagctgcagcggcccacaggagtggctgtacatcccagtggggacataatcattgccgattatgataataaatgggtcagcattttctcctccgatgggaaatttaagacaaaaattggatcaggaaagctgatgggacccaaaggagtttctgtggaccgcaatgggcacattattgttgtggacaacaaggcgtgctgcgtgtttatcttccagccaaacgggaaaatagtcaccaggtttggtagccgaggaaatggggacaggcagtttgcaggtccccattttgcagctgtaaatagcaataatgagattattattacagatttccataatcattctgtcaaggtgtttaatcaggaaggagaattcatgttgaagtttggctcaaatggagaaggaaatgggcagtttaatgctccaacaggtgtagcagtggattcaaatggaaacatcattgtggccgactggggaaacagcaggatccaggtttttgatgggagtggatcatttttgtcctacattaacacatctgctgacccactctatggcccccaaggcctggccctaacttcagatggtcatgttgtggttgcagactctggaaatcactgtttcaaagtctatcgatacttacagtaatggtgggcaggtggatacccgcttccatggtcttgcactataaactggaatggatttctcaatgcgggaccagattatgactagagtttttatgccagaaggaatcattggtgaactttccaaggttatttctgaatgtaacaatttccttaaaaatgacttatccaatttctgtatttcacctttagggttaaaaaaaactcttctactgaatctataaaaactgcagttttacatctgtgaactatggcttaagggacaggatttatgtagctaaactaattttgcaaatcaaacagacacttaaaaaactagcatatgtaaaggtattcgttaatcctgtgaatggtagcttttgcacagaacttccaaaagcaaaacaaaaacaaaatctattgtagttatatacttcatttaacctaggtcacaagacccagggaatcttctaacctcacttttacagtaggtattactcttgtgacatttttttggttatcaacaactaaatataaattactttggaaaaagtaaggctgtcttgcaaaatgatcccagctctgattagcagccctctggagttcagaacttaagtatcagtgcaaatttctcaacctttctgggttagacaaagatccttttttgtgtgttcttttcaccacccctttggctcaccttgtatcagcaaacaaagtacttcttcagggaaacctgaaatttctaatgccttgaaaagcatattacaaaagtaatgctaccttttgggaaacaaactgccccgttaactccagatcattgcactggaatgtaatcaagaaagttagtcatgttttatgtaccatgttttcacacgtgtctcttctcttcgacttcctgaaagcgaaagctttacctcctgcaaatgtcagcacatgtagtaggacaccagtatcctaggacagagagccataagtagccctttggaggactgatggtgtcaaccaaaggcatgtgattgattaatgattcccccttagaaagcaagtgttaccaaagttgtgttatcttgaaagcattacaggtaagggcatgttatggttatttatcattgtttaatgaatagtagaggtgtcaagggactatgtatacatgattagggtaagatagaatgtattatatatatatatatatacacacacacatatatatagctgaatctttggtgtattgaaataggcagcactctgaaagacagaagcttcgtccagccactcttcagcacattcctttactaagcagtttaaagccgtcctagtggagcaagccctaaagcagatttaatttttgccattttccaagaatgacggtggtggcttttagtcagaaaatggccttctgtgctttcaaaaaaaaaaacaaaaaaaaaaccacacacacacataaaaaacccaacaggtcaaaataaaagttgaacttgagttacatttaatttaaatataaatgcattttgagaaatgttaagaacaatttagtcaatcgttcatctgtcattggtactgtaaaataagctgtggtctatttccactgtttaattttctactcagttctaccaaataggatgtcatgtttgacatttttgatagtgactttggggtcttcttcactgaaagcaccttagaactgtactataagaaaacatttcccctatgtataattatatgaatgtgatgtttattgcttattaatttataattcagtcattctctatataggacttcttaaaatttagaagggaaatctagctacttcaaattgtctgttaaatttattatgcccaaatcaacctctgaaaaaaggtttttccaggaagatttacatttaggtttaatatttttttagttaggtagagttttaaaaaatacttgagcctgtccgtgataaagctataaaattcaataactttttagaatgttaaatgaagacactgtttcctaacatcagtgagatacatctttgaatttaaacattcatatttactgagtacctactaggtaccaagtactcttttaggcactggaaatacagtgatggacaaaacaggtaaaaaatcgctgccccctcagagctgacattctggggtgggaatttcattttgccacgtactaacgttctgcacaaaagacaggctagactcttgtctagattgtttaaaagaaacttttcaaattggttacattaattttagtttattttcacaagtaaaaatggctttttatttagattctttctgtcccaggctgttgatcttaaaactagttgatttaaagagtttttttgcacaacatttcaattatatttgtgaacttagaaattaacttacaatctaaccagccatcatatcatatcctatcaggctagatatctcaatagtagactgaatacaaagctaattttttttacatgtcaatattggcacaaactggaatgaaagaatagtttgattcagacctgctccactatgtgttgctaaaacacatgctatgagcactccaggaaacactatattttttccaaaaaatatgtgattatatatgttaaagtatagataacatttcacacttggatacatatgtgcatttactgtatttcttggtaagcatatttttgggggaaagtgctgctgatatgatacaagtagacaaaatttaaatgaaattttgtcacattctatggaaaatggtttctggtaaactgagaaggatattaaaataagtggcttttttctgggctaccattattgtttgatttctctttgtcaagtgtatagaacctgtcatacattcatgataagtagcactgaaaaattactcattcaaatttcccctgggcacgtaaggcaaaatattgccggttgggatttcaaggtcagtgacgacgcatttcctcccagtacagaccccccagccccccttgctggacatggggaggcagagagtcacttgaccatccagaaatacatgactacaagtcctttatgactgtttgccattttttttaatggtacttagtattttgatcaaactttagtctccagaactaaacaagtccctaagtttccttattttaatttactgtgactagatttgaagcaaataaatactccagatccatgcagctagaacacacttgcttccactactaaatatacagggtatgtcctaacatggagttaactggaatagcagtacactagcaagtatctgtgaatccttagcactgacgggttaacagaaatgctttggtaatacctacttagttaattggaggaagtagtaaataaacattaggtaatctgcagattacttcaaatgggaaaaatctttttgtagactctatagtaccctctctattcactagcttctgaaaagggaggagtatttttagtttgacaatttaataatttaaaaacaagacatctccaggtaggaaaaaatgaaagctatttcatgcaaacattatctaatttagcttaaaagtgaaagtggtaatactgttggtttctgtaaatgttgcagggttttaaactttataattactttaatatttttgataactagaaatctagtattgccataaaggaaactaagtgcccatcaaagatttgtttggtataaataaagaattatttgttttgttttcaatgacagtaagctacaaatcatgatgcttaaaaactttctaaagatgaattgtgtggcagtgattggtctgtttgtggagaatgtatgaaagctattaatattctagaatagattaataaattggctatgttgttccaatgaatgtacagcacttccattaacttttgaaagcaacacagccttaaactcaatgcttttgctttatgacatgggaatgttctgtcatcaatggagtgtattcttgtaatagaattctttatatcgttctcaattctatagactttcaagcctatgtatgaatatgaaggggttttttttttttgctttgttttctttttagattttgtacattccatctttataggtctgtttcatatgttttatgtatagaacactaagtcttgcactctctgacattgatactgatatattctcgtcatttgttcttttatgaatcaaaatgttgactgcctatttaaagaaaagaatgaacgctgtgcatcaaagtgtttgtatgttcgtagctacatacgtaccacagtattttggatgctttagtctacaatgaaactttcaattaattctgtcttgaaacataggagaaacaggattcatgtgtatctctttaccatgcacaaaatctcaaatcattataataaagcttgttttctccattt

SEQ ID NO: 22237 - DNA, 656 bp, Homo sapiens
  misc_feature 1..656: note = ENST00000632856
  source 1..656: mol_type = unassigned DNA; mol_type = unassigned DNA
ctggctgggcgcgcagcgaggcccaggcccgaggggtgaggcccaggccactccggagcgcgcgctgttcccgcgaagcgagtcgccgtctcgtacagcagcgtgcagggtcaaagacagccggccccccatgtcagtggtctaggatggccagtgaaggcaccaacatcccaagtcctgtggtgcgccagattgacaagcagtttctgatttgcagtatatgcctggaacggtacaagaatcccaaggttctcccctgtctgcacactttctgcgagaggtgcctgcagaactacattcctgcccacagtttaaccctctcctgcccagtgtgccgccagacctccatcctgcccgagaaaggggtggccgcgctccagaacaatttcttcatcacaaacctgatggacgtgctgcagcgaactccaggcagcaacgctgaggagtcttccatcctggagacagtcactgctgtggctgcgggaaagcctctctcttgcccaaaccacgatgggaatgtaagtggctgggatggcagatactgcccgggagcatgactactgtggccttggggaggctttgggtacatcagagattacagattgaaacagaactccatgtggaaaaatcagtaattaaaaaagatttttaccagc

SEQ ID NO: 22238 - DNA, 570 bp, Homo sapiens
  misc_feature 1..570: note = ENST00000502281
  source 1..570: mol_type = unassigned DNA; mol_type = unassigned DNA
cttttcaacagacgctcagtgagaaaaagatgtcctgtaagatcaagaccgattggtgtgaatactgaagggggtcttccacttgttaatgacccagaaacattcctgccgacttccagccttctctcatttcctccatttttctcttcctctgttctgtgcatgaactggcacatcactacttagagcagaagatatgctgggcttctgatgatggctgcactgcatggtagggaattttaaccagtctctttgcatggtgcttcccaacttgaagtgttagcagaaacgtgcgttgttcttttggattgccgcgtagctgcagcgacagacttgggaggatttaattctttgcctcgttggttagtctgtttgtcttcagaaatggcagcgtgcagggtcaaagacagccggccccccatgtcagtggtctaggatggccagtgaaggcaccaacatcccaagtcctgtggtgcgccagattgacaagcagtttctgatttgcagtatatgcctggaacggtacaagaatcccaaggttctcccctgtctgcacactttctgcgagag

SEQ ID NO: 22239 - DNA, 773 bp, Homo sapiens
  misc_feature 1..773: note = ENST00000482578
  source 1..773: mol_type = unassigned DNA; mol_type = unassigned DNA
aaaagatgtcctgtaagatcaagaccgattggtgtgaatactgaagggggtcttccacttgttaatgacccagaaacattcctgccgacttccagccttctctcatttcctccatttttctcttcctctgttctgtgcatgaactggcacatcactacttagagcagaagatatgctgggcttctgatgatggctgcactgcatgcagcagcgtgcagggtcaaagacagccggccccccatgtcagtggtctaggatggccagtgaaggcaccaacatcccaagtcctgtggtgcgccagattgacaagcagtttctgatttgcagtatatgcctggaacggtacaagaatcccaaggttctcccctgtctgcacactttctgcgagaggtgcctgcagaactacattcctgcccacagtttaaccctctcctgcccagtgtgccgccagacctccatcctgcccgagaaaggggtggccgcgctccagaacaatttcttcatcacaaacctgatggacgtgctgcagcgaactccaggcagcaacgctgaggagtcttccatcctggagacagtcactgctgtggctgcgggaaagcctctctcttgcccaaaccacgatgggaatgtaagtggctgggatggcagatactgcccgggagcatgactactgtggccttggggaggctttgggtacatcagagattacagattgaaacagaactccatgtggaaaaatcagtaattaaaaaagatttttaccagccctcaga

SEQ ID NO: 22240 - DNA, 654 bp, Homo sapiens
  misc_feature 1..654: note = ENST00000433687
  source 1..654: mol_type = unassigned DNA; mol_type = unassigned DNA
gtcctgtaagatcaagaccgattggtgtgaatactgaagggggtcttccacttgttaatgacccagaaacattcctgccgacttccagccttctctcatttcctccatttttctcttcctctgttctgtgcatgaactggcacatcactacttagagcagaagatatgctgggcttctgatgatggctgcactgcatggtgcctgcagaactacattcctgcccacagtttaaccctctcctgcccagtgtgccgccagacctccatcctgcccgagaaaggggtggccgcgctccagaacaatttcttcatcacaaacctgatggacgtgctgcagcgaactccaggcagcaacgctgaggagtcttccatcctggagacagtcactgctgtggctgcgggaaagcctctctcttgcccaaaccacgatgggaatgtgatggaattttactgccagtcctgtgagactgccatgtgtcgggagtgcacggagggggagcacgcagagcaccccacagttccactcaaggatgtggtggaacagcacaaggcctcgctccaggtccagctggatgctgtcaacaaaaggctcccagaaatagattctgctcttcagttcatctctgaaatcattcatcagttaaccaaccaaaa

SEQ ID NO: 22241 - DNA, 580 bp, Homo sapiens
  misc_feature 1..580: note = ENST00000460908
  source 1..580: mol_type = unassigned DNA; mol_type = unassigned DNA
aaaaattggatcaggaaagctgatgggacccaaaggagtttctgtggaccgcaatgggcacattattgttgtggacaacaaggcgtgctgcgtgtttatcttccagccaaacgggaaaatagtcaccaggtttggtagccgaggaaatggggacaggcagtttgcaggtccccattttgcagctgtaaatagcaataatgagattattattacagatttccataatcattctgtcaaggtactacaagcacatgagttgttgttaacttttaactgcttttatggagaaattggtctgcgagaaaataatgcaatacttacatatggcaccaaagggagttaaccagcagagtagactttgttctgctcaaagatgccggttttaacttggacttacagaccttggaaagtcaggaaattgaataaaatgtggtggcaataagttgcttaatttgaaactggtgcaaatgaagaggacttgaaaattaaattttaaaaagcaattcgttgaacttagaggcagaactttctgaagcttaatgttttgtggctagtcaataaattaaaatcactttttcaa

SEQ ID NO: 22242 - DNA, 3115 bp, Homo sapiens
  misc_feature 1..3115: note = ENST00000493978
  source 1..3115: mol_type = unassigned DNA; mol_type = unassigned DNA
catgcatatccagccctgcgcagtctggcctctgccgttctcactaagccctttcctgttttaccttacctctcttcatccggccagtacttcttatccgtcaattctctgcgcaggtatctcccagagaggttgcccatgtcatctcccagccattgtggcttctgtcattgtgccgattttgtttgttttcttgttgttttatgcagtgaccccactggaatgtcagctccataaaaaagggaccacatttgttttgttcactgatatgtcccatctctgctacagtgttgggtgcagatgcattgaagtcttatttgattcatattgatacttgtgcttttttctttcccttctaggacacgagagacttcctaaacaggtaaaagagtctcctctccatggcgtacctcatcccccttgtttatgttcccccgcttctgaccaggtgcatttgaattcatggggagtggtatggtgccagaggtactcacatcccatggttcatcctgatgcctttctgaggagcaggacacatcattgagaactggagacttgctctcctccttatgagttctctgtgtagccccagctccttggcccactggccttatttgaggtgggacagagcagagaggttagaaacatggcttagtagacagagcgccctggatgtggagtctactgatgttctgaagccctggttcagctggtgtctttgggccactgtttttctgtcacttgtttggggataatcatacctttcctctccccttcataattgccatgaggattgagagataagtatgaaggaaagtaagaagagctgagtaacagcttgttatgtatgtcatcttcttaggtatccacggaagaagttctgggttgggaaacccattgctcgagtggttaaaaaaaagaccggagaattctcagataaactcctctctctgcaacgaggcctgagggaattccaggggaagctgctgagagacttggaatataagacagtgagcgtcaccctggacccacagtcggccagtgggtacctgcagctgtcagaggactggaagtgcgtgacctacaccagcctgtacaagagtgcctacctgcacccccagcagtttgactgtgagcctggggtgctgggcagcaagggcttcacctggggcaaggtctactgggaagtggaagtggagagggagggctggtctgaggatgaagaagagggggatgaggaggaagagggagaagaggaggaggaggaagaggaggccggctatggggatggatatgacgactgggaaacggacgaagatgaggaatcgttgggcgatgaagaggaagaagaggaggaggaagaggaggaagttctggaaagctgcatggtgggggtggctagagactctgtgaagaggaagggagacctctccctgcggccagaggatggcgtgtgggcgctgcgcctctcctcctccggcatctgggccaacaccagccccgaggctgagcttttcccagcactgcggccccggagagtgggcatcgccctggattatgaagggggcaccgtgactttcaccaacgcagagtcacaggaactcatctacaccttcactgccaccttcacccggcgcctggtccccttcctgtggctcaagtggccaggaacacgcctcctgctaagaccctgagccctgacatctgcccccagccccaaccctcagatgcttcacttctttggaattccaggactctcaatggggggacgggatgcctggcctaagcacctggagcaggggaccccatatccactggtagccacctccccattgctgtggccccctgaaatctcactcagtgctgttgctccatctactgccctaatggggctcttttcccacctcctgctggtttcccgagggaacttctgaccctggagtccatgagggctcctttcctttttgaccacgaccttggccctagctctgcactctctggaataagggcccgatgcagcattttcttgcccagtgtggcaagacctcagaaaaaccagtcaattacgcctaagatcattttgctgtccttaaaccccccaggttccttcttgcacaaatccactctgctgcccaccttccctggcattttaaacagacctaccccaccccaactcagagttaagcatacatggcaatgctgaaaataaacaaaatccactgaggcttcccaggccatttaaagcctggagtaccagcgcatatcatctcatggggtccagagtggagtccaggcttctctgaaaccagggctgagcatatttccatagccaaggaggtgggactccctggagctatctgtggtcttagggaaggatccagacatacacggctttggggtacaagctgtgatcactgatcaataaattatctctagattggtccttgtgaggggagttttaagaatccagaacatcttgctcttgatcagcacatccaaaaacaccaagacaaacatccagtggagcagaacctctcctgcctcgggagttctgaccgggttccccagcagggtgttaagcctctgtctctggccctaccagcatccaggttccactttcctaggagagagtggagatgggaagacagggaaaggaaggcagcaggaggccacaagcccaccaggtcttcatgtcaagagagggagtaacatgtcttctcattgcccacggacccaacctctgtccaggtgcccctcatcatcacagtttaacacaagctcccctgctccagccaaattgatctcccagtcttgtccttacccattccaagtgctctgccagcccctgttcatccaagttttaagtcctccaccctgttataagagactgttccaacggctctgggcctcagtggtcacttgaccaccattgtctcagagctgcccactttgtgtgtgtcacatgctgcctgagtcacatgtacatcttatttctgcctctagttttgtaagctcctggagggcggataacatcttatactactcttgtattctcatggcacctagtgcagtgctgggcacagagtaggtgctcaataaagacttgttgaatgaa

SEQ ID NO: 22243 - DNA, 3250 bp, Homo sapiens
  misc_feature 1..3250: note = ENST00000438908
  source 1..3250: mol_type = unassigned DNA; mol_type = unassigned DNA
gagtcaggaatggagagaagggtaatggtgttacctcttattgtggaaacctgttgagatcacagagaatatactgacggcataaaagggcagaaccatagcagggtgcgcgctgctgtagttgccttccatggatctataggagagcaagtcctccaggagaagaagtcctcaccagtgaacggagacctctctgaactaagaataccatggccacgtcagccccactacggagcctggaagaggaggtgacctgctccatctgtcttgattacctgcgggaccctgtgaccattgactgtggccacgtcttctgccgcagctgcaccacagacgtccgccccatctcagggagccgccccgtctgcccactctgcaagaagccttttaagaaggagaacatccgacccgtgtggcaactggccagcctggtggagaacattgagcggctgaaggtggacaagggcaggcagccgggagaggtgacccgggagcagcaggatgcaaagttgtgcgagcgacaccgagagaagctgcactactactgtgaggacgacgggaagctgctgtgcgtgatgtgccgggagtcccgggagcacaggccccacacggccgtcctcatggagaaggccgcccagccccacagggaaaaaatcctgaaccacctgagtaccctaaggagagacagagacaaaattcagggcttccaggcaaagggagaagctgatatcctggccgcgctgaagaagctccaggaccagaggcagtacattgtggctgagtttgagcagggtcatcagttcctgagggagcgggaggaacacctgctggaacagctggcgaagctggagcaggagctcacggagggcagggagaagttcaagagccggggcgtcggggagcttgcccggctggccctggtcatctccgaactggagggcaaggcgcagcagccagctgcagagctcatgcaggacacgagagacttcctaaacaggtatccacggaagaagttctgggttgggaaacccattgctcgagtggttaaaaaaaagaccggagaattctcagataaactcctctctctgcaacgaggcctgagggaattccaggggaagctgctgagagacttggaatataagacagtgagcgtcaccctggacccacagtcggccagtgggtacctgcagctgtcagaggactggaagtgcgtgacctacaccagcctgtacaagagtgcctacctgcacccccagcagtttgactgtgagcctggggtgctgggcagcaagggcttcacctggggcaaggtctactgggaagtggaagtggagagggagggctggtctgaggatgaagaagagggggatgaggaggaagagggagaagaggaggaggaggaagaggaggccggctatggggatggatatgacgactgggaaacggacgaagatgaggaatcgttgggcgatgaagaggaagaagaggaggaggaagaggaggaagttctggaaagctgcatggtgggggtggctagagactctgtgaagaggaagggagacctctccctgcggccagaggatggcgtgtgggcgctgcgcctctcctcctccggcatctgggccaacaccagccccgaggctgagcttttcccagcactgcggccccggagagtgggcatcgccctggattatgaagggggcaccgtgactttcaccaacgcagagtcacaggaactcatctacaccttcactgccaccttcacccggcgcctggtccccttcctgtggctcaagtggccaggaacacgcctcctgctaagaccctgagccctgacatctgcccccagccccaaccctcagatgcttcacttctttggaattccaggactctcaatggggggacgggatgcctggcctaagcacctggagcaggggaccccatatccactggtagccacctccccattgctgtggccccctgaaatctcactcagtgctgttgctccatctactgccctaatggggctcttttcccacctcctgctggtttcccgagggaacttctgaccctggagtccatgagggctcctttcctttttgaccacgaccttggccctagctctgcactctctggaataagggcccgatgcagcattttcttgcccagtgtggcaagacctcagaaaaaccagtcaattacgcctaagatcattttgctgtccttaaaccccccaggttccttcttgcacaaatccactctgctgcccaccttccctggcattttaaacagacctaccccaccccaactcagagttaagcatacatggcaatgctgaaaataaacaaaatccactgaggcttcccaggccatttaaagcctggagtaccagcgcatatcatctcatggggtccagagtggagtccaggcttctctgaaaccagggctgagcatatttccatagccaaggaggtgggactccctggagctatctgtggtcttagggaaggatccagacatacacggctttggggtacaagctgtgatcactgatcaataaattatctctagattggtccttgtgaggggagttttaagaatccagaacatcttgctcttgatcagcacatccaaaaacaccaagacaaacatccagtggagcagaacctctcctgcctcgggagttctgaccgggttccccagcagggtgttaagcctctgtctctggccctaccagcatccaggttccactttcctaggagagagtggagatgggaagacagggaaaggaaggcagcaggaggccacaagcccaccaggtcttcatgtcaagagagggagtaacatgtcttctcattgcccacggacccaacctctgtccaggtgcccctcatcatcacagtttaacacaagctcccctgctccagccaaattgatctcccagtcttgtccttacccattccaagtgctctgccagcccctgttcatccaagttttaagtcctccaccctgttataagagactgttccaacggctctgggcctcagtggtcacttgaccaccattgtctcagagctgcccactttgtgtgtgtcacatgctgcctgagtcacatgtacatcttatttctgcctctagttttgtaagctcctggagggcggataacatcttatactactcttgtattctcatggcacctagtgcagtgctgggcacagagtaggtgctcaataaagacttgttgaatgaa

SEQ ID NO: 22244 - DNA, 3478 bp, Homo sapiens
  misc_feature 1..3478: note = ENST00000455000
  source 1..3478: mol_type = unassigned DNA; mol_type = unassigned DNA
aacagaccgccgtgagagaggaggggcgccggccgggattcgcggcccggagctcgggaccggagtcaggaatggagagaagggtaatggtgttacctcttattgtggaaacctgttgagatcacagagaatatactgacggcataaaagggcagaaccatagcagggtgcggttgcttcattccagcctcgcagtcacctctgtgccctgctggttgtcttcccagcgctgctgtagttgccttccatggatctataggagagcaagtcctccaggagctggtggtgtctgtcgattgactgagtgctggagctggcagccctgtgcaggctgccacctttgcccctttactgtgcttgctcctgactctatgtcgcgtctccaaggagaagaagtcctcaccagtgaacggagacctctctgaactaagaataccatggccacgtcagccccactacggagcctggaagaggaggtgacctgctccatctgtcttgattacctgcgggaccctgtgaccattgactgtggccacgtcttctgccgcagctgcaccacagacgtccgccccatctcagggagccgccccgtctgcccactctgcaagaagccttttaagaaggagaacatccgacccgtgtggcaactggccagcctggtggagaacattgagcggctgaaggtggacaagggcaggcagccgggagaggtgacccgggagcagcaggatgcaaagttgtgcgagcgacaccgagagaagctgcactactactgtgaggacgacgggaagctgctgtgcgtgatgtgccgggagtcccgggagcacaggccccacacggccgtcctcatggagaaggccgcccagccccacagggaaaaaatcctgaaccacctgagtaccctaaggagagacagagacaaaattcagggcttccaggcaaagggagaagctgatatcctggccgcgctgaagaagctccaggaccagaggcagtacattgtggctgagtttgagcagggtcatcagttcctgagggagcgggaggaacacctgctggaacagctggcgaagctggagcaggagctcacggagggcagggagaagttcaagagccggggcgtcggggagcttgcccggctggccctggtcatctccgaactggagggcaaggcgcagcagccagctgcagagctcatgcaggacacgagagacttcctaaacaggtatccacggaagaagttctgggttgggaaacccattgctcgagtggttaaaaaaaagaccggagaattctcagataaactcctctctctgcaacgaggcctgagggaattccaggggaagctgctgagagacttggaatataagacagtgagcgtcaccctggacccacagtcggccagtgggtacctgcagctgtcagaggactggaagtgcgtgacctacaccagcctgtacaagagtgcctacctgcacccccagcagtttgactgtgagcctggggtgctgggcagcaagggcttcacctggggcaaggtctactgggaagtggaagtggagagggagggctggtctgaggatgaagaagagggggatgaggaggaagagggagaagaggaggaggaggaagaggaggccggctatggggatggatatgacgactgggaaacggacgaagatgaggaatcgttgggcgatgaagaggaagaagaggaggaggaagaggaggaagttctggaaagctgcatggtgggggtggctagagactctgtgaagaggaagggagacctctccctgcggccagaggatggcgtgtgggcgctgcgcctctcctcctccggcatctgggccaacaccagccccgaggctgagcttttcccagcactgcggccccggagagtgggcatcgccctggattatgaagggggcaccgtgactttcaccaacgcagagtcacaggaactcatctacaccttcactgccaccttcacccggcgcctggtccccttcctgtggctcaagtggccaggaacacgcctcctgctaagaccctgagccctgacatctgcccccagccccaaccctcagatgcttcacttctttggaattccaggactctcaatggggggacgggatgcctggcctaagcacctggagcaggggaccccatatccactggtagccacctccccattgctgtggccccctgaaatctcactcagtgctgttgctccatctactgccctaatggggctcttttcccacctcctgctggtttcccgagggaacttctgaccctggagtccatgagggctcctttcctttttgaccacgaccttggccctagctctgcactctctggaataagggcccgatgcagcattttcttgcccagtgtggcaagacctcagaaaaaccagtcaattacgcctaagatcattttgctgtccttaaaccccccaggttccttcttgcacaaatccactctgctgcccaccttccctggcattttaaacagacctaccccaccccaactcagagttaagcatacatggcaatgctgaaaataaacaaaatccactgaggcttcccaggccatttaaagcctggagtaccagcgcatatcatctcatggggtccagagtggagtccaggcttctctgaaaccagggctgagcatatttccatagccaaggaggtgggactccctggagctatctgtggtcttagggaaggatccagacatacacggctttggggtacaagctgtgatcactgatcaataaattatctctagattggtccttgtgaggggagttttaagaatccagaacatcttgctcttgatcagcacatccaaaaacaccaagacaaacatccagtggagcagaacctctcctgcctcgggagttctgaccgggttccccagcagggtgttaagcctctgtctctggccctaccagcatccaggttccactttcctaggagagagtggagatgggaagacagggaaaggaaggcagcaggaggccacaagcccaccaggtcttcatgtcaagagagggagtaacatgtcttctcattgcccacggacccaacctctgtccaggtgcccctcatcatcacagtttaacacaagctcccctgctccagccaaattgatctcccagtcttgtccttacccattccaagtgctctgccagcccctgttcatccaagttttaagtcctccaccctgttataagagactgttccaacggctctgggcctcagtggtcacttgaccaccattgtctcagagctgcccactttgtgtgtgtcacatgctgcctgagtcacatgtacatcttatttctgcctctagttttgtaagctcctggagggcggataacatcttatactactcttgtattctcatggcacctagtgcagtgctgggcacagagtaggtgctcaataaagacttgttgaatgaa

SEQ ID NO: 22245 - DNA, 3318 bp, Homo sapiens
  misc_feature 1..3318: note = ENST00000436219
  source 1..3318: mol_type = unassigned DNA; mol_type = unassigned DNA
gggagattacggggcggggacgagctgtcgcgctggttgctcgtgcaggagcgggacccggaacagaccgccgtgagagaggaggggcgccggccgggattcgcggcccggagctcgggaccggttgcttcattccagcctcgcagtcacctctgtgccctgctggttgtcttcccagcgctgctgtagttgccttccatggatctataggagagcaagtcctccaggagaagaagtcctcaccagtgaacggagacctctctgaactaagaataccatggccacgtcagccccactacggagcctggaagaggaggtgacctgctccatctgtcttgattacctgcgggaccctgtgaccattgactgtggccacgtcttctgccgcagctgcaccacagacgtccgccccatctcagggagccgccccgtctgcccactctgcaagaagccttttaagaaggagaacatccgacccgtgtggcaactggccagcctggtggagaacattgagcggctgaaggtggacaagggcaggcagccgggagaggtgacccgggagcagcaggatgcaaagttgtgcgagcgacaccgagagaagctgcactactactgtgaggacgacgggaagctgctgtgcgtgatgtgccgggagtcccgggagcacaggccccacacggccgtcctcatggagaaggccgcccagccccacagggaaaaaatcctgaaccacctgagtaccctaaggagagacagagacaaaattcagggcttccaggcaaagggagaagctgatatcctggccgcgctgaagaagctccaggaccagaggcagtacattgtggctgagtttgagcagggtcatcagttcctgagggagcgggaggaacacctgctggaacagctggcgaagctggagcaggagctcacggagggcagggagaagttcaagagccggggcgtcggggagcttgcccggctggccctggtcatctccgaactggagggcaaggcgcagcagccagctgcagagctcatgcaggacacgagagacttcctaaacaggtatccacggaagaagttctgggttgggaaacccattgctcgagtggttaaaaaaaagaccggagaattctcagataaactcctctctctgcaacgaggcctgagggaattccaggggaagctgctgagagacttggaatataagacagtgagcgtcaccctggacccacagtcggccagtgggtacctgcagctgtcagaggactggaagtgcgtgacctacaccagcctgtacaagagtgcctacctgcacccccagcagtttgactgtgagcctggggtgctgggcagcaagggcttcacctggggcaaggtctactgggaagtggaagtggagagggagggctggtctgaggatgaagaagagggggatgaggaggaagagggagaagaggaggaggaggaagaggaggccggctatggggatggatatgacgactgggaaacggacgaagatgaggaatcgttgggcgatgaagaggaagaagaggaggaggaagaggaggaagttctggaaagctgcatggtgggggtggctagagactctgtgaagaggaagggagacctctccctgcggccagaggatggcgtgtgggcgctgcgcctctcctcctccggcatctgggccaacaccagccccgaggctgagcttttcccagcactgcggccccggagagtgggcatcgccctggattatgaagggggcaccgtgactttcaccaacgcagagtcacaggaactcatctacaccttcactgccaccttcacccggcgcctggtccccttcctgtggctcaagtggccaggaacacgcctcctgctaagaccctgagccctgacatctgcccccagccccaaccctcagatgcttcacttctttggaattccaggactctcaatggggggacgggatgcctggcctaagcacctggagcaggggaccccatatccactggtagccacctccccattgctgtggccccctgaaatctcactcagtgctgttgctccatctactgccctaatggggctcttttcccacctcctgctggtttcccgagggaacttctgaccctggagtccatgagggctcctttcctttttgaccacgaccttggccctagctctgcactctctggaataagggcccgatgcagcattttcttgcccagtgtggcaagacctcagaaaaaccagtcaattacgcctaagatcattttgctgtccttaaaccccccaggttccttcttgcacaaatccactctgctgcccaccttccctggcattttaaacagacctaccccaccccaactcagagttaagcatacatggcaatgctgaaaataaacaaaatccactgaggcttcccaggccatttaaagcctggagtaccagcgcatatcatctcatggggtccagagtggagtccaggcttctctgaaaccagggctgagcatatttccatagccaaggaggtgggactccctggagctatctgtggtcttagggaaggatccagacatacacggctttggggtacaagctgtgatcactgatcaataaattatctctagattggtccttgtgaggggagttttaagaatccagaacatcttgctcttgatcagcacatccaaaaacaccaagacaaacatccagtggagcagaacctctcctgcctcgggagttctgaccgggttccccagcagggtgttaagcctctgtctctggccctaccagcatccaggttccactttcctaggagagagtggagatgggaagacagggaaaggaaggcagcaggaggccacaagcccaccaggtcttcatgtcaagagagggagtaacatgtcttctcattgcccacggacccaacctctgtccaggtgcccctcatcatcacagtttaacacaagctcccctgctccagccaaattgatctcccagtcttgtccttacccattccaagtgctctgccagcccctgttcatccaagttttaagtcctccaccctgttataagagactgttccaacggctctgggcctcagtggtcacttgaccaccattgtctcagagctgcccactttgtgtgtgtcacatgctgcctgagtcacatgtacatcttatttctgcctctagttttgtaagctcctggagggcggataacatcttatactactcttgtattctcatggcacctagtgcagtgctgggcacagagtaggtgctcaataaagacttgttgaatgaa

SEQ ID NO: 22246 - DNA, 1124 bp, Homo sapiens
  misc_feature 1..1124: note = ENST00000446196
  source 1..1124: mol_type = unassigned DNA; mol_type = unassigned DNA
acggggcggggacgagctgtcgcgctggttgctcgtgcaggagcgggacccggaacagaccgccgtgagagaggaggggcgccggccgggattcgcggcccggagctcgggaccggagtcaggaatggagagaagggtaatggtgttacctcttattgtggaaacctgttgagatcacagagaatatactgacggcataaaagggcagaaccatagcagggtgcggttgcttcattccagcctcgcagtcacctctgtgccctgctggttgtcttcccagcgctgctgtagttgccttccatggatctataggagagcaagtcctccaggagaagaagtcctcaccagtgaacggagacctctctgaactaagaataccatggccacgtcagccccactacggagcctggaagaggaggtgacctgctccatctgtcttgattacctgcgggaccctgtgaccattgactgtggccacgtcttctgccgcagctgcaccacagacgtccgccccatctcagggagccgccccgtctgcccactctgcaagaagccttttaagaaggagaacatccgacccgtgtggcaactggccagcctggtggagaacattgagcggctgaaggtggacaagggcaggcagccgggagaggtgacccgggagcagcaggatgcaaagttgtgcgagcgacaccgagagaagctgcactactactgtgaggacgacgggaagctgctgtgcgtgatgtgccgggagtcccgggagcacaggccccacacggccgtcctcatggagaaggccgcccagccccacagggaaaaaatcctgaaccacctgagtaccctaaggagagacagagacaaaattcagggcttccaggcaaagggagaagctgatatcctggccgcgctgaagaagctccaggaccagaggcagtacattgtggctgagtttgagcagggtcatcagttcctgagggagcgggaggaacacctgctggaacagctggcgaagctggagcaggagctcacggagggcagggagaagttcaagagccggggcgtcggggagcttgcccggctggccctggtcatctccgaactggagggcaaggcgcagcagc

SEQ ID NO: 22247 - DNA, 682 bp, Homo sapiens
  misc_feature 1..682: note = ENST00000451189
  source 1..682: mol_type = unassigned DNA; mol_type = unassigned DNA
ggaaacctgttgagatcacagagaatatactgacggcataaaagggcagaaccatagcagggtgcgcctcgcagtcacctctgtgccctgctggttgtcttcccagcgctgctgtagttgccttccatggatctataggagagcaagtcctccaggagaagaagtcctcaccagtgaacggagacctctctgaactaagaataccatggccacgtcagccccactacggagcctggaagaggaggtgacctgctccatctgtcttgattacctgcgggaccctgtgaccattgactgtggccacgtcttctgccgcagctgcaccacagacgtccgccccatctcagggagccgccccgtctgcccactctgcaagaagccttttaagaaggagaacatccgacccgtgtggcaactggaaaaaatcctgaaccacctgagtaccctaaggagagacagagacaaaattcagggcttccaggcaaagggagaagctgatatcctggccgcgctgaagaagctccaggaccagaggcagtacattgtggctgagtttgagcagggtcatcagttcctgagggagcgggaggaacacctgctggaacagctggcgaagctggagcaggagctcacggagggcagggagaagttcaagagccggggcgtcggggagcttgcccgg

SEQ ID NO: 22248 - DNA, 603 bp, Homo sapiens
  misc_feature 1..603: note = ENST00000422881
  source 1..603: mol_type = unassigned DNA; mol_type = unassigned DNA
gtgcaggagcgggacccggaacagaccgccgtgagagaggaggggcgccggccgggattcgcggcccggagctcgggaccggagaagaagtcctcaccagtgaacggagacctctctgaactaagaataccatggccacgtcagccccactacggagcctggaagaggaggtgacctgctccatctgtcttgattacctgcgggaccctgtgaccattgactgtggccacgtcttctgccgcagctgcaccacagacgtccgccccatctcagggagccgccccgtctgcccactctgcaagaagccttttaagaaggagaacatccgacccgtgtggcaactggccagcctggtggagaacattgagcggctgaaggtggacaagggcaggcagccgggagaggtgacccgggagcagcaggatgcaaagttgtgcgagcgacaccgagagaagctgcactactactgtgaggacgacgggaagctgctgtgcgtgatgtgccgggagtcccgggagcacaggccccacacggccgtcctcatggagaaggccgcccagccccacagggaaaaaatcctgaaccacctgagtaccctaagga

SEQ ID NO: 22249 - DNA, 582 bp, Homo sapiens
  misc_feature 1..582: note = ENST00000435387
  source 1..582: mol_type = unassigned DNA; mol_type = unassigned DNA
aacagaccgccgtgagagaggaggggcgccggccgggattcgcggcccggagctcgggaccggagtcaggaatggagagaagggtaatggtgttacctcttattgtggaaacctgttgagatcacagagaatatactgacggcataaaagggcagaaccatagcagggtgcgaagtcctcaccagtgaacggagacctctctgaactaagaataccatggccacgtcagccccactacggagcctggaagaggaggtgacctgctccatctgtcttgattacctgcgggaccctgtgaccattgactgtggccacgtcttctgccgcagctgcaccacagacgtccgccccatctcagggagccgccccgtctgcccactctgcaagaagccttttaagaaggagaacatccgacccgtgtggcaactggccagcctggtggagaacattgagcggctgaaggtggacaagggcaggcagccgggagaggtgacccgggagcagcaggatgcaaagttgtgcgagcgacaccgagagaagctgcactactactgtgaggacgacgggaagctgctgtgcgtg

SEQ ID NO: 22250 - DNA, 502 bp, Homo sapiens
  misc_feature 1..502: note = ENST00000475230
  source 1..502: mol_type = unassigned DNA; mol_type = unassigned DNA
acagaccgccgtgagagaggaggggcgccggccgggattcgcggcccggagctcgggaccggagtcaggaatggagagaagggtaatggtgttacctcttattgtggaaacctgttgagatcacagagaatatactgacggcataaaagggcagaaccatagcagggtgcggttgcttcattccagcctcgcagtcacctctgtgccctgctggttgtcttcccagcgctgctgtagttgccttccatggatctataggagagcaagtcctccagctgcaccacagacgtccgccccatctcagggagccgccccgtctgcccactctgcaagaagccttttaagaaggagaacatccgacccgtgtggcaactggccagcctggtggagaacattgagcggctgaaggtggacaagggcaggcagccgggagaggtgacccgggagcagcaggatgcaaagttgtgcgagcgacaccgagagaagctgcactactactgtg

SEQ ID NO: 22251 - DNA, 3115 bp, Homo sapiens
  misc_feature 1..3115: note = ENST00000469107
  source 1..3115: mol_type = unassigned DNA; mol_type = unassigned DNA
catgcatatccagccctgcgcagtctggcctctgccgttctcaccaagccctttcctgttttaccttacctctcttcatccggccagtacttcttatccgtcaattctctgcgcaggtatctcccagagaggttgcccatgtcatctcccagccattgtggcttctgtcattgtgccgattttgtttgttttcttgttgttttatgcagtgaccccactggaatgtcagctccataaaaaagggaccacatttgttttgttcactgatatgtcccatctctgctacagtgttgggtgcagatgcattgaagtcttatttgattcatattgatacttgtgcttttttctttcccttctaggacacgagagacttcctaaacaggtaaaagagtctcctctccatggcgtacctcatcccccttgtttatgttcccccgcttctgaccaggtgcatttgaattcatggggagtggtatggtgccagaggtactcacatcccatggttcatcctgatgcctttctgaggagcaggacacatcattgagaactggagacttgctctcctccttatgagttctctgtgtagccccagctccttggcccactggccttatttgaggtgggacagagcagagaggttagaaacatggcttagtagacagagcgccctggatgtggagtctactgatgttctgaagccctggttcagctggtgtctttgggccactgtttttctgtcacttgtttggggataatcatacctttcctctccccttcataattgccatgaggattgagagataagtatgaaggaaagtaagaagagctgagtaacagcttgttatgtatgtcatcttcttaggtatccacggaagaagttctgggttgggaaacccattgctcgagtggttaaaaaaaagaccggagaattctcagataaactcctctctctgcaacgaggcctgagggaattccaggggaagctgctgagagacttggaatataagacagtgagcgtcaccctggacccacagtcggccagtgggtacctgcagctgtcagaggactggaagtgcgtgacctacaccagcctgtacaagagtgcctacctgcacccccagcagtttgactgtgagcctggggtgctgggcagcaagggcttcacctggggcaaggtctactgggaagtggaagtggagagggagggctggtctgaggatgaagaagagggggatgaggaggaagagggagaagaggaggaggaggaagaggaggccggctatggggatggatatgacgactgggaaacggacgaagatgaggaatcgttgggcgatgaagaggaagaagaggaggaggaagaggaggaagttctggaaagctgcatggtgggggtggctagagactctgtgaagaggaagggagacctctccctgcggccagaggatggcgtgtgggcgctgcgcctctcctcctccggcatctgggccaacaccagccccgaggctgagcttttcccagcactgcggccccggagagtgggcatcgccctggattatgaagggggcaccgtgactttcaccaacgcagagtcacaggaactcatctacaccttcactgccaccttcacccggcgcctggtccccttcctgtggctcaagtggccaggaacacgcctcctgctaagaccctgagccctgacatctgcccccagccccaaccctcagatgcttcacttctttggaattccaggactctcaatggggggacgggatgcctggcctaagcacctggagcaggggaccccatatccactggtagccacctccccattgctgtggccccctgaaatctcactcagtgctgttgctccatctactgccctaatggggctcttttcccacctcctgctggtttcccgagggaacttctgaccctggagtccatgagggctcctttcctttttgaccacgaccttggccccagctctgcactctctggaataagggcccgatgcagcattttcttgcccagtgtggcaagacctcagaaaaaccagtcaattacgcctaagatcattttgctgtccttaaaccccccaggttccttcttgcacaaatccactctgctgcccaccttctctggcattttaaacagacctaccccaccccaactcagagttaagcatacatggcaatgctgaaaataaacaaaatccactgaggcttcccaggccatttaaagcctggagtaccagcgcatatcatctcatggggtccagagtggagtccaggcttctctgaaaccagggctgagcatatttccatagccaaggaggtgggactccctggagctatctgtggtcttagggaaggatccagacatacacggctttggggtacaagctgtgatcactgatcaataaattatctctagattggtccttgtgaggggagttttaagaatccagaacatcttgctcttgatcagcacatccaaaaacaccaagacaaacatccagtggagcagaacctctcctgcctcgggagttctgaccgggttccccagcagggtgttaagcctctgtctctggccctaccagcatccaggttccactttcctaggagagagtggagatgggaagacagggaaaggaaggcagcaggaggccacaagcccaccaggtcttcatgtcaagagagggagtaacatgtcttctcattgcccacggacccaacctctgtccaggtgcccctcatcatcacagtttaacacaagctcccctgctccagccaaattgatctcccagtcttgtccttacccattccaagtgctctgccagcccctgttcatccaagttttaagtcctccaccctgttctaagagactgttccaacggctctgggcctcagtggtcacttgaccaccattgtctcagagctgcccactttgtgtgtgtcacatgctgcctgagtcacatgtacatcttatttctgcctctagttttgtaagctcctggagggcggataacatcttatactactcttgtattctcatggcacctagtgcagtgctgggcacagagtaggtgctcaataaagacttgttgaatgaa

SEQ ID NO: 22252 - DNA, 3250 bp, Homo sapiens
  misc_feature 1..3250: note = ENST00000450392
  source 1..3250: mol_type = unassigned DNA; mol_type = unassigned DNA
gagtcaggaatggagagaagggtaatggtgttacctcttattgtggaaacctgttgagatcacagagaatatactgacggcataaaagggcagaaccatagcagggtgcgcgctgctgtagttgccttccatggatctataggagagcaagtcctccaggagaagaagtcctcaccagtgaacggagacctctctgaactaaggataccatggccacgtcagccccactacggagcctggaagaggaggtgacctgctccatctgtcttgattacctgcgggaccctgtgaccattgactgtggccacgtcttctgccgcagctgcaccacagacgtccgccccatctcagggagccgccccgtctgcccactctgcaagaagccttttaagaaggagaacatccgacccgtgtggcaactggccagcctggtggagaacattgagcggctgaaggtggacaagggcaggcagccgggagaggtgacccgggagcagcaggatgcaaagttgtgcgagcgacaccgagagaagctgcactactactgtgaggacgacgggaagctgctgtgcgtgatgtgccgggagtcccgggagcacaggccccacacggccgtcctcatggagaaggccgcccagccccacagggaaaaaatcctgaaccacctgagtaccctaaggagagacagagacaaaattcagggcttccaggcaaagggagaagctgatatcctggccgcgctgaagaagctccaggaccagaggcagtacattgtggctgagtttgagcagggtcatcagttcctgagggagcgggaggaacacctgctggaacagctggcgaagctggagcaggagctcacggagggcagggagaagttcaagagccggggcgtcggggagcttgcccggctggccctggtcatctccgaactggagggcaaggcgcagcagccagctgcagagctcatgcaggacacgagagacttcctaaacaggtatccacggaagaagttctgggttgggaaacccattgctcgagtggttaaaaaaaagaccggagaattctcagataaactcctctctctgcaacgaggcctgagggaattccaggggaagctgctgagagacttggaatataagacagtgagcgtcaccctggacccacagtcggccagtgggtacctgcagctgtcagaggactggaagtgcgtgacctacaccagcctgtacaagagtgcctacctgcacccccagcagtttgactgtgagcctggggtgctgggcagcaagggcttcacctggggcaaggtctactgggaagtggaagtggagagggagggctggtctgaggatgaagaagagggggatgaggaggaagagggagaagaggaggaggaggaagaggaggccggctatggggatggatatgacgactgggaaacggacgaagatgaggaatcgttgggcgatgaagaggaagaagaggaggaggaagaggaggaagttctggaaagctgcatggtgggggtggctagagactctgtgaagaggaagggagacctctccctgcggccagaggatggcgtgtgggcgctgcgcctctcctcctccggcatctgggccaacaccagccccgaggctgagcttttcccagcactgcggccccggagagtgggcatcgccctggattatgaagggggcaccgtgactttcaccaacgcagagtcacaggaactcatctacaccttcactgccaccttcacccggcgcctggtccccttcctgtggctcaagtggccaggaacacgcctcctgctaagaccctgagccctgacatctgcccccagccccaaccctcagatgcttcacttctttggaattccaggactctcaatggggggacgggatgcctggcctaagcacctggagcaggggaccccatatccactggtagccacctccccattgctgtggccccctgaaatctcactcagtgctgttgctccatctactgccctaatggggctcttttcccacctcctgctggtttcccgagggaacttctgaccctggagtccatgagggctcctttcctttttgaccacgaccttggccccagctctgcactctctggaataagggcccgatgcagcattttcttgcccagtgtggcaagacctcagaaaaaccagtcaattacgcctaagatcattttgctgtccttaaaccccccaggttccttcttgcacaaatccactctgctgcccaccttctctggcattttaaacagacctaccccaccccaactcagagttaagcatacatggcaatgctgaaaataaacaaaatccactgaggcttcccaggccatttaaagcctggagtaccagcgcatatcatctcatggggtccagagtggagtccaggcttctctgaaaccagggctgagcatatttccatagccaaggaggtgggactccctggagctatctgtggtcttagggaaggatccagacatacacggctttggggtacaagctgtgatcactgatcaataaattatctctagattggtccttgtgaggggagttttaagaatccagaacatcttgctcttgatcagcacatccaaaaacaccaagacaaacatccagtggagcagaacctctcctgcctcgggagttctgaccgggttccccagcagggtgttaagcctctgtctctggccctaccagcatccaggttccactttcctaggagagagtggagatgggaagacagggaaaggaaggcagcaggaggccacaagcccaccaggtcttcatgtcaagagagggagtaacatgtcttctcattgcccacggacccaacctctgtccaggtgcccctcatcatcacagtttaacacaagctcccctgctccagccaaattgatctcccagtcttgtccttacccattccaagtgctctgccagcccctgttcatccaagttttaagtcctccaccctgttctaagagactgttccaacggctctgggcctcagtggtcacttgaccaccattgtctcagagctgcccactttgtgtgtgtcacatgctgcctgagtcacatgtacatcttatttctgcctctagttttgtaagctcctggagggcggataacatcttatactactcttgtattctcatggcacctagtgcagtgctgggcacagagtaggtgctcaataaagacttgttgaatgaa

SEQ ID NO: 22253 - DNA, 3478 bp, Homo sapiens
  misc_feature 1..3478: note = ENST00000415923
  source 1..3478: mol_type = unassigned DNA; mol_type = unassigned DNA
aacagaccgccgtgagagaggaggggcgccggccgggattcgcggcccggagctcgggaccggagtcaggaatggagagaagggtaatggtgttacctcttattgtggaaacctgttgagatcacagagaatatactgacggcataaaagggcagaaccatagcagggtgcggttgcttcattccagcctcgcagtcacctctgtgccctgctggttgtcttcccagcgctgctgtagttgccttccatggatctataggagagcaagtcctccaggagctggtggtgtctgtcgattgactgagtgctggagctggcagccctgtgcaggctgccacctttgcccctttactgtgcttgctcctgactctacgtcgcgtctccaaggagaagaagtcctcaccagtgaacggagacctctctgaactaaggataccatggccacgtcagccccactacggagcctggaagaggaggtgacctgctccatctgtcttgattacctgcgggaccctgtgaccattgactgtggccacgtcttctgccgcagctgcaccacagacgtccgccccatctcagggagccgccccgtctgcccactctgcaagaagccttttaagaaggagaacatccgacccgtgtggcaactggccagcctggtggagaacattgagcggctgaaggtggacaagggcaggcagccgggagaggtgacccgggagcagcaggatgcaaagttgtgcgagcgacaccgagagaagctgcactactactgtgaggacgacgggaagctgctgtgcgtgatgtgccgggagtcccgggagcacaggccccacacggccgtcctcatggagaaggccgcccagccccacagggaaaaaatcctgaaccacctgagtaccctaaggagagacagagacaaaattcagggcttccaggcaaagggagaagctgatatcctggccgcgctgaagaagctccaggaccagaggcagtacattgtggctgagtttgagcagggtcatcagttcctgagggagcgggaggaacacctgctggaacagctggcgaagctggagcaggagctcacggagggcagggagaagttcaagagccggggcgtcggggagcttgcccggctggccctggtcatctccgaactggagggcaaggcgcagcagccagctgcagagctcatgcaggacacgagagacttcctaaacaggtatccacggaagaagttctgggttgggaaacccattgctcgagtggttaaaaaaaagaccggagaattctcagataaactcctctctctgcaacgaggcctgagggaattccaggggaagctgctgagagacttggaatataagacagtgagcgtcaccctggacccacagtcggccagtgggtacctgcagctgtcagaggactggaagtgcgtgacctacaccagcctgtacaagagtgcctacctgcacccccagcagtttgactgtgagcctggggtgctgggcagcaagggcttcacctggggcaaggtctactgggaagtggaagtggagagggagggctggtctgaggatgaagaagagggggatgaggaggaagagggagaagaggaggaggaggaagaggaggccggctatggggatggatatgacgactgggaaacggacgaagatgaggaatcgttgggcgatgaagaggaagaagaggaggaggaagaggaggaagttctggaaagctgcatggtgggggtggctagagactctgtgaagaggaagggagacctctccctgcggccagaggatggcgtgtgggcgctgcgcctctcctcctccggcatctgggccaacaccagccccgaggctgagcttttcccagcactgcggccccggagagtgggcatcgccctggattatgaagggggcaccgtgactttcaccaacgcagagtcacaggaactcatctacaccttcactgccaccttcacccggcgcctggtccccttcctgtggctcaagtggccaggaacacgcctcctgctaagaccctgagccctgacatctgcccccagccccaaccctcagatgcttcacttctttggaattccaggactctcaatggggggacgggatgcctggcctaagcacctggagcaggggaccccatatccactggtagccacctccccattgctgtggccccctgaaatctcactcagtgctgttgctccatctactgccctaatggggctcttttcccacctcctgctggtttcccgagggaacttctgaccctggagtccatgagggctcctttcctttttgaccacgaccttggccccagctctgcactctctggaataagggcccgatgcagcattttcttgcccagtgtggcaagacctcagaaaaaccagtcaattacgcctaagatcattttgctgtccttaaaccccccaggttccttcttgcacaaatccactctgctgcccaccttctctggcattttaaacagacctaccccaccccaactcagagttaagcatacatggcaatgctgaaaataaacaaaatccactgaggcttcccaggccatttaaagcctggagtaccagcgcatatcatctcatggggtccagagtggagtccaggcttctctgaaaccagggctgagcatatttccatagccaaggaggtgggactccctggagctatctgtggtcttagggaaggatccagacatacacggctttggggtacaagctgtgatcactgatcaataaattatctctagattggtccttgtgaggggagttttaagaatccagaacatcttgctcttgatcagcacatccaaaaacaccaagacaaacatccagtggagcagaacctctcctgcctcgggagttctgaccgggttccccagcagggtgttaagcctctgtctctggccctaccagcatccaggttccactttcctaggagagagtggagatgggaagacagggaaaggaaggcagcaggaggccacaagcccaccaggtcttcatgtcaagagagggagtaacatgtcttctcattgcccacggacccaacctctgtccaggtgcccctcatcatcacagtttaacacaagctcccctgctccagccaaattgatctcccagtcttgtccttacccattccaagtgctctgccagcccctgttcatccaagttttaagtcctccaccctgttctaagagactgttccaacggctctgggcctcagtggtcacttgaccaccattgtctcagagctgcccactttgtgtgtgtcacatgctgcctgagtcacatgtacatcttatttctgcctctagttttgtaagctcctggagggcggataacatcttatactactcttgtattctcatggcacctagtgcagtgctgggcacagagtaggtgctcaataaagacttgttgaatgaa

SEQ ID NO: 22254 - DNA, 3318 bp, Homo sapiens
  misc_feature 1..3318: note = ENST00000428486
  source 1..3318: mol_type = unassigned DNA; mol_type = unassigned DNA
gggagattacggggcggggacgagctgtcgcgctggttgctcgtgcaggagcgggacccggaacagaccgccgtgagagaggaggggcgccggccgggattcgcggcccggagctcgggaccggttgcttcattccagcctcgcagtcacctctgtgccctgctggttgtcttcccagcgctgctgtagttgccttccatggatctataggagagcaagtcctccaggagaagaagtcctcaccagtgaacggagacctctctgaactaaggataccatggccacgtcagccccactacggagcctggaagaggaggtgacctgctccatctgtcttgattacctgcgggaccctgtgaccattgactgtggccacgtcttctgccgcagctgcaccacagacgtccgccccatctcagggagccgccccgtctgcccactctgcaagaagccttttaagaaggagaacatccgacccgtgtggcaactggccagcctggtggagaacattgagcggctgaaggtggacaagggcaggcagccgggagaggtgacccgggagcagcaggatgcaaagttgtgcgagcgacaccgagagaagctgcactactactgtgaggacgacgggaagctgctgtgcgtgatgtgccgggagtcccgggagcacaggccccacacggccgtcctcatggagaaggccgcccagccccacagggaaaaaatcctgaaccacctgagtaccctaaggagagacagagacaaaattcagggcttccaggcaaagggagaagctgatatcctggccgcgctgaagaagctccaggaccagaggcagtacattgtggctgagtttgagcagggtcatcagttcctgagggagcgggaggaacacctgctggaacagctggcgaagctggagcaggagctcacggagggcagggagaagttcaagagccggggcgtcggggagcttgcccggctggccctggtcatctccgaactggagggcaaggcgcagcagccagctgcagagctcatgcaggacacgagagacttcctaaacaggtatccacggaagaagttctgggttgggaaacccattgctcgagtggttaaaaaaaagaccggagaattctcagataaactcctctctctgcaacgaggcctgagggaattccaggggaagctgctgagagacttggaatataagacagtgagcgtcaccctggacccacagtcggccagtgggtacctgcagctgtcagaggactggaagtgcgtgacctacaccagcctgtacaagagtgcctacctgcacccccagcagtttgactgtgagcctggggtgctgggcagcaagggcttcacctggggcaaggtctactgggaagtggaagtggagagggagggctggtctgaggatgaagaagagggggatgaggaggaagagggagaagaggaggaggaggaagaggaggccggctatggggatggatatgacgactgggaaacggacgaagatgaggaatcgttgggcgatgaagaggaagaagaggaggaggaagaggaggaagttctggaaagctgcatggtgggggtggctagagactctgtgaagaggaagggagacctctccctgcggccagaggatggcgtgtgggcgctgcgcctctcctcctccggcatctgggccaacaccagccccgaggctgagcttttcccagcactgcggccccggagagtgggcatcgccctggattatgaagggggcaccgtgactttcaccaacgcagagtcacaggaactcatctacaccttcactgccaccttcacccggcgcctggtccccttcctgtggctcaagtggccaggaacacgcctcctgctaagaccctgagccctgacatctgcccccagccccaaccctcagatgcttcacttctttggaattccaggactctcaatggggggacgggatgcctggcctaagcacctggagcaggggaccccatatccactggtagccacctccccattgctgtggccccctgaaatctcactcagtgctgttgctccatctactgccctaatggggctcttttcccacctcctgctggtttcccgagggaacttctgaccctggagtccatgagggctcctttcctttttgaccacgaccttggccccagctctgcactctctggaataagggcccgatgcagcattttcttgcccagtgtggcaagacctcagaaaaaccagtcaattacgcctaagatcattttgctgtccttaaaccccccaggttccttcttgcacaaatccactctgctgcccaccttctctggcattttaaacagacctaccccaccccaactcagagttaagcatacatggcaatgctgaaaataaacaaaatccactgaggcttcccaggccatttaaagcctggagtaccagcgcatatcatctcatggggtccagagtggagtccaggcttctctgaaaccagggctgagcatatttccatagccaaggaggtgggactccctggagctatctgtggtcttagggaaggatccagacatacacggctttggggtacaagctgtgatcactgatcaataaattatctctagattggtccttgtgaggggagttttaagaatccagaacatcttgctcttgatcagcacatccaaaaacaccaagacaaacatccagtggagcagaacctctcctgcctcgggagttctgaccgggttccccagcagggtgttaagcctctgtctctggccctaccagcatccaggttccactttcctaggagagagtggagatgggaagacagggaaaggaaggcagcaggaggccacaagcccaccaggtcttcatgtcaagagagggagtaacatgtcttctcattgcccacggacccaacctctgtccaggtgcccctcatcatcacagtttaacacaagctcccctgctccagccaaattgatctcccagtcttgtccttacccattccaagtgctctgccagcccctgttcatccaagttttaagtcctccaccctgttctaagagactgttccaacggctctgggcctcagtggtcacttgaccaccattgtctcagagctgcccactttgtgtgtgtcacatgctgcctgagtcacatgtacatcttatttctgcctctagttttgtaagctcctggagggcggataacatcttatactactcttgtattctcatggcacctagtgcagtgctgggcacagagtaggtgctcaataaagacttgttgaatgaa

SEQ ID NO: 22255 - DNA, 1124 bp, Homo sapiens
  misc_feature 1..1124: note = ENST00000446540
  source 1..1124: mol_type = unassigned DNA; mol_type = unassigned DNA
acggggcggggacgagctgtcgcgctggttgctcgtgcaggagcgggacccggaacagaccgccgtgagagaggaggggcgccggccgggattcgcggcccggagctcgggaccggagtcaggaatggagagaagggtaatggtgttacctcttattgtggaaacctgttgagatcacagagaatatactgacggcataaaagggcagaaccatagcagggtgcggttgcttcattccagcctcgcagtcacctctgtgccctgctggttgtcttcccagcgctgctgtagttgccttccatggatctataggagagcaagtcctccaggagaagaagtcctcaccagtgaacggagacctctctgaactaaggataccatggccacgtcagccccactacggagcctggaagaggaggtgacctgctccatctgtcttgattacctgcgggaccctgtgaccattgactgtggccacgtcttctgccgcagctgcaccacagacgtccgccccatctcagggagccgccccgtctgcccactctgcaagaagccttttaagaaggagaacatccgacccgtgtggcaactggccagcctggtggagaacattgagcggctgaaggtggacaagggcaggcagccgggagaggtgacccgggagcagcaggatgcaaagttgtgcgagcgacaccgagagaagctgcactactactgtgaggacgacgggaagctgctgtgcgtgatgtgccgggagtcccgggagcacaggccccacacggccgtcctcatggagaaggccgcccagccccacagggaaaaaatcctgaaccacctgagtaccctaaggagagacagagacaaaattcagggcttccaggcaaagggagaagctgatatcctggccgcgctgaagaagctccaggaccagaggcagtacattgtggctgagtttgagcagggtcatcagttcctgagggagcgggaggaacacctgctggaacagctggcgaagctggagcaggagctcacggagggcagggagaagttcaagagccggggcgtcggggagcttgcccggctggccctggtcatctccgaactggagggcaaggcgcagcagc

SEQ ID NO: 22256 - DNA, 682 bp, Homo sapiens
  misc_feature 1..682: note = ENST00000450103
  source 1..682: mol_type = unassigned DNA; mol_type = unassigned DNA
ggaaacctgttgagatcacagagaatatactgacggcataaaagggcagaaccatagcagggtgcgcctcgcagtcacctctgtgccctgctggttgtcttcccagcgctgctgtagttgccttccatggatctataggagagcaagtcctccaggagaagaagtcctcaccagtgaacggagacctctctgaactaaggataccatggccacgtcagccccactacggagcctggaagaggaggtgacctgctccatctgtcttgattacctgcgggaccctgtgaccattgactgtggccacgtcttctgccgcagctgcaccacagacgtccgccccatctcagggagccgccccgtctgcccactctgcaagaagccttttaagaaggagaacatccgacccgtgtggcaactggaaaaaatcctgaaccacctgagtaccctaaggagagacagagacaaaattcagggcttccaggcaaagggagaagctgatatcctggccgcgctgaagaagctccaggaccagaggcagtacattgtggctgagtttgagcagggtcatcagttcctgagggagcgggaggaacacctgctggaacagctggcgaagctggagcaggagctcacggagggcagggagaagttcaagagccggggcgtcggggagcttgcccgg

SEQ ID NO: 22257 - DNA, 603 bp, Homo sapiens
  misc_feature 1..603: note = ENST00000433361
  source 1..603: mol_type = unassigned DNA; mol_type = unassigned DNA
gtgcaggagcgggacccggaacagaccgccgtgagagaggaggggcgccggccgggattcgcggcccggagctcgggaccggagaagaagtcctcaccagtgaacggagacctctctgaactaaggataccatggccacgtcagccccactacggagcctggaagaggaggtgacctgctccatctgtcttgattacctgcgggaccctgtgaccattgactgtggccacgtcttctgccgcagctgcaccacagacgtccgccccatctcagggagccgccccgtctgcccactctgcaagaagccttttaagaaggagaacatccgacccgtgtggcaactggccagcctggtggagaacattgagcggctgaaggtggacaagggcaggcagccgggagaggtgacccgggagcagcaggatgcaaagttgtgcgagcgacaccgagagaagctgcactactactgtgaggacgacgggaagctgctgtgcgtgatgtgccgggagtcccgggagcacaggccccacacggccgtcctcatggagaaggccgcccagccccacagggaaaaaatcctgaaccacctgagtaccctaagga

SEQ ID NO: 22258 - DNA, 582 bp, Homo sapiens
  misc_feature 1..582: note = ENST00000431641
  source 1..582: mol_type = unassigned DNA; mol_type = unassigned DNA
aacagaccgccgtgagagaggaggggcgccggccgggattcgcggcccggagctcgggaccggagtcaggaatggagagaagggtaatggtgttacctcttattgtggaaacctgttgagatcacagagaatatactgacggcataaaagggcagaaccatagcagggtgcgaagtcctcaccagtgaacggagacctctctgaactaaggataccatggccacgtcagccccactacggagcctggaagaggaggtgacctgctccatctgtcttgattacctgcgggaccctgtgaccattgactgtggccacgtcttctgccgcagctgcaccacagacgtccgccccatctcagggagccgccccgtctgcccactctgcaagaagccttttaagaaggagaacatccgacccgtgtggcaactggccagcctggtggagaacattgagcggctgaaggtggacaagggcaggcagccgggagaggtgacccgggagcagcaggatgcaaagttgtgcgagcgacaccgagagaagctgcactactactgtgaggacgacgggaagctgctgtgcgtg

SEQ ID NO: 22259 - DNA, 502 bp, Homo sapiens; identical to SEQ ID NO: 22250
  misc_feature 1..502: note = ENST00000477569
  source 1..502: mol_type = unassigned DNA; mol_type = unassigned DNA

SEQ ID NO: 22260 - DNA, 3227 bp, Homo sapiens
  misc_feature 1..3227: note = ENST00000425831
  source 1..3227: mol_type = unassigned DNA; mol_type = unassigned DNA
ggccgggattcgcggcccggagctcgggaccggttgcttcattccagcctcgcagtcacctctgtgccctgctggttgtcttcccagcgctgctgtagttgccttccatggatctataggagagcaagtcctccaggagaagaagtcctcaccagtgaacggagacctctctgaactaaggataccatggccacgtcagccccactacggagcctggaagaggaggtgacctgctccatctgtcttgattacctgcgggaccctgtgaccattgactgtggccacgtcttctgccgcagctgcaccacagacgtccgccccatctcagggagccgccccgtctgcccactctgcaagaagccttttaagaaggagaacatccgacccgtgtggcaactggccagcctggtggagaacattgagcggctgaaggtggacaagggcaggcagccgggagaggtgacccgggagcagcaggatgcaaagttgtgcgagcgacaccgagagaagctgcactactactgtgaggacgacgggaagctgctgtgcgtgatgtgccgggagtcccgggagcacaggccccacacggccgtcctcatggagaaggccgcccagccccacagggaaaaaatcctgaaccacctgagtaccctaaggagggacagagacaaaattcagggcttccaggcaaagggagaagctgatatcctggccgcgctgaagaagctccaggaccagaggcagtacattgtggctgagtttgagcagggtcatcagttcctgagggagcgggaggaacacctgctggaacagctggcgaagctggagcaggagctcacggagggcagggagaagttcaagagccggggcgtcggggagcttgcccggctggccctggtcatctccgaactggagggcaaggcgcagcagccagctgcagagctcatgcaggacacgagagacttcctaaacaggtatccacggaagaagttctgggttgggaaacccattgctcgagtggttaaaaaaaagaccggagaattctcagataaactcctctctctgcaacgaggcctgagggaattccaggggaagctgctgagagacttggaatataagacagtgagcgtcaccctggacccacagtcggccagtgggtacctgcagctgtcagaggactggaagtgcgtgacctacaccagcctgtacaagagtgcctacctgcacccccagcagtttgactgtgagcctggggtgctgggcagcaagggcttcacctggggcaaggtctactgggaagtggaagtggagagggagggctggtctgaggatgaagaagagggggatgaggaggaagagggagaagaggaggaggaggaagaggaggccggctatggggatggatatgacgactgggaaacggacgaagatgaggaatcgttgggcgatgaagaggaagaagaggaggaggaagaggaggaagttctggaaagctgcatggtgggggtggctagagactctgtgaagaggaagggagacctctccctgcggccagaggatggcgtgtgggcgctgcgcctctcctcctccggcatctgggccaacaccagccccgaggctgagcttttcccagcactgcggccccggagagtgggcatcgccctggattatgaagggggcaccgtgactttcaccaacgcagagtcacaggaactcatctacaccttcactgccaccttcacccggcgcctggtccccttcctgtggctcaagtggccaggaacacgcctcctgctaagaccctgagccctgacatctgcccccagccccaaccctcagatgcttcacttctttggaattccaggactctcaatggggggacgggatgcctggcctaagcacctggagcaggggaccccatatccactggtagccacctccccattgctgtggccccctgaaatctcactcagtgctgttgctccatctactgccctaatggggctcttttcccacctcctgctggtttcccgagggaacttctgaccctggagtccatgagggctcctttcctttttgaccacgaccttggccccagctctgcactctctggaataagggcccgatgcagcattttcttgcccagtgtggcaagacctcagaaaaaccagtcaattacgcctaagatcattttgctgtccttaaaccccccaggttccttcttgcacaaatccactctgctgcccaccttccctggcattttaaacagacctaccccaccccaactcagagttaagcatacatggcaatgctgaaaataaacaaaatccactgaggcttcccaggccatttaaagcctggagtaccagcgcatatcatctcatggggtccagagtggagtccaggcttctctgaaaccagggctgagcatatttccatagccaaggaggtgggactccctggagctatctgtggtcttagggaaggatccagacatacacggctttggggtacaagctgtgatcactgatcaataaattatctctagattggtccttgtgaggggagttttaagaatccagaacatcttgctcttgatcagcacatccaaaaacaccaagacaaacatccagtggagcagaacctctcctgcctcgggagttctgaccaggttccccagcagggtgttaagcctctgtctctggccctaccagcatccaggttccactttcctaggagagagtggagatgggaagacagggaaaggaaggcagcaggaggccacaagcccaccaggtcttcatgtcaagagagggagtaacatgtcttctcattgcccacggacccaacctctgtccaggtgcccctcatcatcacagtttaacacaagctcccctgctccagccaaattgatctcccagtcttgtccttacccattccaagtgctctgccagcccctgttcatccaagttttaagtcctccaccctgttctaagagactgttccaacggctctgggcctcagtggtcacttgaccaccattgtctcagagctgcccactttgtgtgtgtcacatgctgcctgagtcacacgtacatcttatttctgcctctagttttgtaagctcctggagggcggataacatcttatactactcttgtattctcatggcacctagtgcagtgctgggcacagagtaggtgctcaataaagacttgttgaatgaa

SEQ ID NO: 22261 - DNA, 3448 bp, Homo sapiens
  misc_feature 1..3448: note = ENST00000432326
  source 1..3448: mol_type = unassigned DNA; mol_type = unassigned DNA
ggccgggattcgcggcccggagctcgggaccggagtcaggaatggagagaagggtaatggttttacctcttattgtggaaacctgttgagatcacagagaatatactgacggcataaaagggcagaaccatagcagggtgcggttgcttcattccagcctcgcagtcacctctgtgccctgctggttgtcttcccagcgctgctgtagttgccttccatggatctataggagagcaagtcctccaggagctggtggtgtctgtcgattgactgagtgctggagctggcagccctgtgcaggctgccacctttgcccctttactgtgcttgctcctgactctatgtcgcgtctccaaggagaagaagtcctcaccagtgaacggagacctctctgaactaaggataccatggccacgtcagccccactacggagcctggaagaggaggtgacctgctccatctgtcttgattacctgcgggaccctgtgaccattgactgtggccacgtcttctgccgcagctgcaccacagacgtccgccccatctcagggagccgccccgtctgcccactctgcaagaagccttttaagaaggagaacatccgacccgtgtggcaactggccagcctggtggagaacattgagcggctgaaggtggacaagggcaggcagccgggagaggtgacccgggagcagcaggatgcaaagttgtgcgagcgacaccgagagaagctgcactactactgtgaggacgacgggaagctgctgtgcgtgatgtgccgggagtcccgggagcacaggccccacacggccgtcctcatggagaaggccgcccagccccacagggaaaaaatcctgaaccacctgagtaccctaaggagggacagagacaaaattcagggcttccaggcaaagggagaagctgatatcctggccgcgctgaagaagctccaggaccagaggcagtacattgtggctgagtttgagcagggtcatcagttcctgagggagcgggaggaacacctgctggaacagctggcgaagctggagcaggagctcacggagggcagggagaagttcaagagccggggcgtcggggagcttgcccggctggccctggtcatctccgaactggagggcaaggcgcagcagccagctgcagagctcatgcaggacacgagagacttcctaaacaggtatccacggaagaagttctgggttgggaaacccattgctcgagtggttaaaaaaaagaccggagaattctcagataaactcctctctctgcaacgaggcctgagggaattccaggggaagctgctgagagacttggaatataagacagtgagcgtcaccctggacccacagtcggccagtgggtacctgcagctgtcagaggactggaagtgcgtgacctacaccagcctgtacaagagtgcctacctgcacccccagcagtttgactgtgagcctggggtgctgggcagcaagggcttcacctggggcaaggtctactgggaagtggaagtggagagggagggctggtctgaggatgaagaagagggggatgaggaggaagagggagaagaggaggaggaggaagaggaggccggctatggggatggatatgacgactgggaaacggacgaagatgaggaatcgttgggcgatgaagaggaagaagaggaggaggaagaggaggaagttctggaaagctgcatggtgggggtggctagagactctgtgaagaggaagggagacctctccctgcggccagaggatggcgtgtgggcgctgcgcctctcctcctccggcatctgggccaacaccagccccgaggctgagcttttcccagcactgcggccccggagagtgggcatcgccctggattatgaagggggcaccgtgactttcaccaacgcagagtcacaggaactcatctacaccttcactgccaccttcacccggcgcctggtccccttcctgtggctcaagtggccaggaacacgcctcctgctaagaccctgagccctgacatctgcccccagccccaaccctcagatgcttcacttctttggaattccaggactctcaatggggggacgggatgcctggcctaagcacctggagcaggggaccccatatccactggtagccacctccccattgctgtggccccctgaaatctcactcagtgctgttgctccatctactgccctaatggggctcttttcccacctcctgctggtttcccgagggaacttctgaccctggagtccatgagggctcctttcctttttgaccacgaccttggccccagctctgcactctctggaataagggcccgatgcagcattttcttgcccagtgtggcaagacctcagaaaaaccagtcaattacgcctaagatcattttgctgtccttaaaccccccaggttccttcttgcacaaatccactctgctgcccaccttccctggcattttaaacagacctaccccaccccaactcagagttaagcatacatggcaatgctgaaaataaacaaaatccactgaggcttcccaggccatttaaagcctggagtaccagcgcatatcatctcatggggtccagagtggagtccaggcttctctgaaaccagggctgagcatatttccatagccaaggaggtgggactccctggagctatctgtggtcttagggaaggatccagacatacacggctttggggtacaagctgtgatcactgatcaataaattatctctagattggtccttgtgaggggagttttaagaatccagaacatcttgctcttgatcagcacatccaaaaacaccaagacaaacatccagtggagcagaacctctcctgcctcgggagttctgaccaggttccccagcagggtgttaagcctctgtctctggccctaccagcatccaggttccactttcctaggagagagtggagatgggaagacagggaaaggaaggcagcaggaggccacaagcccaccaggtcttcatgtcaagagagggagtaacatgtcttctcattgcccacggacccaacctctgtccaggtgcccctcatcatcacagtttaacacaagctcccctgctccagccaaattgatctcccagtcttgtccttacccattccaagtgctctgccagcccctgttcatccaagttttaagtcctccaccctgttctaagagactgttccaacggctctgggcctcagtggtcacttgaccaccattgtctcagagctgcccactttgtgtgtgtcacatgctgcctgagtcacacgtacatcttatttctgcctctagttttgtaagctcctggagggcggataacatcttatactactcttgtattctcatggcacctagtgcagtgctgggcacagagtaggtgctcaataaagacttgttgaatgaa

SEQ ID NO: 22262 - DNA, 3250 bp, Homo sapiens
  misc_feature 1..3250: note = ENST00000438384
  source 1..3250: mol_type = unassigned DNA; mol_type = unassigned DNA
gagtcaggaatggagagaagggtaatggttttacctcttattgtggaaacctgttgagatcacagagaatatactgacggcataaaagggcagaaccatagcagggtgcgcgctgctgtagttgccttccatggatctataggagagcaagtcctccaggagaagaagtcctcaccagtgaacggagacctctctgaactaaggataccatggccacgtcagccccactacggagcctggaagaggaggtgacctgctccatctgtcttgattacctgcgggaccctgtgaccattgactgtggccacgtcttctgccgcagctgcaccacagacgtccgccccatctcagggagccgccccgtctgcccactctgcaagaagccttttaagaaggagaacatccgacccgtgtggcaactggccagcctggtggagaacattgagcggctgaaggtggacaagggcaggcagccgggagaggtgacccgggagcagcaggatgcaaagttgtgcgagcgacaccgagagaagctgcactactactgtgaggacgacgggaagctgctgtgcgtgatgtgccgggagtcccgggagcacaggccccacacggccgtcctcatggagaaggccgcccagccccacagggaaaaaatcctgaaccacctgagtaccctaaggagggacagagacaaaattcagggcttccaggcaaagggagaagctgatatcctggccgcgctgaagaagctccaggaccagaggcagtacattgtggctgagtttgagcagggtcatcagttcctgagggagcgggaggaacacctgctggaacagctggcgaagctggagcaggagctcacggagggcagggagaagttcaagagccggggcgtcggggagcttgcccggctggccctggtcatctccgaactggagggcaaggcgcagcagccagctgcagagctcatgcaggacacgagagacttcctaaacaggtatccacggaagaagttctgggttgggaaacccattgctcgagtggttaaaaaaaagaccggagaattctcagataaactcctctctctgcaacgaggcctgagggaattccaggggaagctgctgagagacttggaatataagacagtgagcgtcaccctggacccacagtcggccagtgggtacctgcagctgtcagaggactggaagtgcgtgacctacaccagcctgtacaagagtgcctacctgcacccccagcagtttgactgtgagcctggggtgctgggcagcaagggcttcacctggggcaaggtctactgggaagtggaagtggagagggagggctggtctgaggatgaagaagagggggatgaggaggaagagggagaagaggaggaggaggaagaggaggccggctatggggatggatatgacgactgggaaacggacgaagatgaggaatcgttgggcgatgaagaggaagaagaggaggaggaagaggaggaagttctggaaagctgcatggtgggggtggctagagactctgtgaagaggaagggagacctctccctgcggccagaggatggcgtgtgggcgctgcgcctctcctcctccggcatctgggccaacaccagccccgaggctgagcttttcccagcactgcggccccggagagtgggcatcgccctggattatgaagggggcaccgtgactttcaccaacgcagagtcacaggaactcatctacaccttcactgccaccttcacccggcgcctggtccccttcctgtggctcaagtggccaggaacacgcctcctgctaagaccctgagccctgacatctgcccccagccccaaccctcagatgcttcacttctttggaattccaggactctcaatggggggacgggatgcctggcctaagcacctggagcaggggaccccatatccactggtagccacctccccattgctgtggccccctgaaatctcactcagtgctgttgctccatctactgccctaatggggctcttttcccacctcctgctggtttcccgagggaacttctgaccctggagtccatgagggctcctttcctttttgaccacgaccttggccccagctctgcactctctggaataagggcccgatgcagcattttcttgcccagtgtggcaagacctcagaaaaaccagtcaattacgcctaagatcattttgctgtccttaaaccccccaggttccttcttgcacaaatccactctgctgcccaccttccctggcattttaaacagacctaccccaccccaactcagagttaagcatacatggcaatgctgaaaataaacaaaatccactgaggcttcccaggccatttaaagcctggagtaccagcgcatatcatctcatggggtccagagtggagtccaggcttctctgaaaccagggctgagcatatttccatagccaaggaggtgggactccctggagctatctgtggtcttagggaaggatccagacatacacggctttggggtacaagctgtgatcactgatcaataaattatctctagattggtccttgtgaggggagttttaagaatccagaacatcttgctcttgatcagcacatccaaaaacaccaagacaaacatccagtggagcagaacctctcctgcctcgggagttctgaccaggttccccagcagggtgttaagcctctgtctctggccctaccagcatccaggttccactttcctaggagagagtggagatgggaagacagggaaaggaaggcagcaggaggccacaagcccaccaggtcttcatgtcaagagagggagtaacatgtcttctcattgcccacggacccaacctctgtccaggtgcccctcatcatcacagtttaacacaagctcccctgctccagccaaattgatctcccagtcttgtccttacccattccaagtgctctgccagcccctgttcatccaagttttaagtcctccaccctgttctaagagactgttccaacggctctgggcctcagtggtcacttgaccaccattgtctcagagctgcccactttgtgtgtgtcacatgctgcctgagtcacacgtacatcttatttctgcctctagttttgtaagctcctggagggcggataacatcttatactactcttgtattctcatggcacctagtgcagtgctgggcacagagtaggtgctcaataaagacttgttgaatgaa

SEQ ID NO: 22263 - DNA, 3115 bp, Homo sapiens
  misc_feature 1..3115: note = ENST00000464955
  source 1..3115: mol_type = unassigned DNA; mol_type = unassigned DNA
catgcatatccagccctgcgcagtctggcctctgccgttctcaccaagccctttcctgttttaccttacctctcttcatccggccagtacttcttatccgtcaattctctgcgcaggtatctcccagagaggttgcccatgtcatctcccagccattgtggcttctgtcattgtgccgattttgtttgttttcttgttgttttatgcagtgaccccactggaatgtcagctccataaaaaagggaccacatttgttttgttcactgatatgtcccatctctgctacagtgttgggtgcagatgcattgaagtcttatttgattcatattgatacttgtgcttttttctttcccttctaggacacgagagacttcctaaacaggtaaaagagtctcctctccatggcgtacctcatcccccttgtttatgttcccccgcttctgaccaggtgcatttgaattcatggggagtggtatggtgccagaggtactcacatcccatggttcatcctgatgcctttctgaggagcaggacacatcattgagaactggagacttgctctcctccttatgagttctctgtgtagccccagctccttggcccactggccttatttgaggtgggacagagcagagaggttagaaacatggcttagtagacagagcgccctggatgtggagtctactgatgttctgaagccctggttcagctggtgtctttgggccactgtttttctgtcacttgtttggggataatcatacctttcctctccccttcataattgccatgaggattgagagataagtatgaaggaaagtaagaagagctgagtaacagcttgttatgtatgtcatcttcttaggtatccacggaagaagttctgggttgggaaacccattgctcgagtggttaaaaaaaagaccggagaattctcagataaactcctctctctgcaacgaggcctgagggaattccaggggaagctgctgagagacttggaatataagacagtgagcgtcaccctggacccacagtcggccagtgggtacctgcagctgtcagaggactggaagtgcgtgacctacaccagcctgtacaagagtgcctacctgcacccccagcagtttgactgtgagcctggggtgctgggcagcaagggcttcacctggggcaaggtctactgggaagtggaagtggagagggagggctggtctgaggatgaagaagagggggatgaggaggaagagggagaagaggaggaggaggaagaggaggccggctatggggatggatatgacgactgggaaacggacgaagatgaggaatcgttgggcgatgaagaggaagaagaggaggaggaagaggaggaagttctggaaagctgcatggtgggggtggctagagactctgtgaagaggaagggagacctctccctgcggccagaggatggcgtgtgggcgctgcgcctctcctcctccggcatctgggccaacaccagccccgaggctgagcttttcccagcactgcggccccggagagtgggcatcgccctggattatgaagggggcaccgtgactttcaccaacgcagagtcacaggaactcatctacaccttcactgccaccttcacccggcgcctggtccccttcctgtggctcaagtggccaggaacacgcctcctgctaagaccctgagccctgacatctgcccccagccccaaccctcagatgcttcacttctttggaattccaggactctcaatggggggacgggatgcctggcctaagcacctggagcaggggaccccatatccactggtagccacctccccattgctgtggccccctgaaatctcactcagtgctgttgctccatctactgccctaatggggctcttttcccacctcctgctggtttcccgagggaacttctgaccctggagtccatgagggctcctttcctttttgaccacgaccttggccccagctctgcactctctggaataagggcccgatgcagcattttcttgcccagtgtggcaagacctcagaaaaaccagtcaattacgcctaagatcattttgctgtccttaaaccccccaggttccttcttgcacaaatccactctgctgcccaccttccctggcattttaaacagacctaccccaccccaactcagagttaagcatacatggcaatgctgaaaataaacaaaatccactgaggcttcccaggccatttaaagcctggagtaccagcgcatatcatctcatggggtccagagtggagtccaggcttctctgaaaccagggctgagcatatttccatagccaaggaggtgggactccctggagctatctgtggtcttagggaaggatccagacatacacggctttggggtacaagctgtgatcactgatcaataaattatctctagattggtccttgtgaggggagttttaagaatccagaacatcttgctcttgatcagcacatccaaaaacaccaagacaaacatccagtggagcagaacctctcctgcctcgggagttctgaccaggttccccagcagggtgttaagcctctgtctctggccctaccagcatccaggttccactttcctaggagagagtggagatgggaagacagggaaaggaaggcagcaggaggccacaagcccaccaggtcttcatgtcaagagagggagtaacatgtcttctcattgcccacggacccaacctctgtccaggtgcccctcatcatcacagtttaacacaagctcccctgctccagccaaattgatctcccagtcttgtccttacccattccaagtgctctgccagcccctgttcatccaagttttaagtcctccaccctgttctaagagactgttccaacggctctgggcctcagtggtcacttgaccaccattgtctcagagctgcccactttgtgtgtgtcacatgctgcctgagtcacacgtacatcttatttctgcctctagttttgtaagctcctggagggcggataacatcttatactactcttgtattctcatggcacctagtgcagtgctgggcacagagtaggtgctcaataaagacttgttgaatgaa

SEQ ID NO: 22264 - DNA, 1041 bp, Homo sapiens
  misc_feature 1..1041: note = ENST00000449136
  source 1..1041: mol_type = unassigned DNA; mol_type = unassigned DNA
ggccgggattcgcggcccggagctcgggaccggagtcaggaatggagagaagggtaatggttttacctcttattgtggaaacctgttgagatcacagagaatatactgacggcataaaagggcagaaccatagcagggtgcggttgcttcattccagcctcgcagtcacctctgtgccctgctggttgtcttcccagcgctgctgtagttgccttccatggatctataggagagcaagtcctccaggagaagaagtcctcaccagtgaacggagacctctctgaactaaggataccatggccacgtcagccccactacggagcctggaagaggaggtgacctgctccatctgtcttgattacctgcgggaccctgtgaccattgactgtggccacgtcttctgccgcagctgcaccacagacgtccgccccatctcagggagccgccccgtctgcccactctgcaagaagccttttaagaaggagaacatccgacccgtgtggcaactggccagcctggtggagaacattgagcggctgaaggtggacaagggcaggcagccgggagaggtgacccgggagcagcaggatgcaaagttgtgcgagcgacaccgagagaagctgcactactactgtgaggacgacgggaagctgctgtgcgtgatgtgccgggagtcccgggagcacaggccccacacggccgtcctcatggagaaggccgcccagccccacagggaaaaaatcctgaaccacctgagtaccctaaggagggacagagacaaaattcagggcttccaggcaaagggagaagctgatatcctggccgcgctgaagaagctccaggaccagaggcagtacattgtggctgagtttgagcagggtcatcagttcctgagggagcgggaggaacacctgctggaacagctggcgaagctggagcaggagctcacggagggcagggagaagttcaagagccggggcgtcggggagcttgcccggctggccctggtcatctccgaactggagggcaaggcgcagcagc

SEQ ID NO: 22265 - DNA, 554 bp, Homo sapiens
  misc_feature 1..554: note = ENST00000419401
  source 1..554: mol_type = unassigned DNA; mol_type = unassigned DNA
ggccgggattcgcggcccggagctcgggaccggagaagaagtcctcaccagtgaacggagacctctctgaactaaggataccatggccacgtcagccccactacggagcctggaagaggaggtgacctgctccatctgtcttgattacctgcgggaccctgtgaccattgactgtggccacgtcttctgccgcagctgcaccacagacgtccgccccatctcagggagccgccccgtctgcccactctgcaagaagccttttaagaaggagaacatccgacccgtgtggcaactggccagcctggtggagaacattgagcggctgaaggtggacaagggcaggcagccgggagaggtgacccgggagcagcaggatgcaaagttgtgcgagcgacaccgagagaagctgcactactactgtgaggacgacgggaagctgctgtgcgtgatgtgccgggagtcccgggagcacaggccccacacggccgtcctcatggagaaggccgcccagccccacagggaaaaaatcctgaaccacctgagtaccctaagga

SEQ ID NO: 22266 - DNA, 473 bp, Homo sapiens
  misc_feature 1..473: note = ENST00000481596
  source 1..473: mol_type = unassigned DNA; mol_type = unassigned DNA
ggccgggattcgcggcccggagctcgggaccggagtcaggaatggagagaagggtaatggttttacctcttattgtggaaacctgttgagatcacagagaatatactgacggcataaaagggcagaaccatagcagggtgcggttgcttcattccagcctcgcagtcacctctgtgccctgctggttgtcttcccagcgctgctgtagttgccttccatggatctataggagagcaagtcctccagctgcaccacagacgtccgccccatctcagggagccgccccgtctgcccactctgcaagaagccttttaagaaggagaacatccgacccgtgtggcaactggccagcctggtggagaacattgagcggctgaaggtggacaagggcaggcagccgggagaggtgacccgggagcagcaggatgcaaagttgtgcgagcgacaccgagagaagctgcactactactgtg

SEQ ID NO: 22267 - DNA, 552 bp, Homo sapiens
  misc_feature 1..552: note = ENST00000445457
  source 1..552: mol_type = unassigned DNA; mol_type = unassigned DNA
ggccgggattcgcggcccggagctcgggaccggagtcaggaatggagagaagggtaatggttttacctcttattgtggaaacctgttgagatcacagagaatatactgacggcataaaagggcagaaccatagcagggtgcgaagtcctcaccagtgaacggagacctctctgaactaaggataccatggccacgtcagccccactacggagcctggaagaggaggtgacctgctccatctgtcttgattacctgcgggaccctgtgaccattgactgtggccacgtcttctgccgcagctgcaccacagacgtccgccccatctcagggagccgccccgtctgcccactctgcaagaagccttttaagaaggagaacatccgacccgtgtggcaactggccagcctggtggagaacattgagcggctgaaggtggacaagggcaggcagccgggagaggtgacccgggagcagcaggatgcaaagttgtgcgagcgacaccgagagaagctgcactactactgtgaggacgacgggaagctgctgtgcgtg

SEQ ID NO: 22268 - DNA, 682 bp, Homo sapiens
  misc_feature 1..682: note = ENST00000424124
  source 1..682: mol_type = unassigned DNA; mol_type = unassigned DNA
ggaaacctgttgagatcacagagaatatactgacggcataaaagggcagaaccatagcagggtgcgcctcgcagtcacctctgtgccctgctggttgtcttcccagcgctgctgtagttgccttccatggatctataggagagcaagtcctccaggagaagaagtcctcaccagtgaacggagacctctctgaactaaggataccatggccacgtcagccccactacggagcctggaagaggaggtgacctgctccatctgtcttgattacctgcgggaccctgtgaccattgactgtggccacgtcttctgccgcagctgcaccacagacgtccgccccatctcagggagccgccccgtctgcccactctgcaagaagccttttaagaaggagaacatccgacccgtgtggcaactggaaaaaatcctgaaccacctgagtaccctaaggagggacagagacaaaattcagggcttccaggcaaagggagaagctgatatcctggccgcgctgaagaagctccaggaccagaggcagtacattgtggctgagtttgagcagggtcatcagttcctgagggagcgggaggaacacctgctggaacagctggcgaagctggagcaggagctcacggagggcagggagaagttcaagagccggggcgtcggggagcttgcccgg

SEQ ID NO: 22269 - DNA, 3114 bp, Homo sapiens
  misc_feature 1..3114: note = ENST00000480999
  source 1..3114: mol_type = unassigned DNA; mol_type = unassigned DNA
catgcatatccagccctgcgcagtctggcctctgccgttctcaccaagccctttcctgttttaccttacctctcttcatccggccagtacttcttatccgtcaattctctgcgcaggtatctcccagagaggttgcccatgtcatctcccagccattgtggcttctgtcattgtgccgattttgtttgttttcttgttgttttatgcagtgaccccactggaatgtcagctccataaaaaagggaccacatttgttttgttcactgatatgtcccatctctgctacagtgttgggtgcagatgcattgaagtcttatttgattcatattgatacttgtgcttttttctttcccttctaggacacgagagacttcctaaacaggtaaaagagtctcctctccatggcgtacctcatcccccttgtttatgttcccccgcttctgaccaggtgcatttgaattcatggggagtggtatggtgccagaggtactcacatcccatggttcatcctgatgcccttctgaggagcaggacacatcattgagaactggagacttgctctcctccttatggttctctgtgtagccccagctccttggcccactggccttatttgaggtgggacagagcagagaggttagaaacatggcttagtagacagagcgccctggatgtggagtctactgatgttctgaagccctggttcagctggtgtctttgggccactgtttttctgtcacttgtttggggataatcatacctttcctctccccttcataattgccatgaggattgagagataagtatgaaggaaagtaagaagagctgagtaacagcttgttatgtatgtcatcttcttaggtatccacggaagaagttctgggttgggaaacccattgctcgagtggttaaaaaaaagaccggagaattctcagataaactcctctctctgcaacgaggcctgagggaattccaggggaagctgctgagagacttggaatataagacagtgagcgtcaccctggacccacagtcggccagtgggtacctgcagctgtcagaggactggaagtgcgtgacctacaccagcctgtacaagagtgcctacctgcacccccagcagtttgactgtgagcctggggtgctaggcagcaagggcttcacctggggcaaggtctactgggaagtggaagtggagagggagggctggtctgaggatgaagaagagggggatgaggaggaagagggagaagaggaggaggaggaagaggaggccggctatggggatggatatgacgactgggaaacggacgaagatgaggaatcgttgggcgatgaagaggaagaagaggaggaggaagaggaggaagttctggaaagctgcatggtgggggtggctagagactctgtgaagaggaagggagacctctccctgcggccagaggatggcgtgtgggcgctgcgcctctcctcctccggcatctgggccaacaccagccccgaggctgagcttttcccagcactgcggccccggagagtgggcatcgccctggattatgaagggggcaccgtgactttcaccaacgcagagtcacaggaactcatctacaccttcactgccaccttcacccggcgcctggtccccttcctgtggctcaagtggccaggaacacgcctcctgctaagaccctgagccctgacatctgcccccagccccaaccctcagatgcttcacttctttggaattccaggactctcaatggggggacgggatgcctggcctaagcacctggagcaggggaccccatatccactggtagccacctccccattgctgtggccccctgaaatctcactcagtgctgttgctccatctactgccctaatggggctcttttcccacctcctgctggtttcccgagggaacttctgaccctggagtccatgagggctcctttcctttttgaccacgaccttggccccagctctgcactctctggaataagggcccgatgcagcattttcttgcccagtgtggcaagacctcagaaaaaccagtcaattacgcctaagatcattttgctgtccttaaaccccccaggttccttcttgcacaaatccactctgctgcccaccttccctggcattttaaacagacctaccccaccccaactcagagttaagcatacatggcaatgctgaaaataaacaaaatccactgaggcttcccaggccatttaaagcctggagtaccagcgcatatcatctcatggggtccagagtggagtccaggcttctctgaaaccagggctgagcatatttccatagccaaggaggtgggactccctggagctatctgtggtcttagggaaggatccagacatacacggctttggggtacaagctgtgatcactgatcaataaattatctctagattggtccttgtgaggggagttttaagaatccagaacatcttgctcttgatcagcacatccaaaaacaccaagacaaacatccagtggagcagaacctctcctgcctcgggagttctgaccgggttccccagcagggtgttaagcctctgtctctggccctaccagcatccaggttccactttcctaggagagagtggagatgggaagacagggaaaggaaggcagcaggaggccacaagcccaccaggtcttcatgtcaagagagggagtaacatgtcttctcattgcccacggacccaacctctgtccaggtgcccctcatcatcacagtttaacacaagctcccctgctccagccaaattgatctcccagtcttgtccttacccattccaagtgctctgccagcccctgttcatccaagttttaagtcctccaccctgttctaagagactgttccaacggctctgggcctcagtggtcacttgaccaccattgtctcagagctgcccactttgtgtgtgtcacatgctgcctgagtcacatgtacatcttatttctgcctctagttttgtaagctcctggagggcggataacatcttatactactcttgtattctcatggcacctagtgcagtgctgggcacagagtaggtgctcaataaagacttgttgaatgaa

SEQ ID NO: 22270 - DNA, 3250 bp, Homo sapiens
  misc_feature 1..3250: note = ENST00000437089
  source 1..3250: mol_type = unassigned DNA; mol_type = unassigned DNA
gagtcaggaatggagagaagggtaatggttttacctcttattgtggaaacctgttgagatcacagagaatatactgacggcataaaagggcagaaccatagcagggtgcgcgctgctgtagttgccttccatggatctataggagagcaagtcctccaggagaagaagtcctcaccagtgaacggagacctctctgaactaaggataccatggccacgtcagccccactacggagcctggaagaggaggtgacctgctccatctgtcttgattacctgcgggaccctgtgaccattgactgtggccacgtcttctgccgcagctgcaccacagacgtccgccccatctcagggagccgccccgtctgcccactctgcaagaagccttttaagaaggagaacatccgacccgtgtggcaactggccagcctggtggagaacattgagcggctgaaggtggacaagggcaggcagccgggagaggtgacccgggagcagcaggatgcaaagttgtgcgagcgacaccgagagaagctgcactactactgtgaggacgacgggaagctgctgtgcgtgatgtgccgggagtcccgggagcacaggccccacacggccgtcctcatggagaaggccgcccagccccacagggaaaaaatcctgaaccacctgagtaccctaaggagggacagagacaaaattcagggcttccaggcaaagggagaagctgatatcctggccgcgctgaagaagctccaggaccagaggcagtacattgtggctgagtttgagcagggtcatcagttcctgagggagcgggaggaacacctgctggaacagctggcgaagctggagcaggagctcacggagggcagggagaagttcaagagccggggcgtcggggagcttgcccggctggccctggtcatctccgaactggagggcaaggcgcagcagccagctgcagagctcatgcaggacacgagagacttcctaaacaggtatccacggaagaagttctgggttgggaaacccattgctcgagtggttaaaaaaaagaccggagaattctcagataaactcctctctctgcaacgaggcctgagggaattccaggggaagctgctgagagacttggaatataagacagtgagcgtcaccctggacccacagtcggccagtgggtacctgcagctgtcagaggactggaagtgcgtgacctacaccagcctgtacaagagtgcctacctgcacccccagcagtttgactgtgagcctggggtgctaggcagcaagggcttcacctggggcaaggtctactgggaagtggaagtggagagggagggctggtctgaggatgaagaagagggggatgaggaggaagagggagaagaggaggaggaggaagaggaggccggctatggggatggatatgacgactgggaaacggacgaagatgaggaatcgttgggcgatgaagaggaagaagaggaggaggaagaggaggaagttctggaaagctgcatggtgggggtggctagagactctgtgaagaggaagggagacctctccctgcggccagaggatggcgtgtgggcgctgcgcctctcctcctccggcatctgggccaacaccagccccgaggctgagcttttcccagcactgcggccccggagagtgggcatcgccctggattatgaagggggcaccgtgactttcaccaacgcagagtcacaggaactcatctacaccttcactgccaccttcacccggcgcctggtccccttcctgtggctcaagtggccaggaacacgcctcctgctaagaccctgagccctgacatctgcccccagccccaaccctcagatgcttcacttctttggaattccaggactctcaatggggggacgggatgcctggcctaagcacctggagcaggggaccccatatccactggtagccacctccccattgctgtggccccctgaaatctcactcagtgctgttgctccatctactgccctaatggggctcttttcccacctcctgctggtttcccgagggaacttctgaccctggagtccatgagggctcctttcctttttgaccacgaccttggccccagctctgcactctctggaataagggcccgatgcagcattttcttgcccagtgtggcaagacctcagaaaaaccagtcaattacgcctaagatcattttgctgtccttaaaccccccaggttccttcttgcacaaatccactctgctgcccaccttccctggcattttaaacagacctaccccaccccaactcagagttaagcatacatggcaatgctgaaaataaacaaaatccactgaggcttcccaggccatttaaagcctggagtaccagcgcatatcatctcatggggtccagagtggagtccaggcttctctgaaaccagggctgagcatatttccatagccaaggaggtgggactccctggagctatctgtggtcttagggaaggatccagacatacacggctttggggtacaagctgtgatcactgatcaataaattatctctagattggtccttgtgaggggagttttaagaatccagaacatcttgctcttgatcagcacatccaaaaacaccaagacaaacatccagtggagcagaacctctcctgcctcgggagttctgaccgggttccccagcagggtgttaagcctctgtctctggccctaccagcatccaggttccactttcctaggagagagtggagatgggaagacagggaaaggaaggcagcaggaggccacaagcccaccaggtcttcatgtcaagagagggagtaacatgtcttctcattgcccacggacccaacctctgtccaggtgcccctcatcatcacagtttaacacaagctcccctgctccagccaaattgatctcccagtcttgtccttacccattccaagtgctctgccagcccctgttcatccaagttttaagtcctccaccctgttctaagagactgttccaacggctctgggcctcagtggtcacttgaccaccattgtctcagagctgcccactttgtgtgtgtcacatgctgcctgagtcacatgtacatcttatttctgcctctagttttgtaagctcctggagggcggataacatcttatactactcttgtattctcatggcacctagtgcagtgctgggcacagagtaggtgctcaataaagacttgttgaatgaa

SEQ ID NO: 22271 - DNA, 3478 bp, Homo sapiens
  misc_feature 1..3478: note = ENST00000454678
  source 1..3478: mol_type = unassigned DNA; mol_type = unassigned DNA
aacagaccgccgtgagagaggaggggtgccggccgggattcgcggcccggagctcgggaccggagtcaggaatggagagaagggtaatggttttacctcttattgtggaaacctgttgagatcacagagaatatactgacggcataaaagggcagaaccatagcagggtgcggttgcttcattccagcctcgcagtcacctctgtgccctgctggttgtcttcccagcgctgctgtagttgccttccatggatctataggagagcaagtcctccaggagctggtggtgtctgtcgattgactgagtgctggagctggcagccctgtgcaggctgccacctttgcccctttactgtgcttgctcctgactctatgtcgcgtctccaaggagaagaagtcctcaccagtgaacggagacctctctgaactaaggataccatggccacgtcagccccactacggagcctggaagaggaggtgacctgctccatctgtcttgattacctgcgggaccctgtgaccattgactgtggccacgtcttctgccgcagctgcaccacagacgtccgccccatctcagggagccgccccgtctgcccactctgcaagaagccttttaagaaggagaacatccgacccgtgtggcaactggccagcctggtggagaacattgagcggctgaaggtggacaagggcaggcagccgggagaggtgacccgggagcagcaggatgcaaagttgtgcgagcgacaccgagagaagctgcactactactgtgaggacgacgggaagctgctgtgcgtgatgtgccgggagtcccgggagcacaggccccacacggccgtcctcatggagaaggccgcccagccccacagggaaaaaatcctgaaccacctgagtaccctaaggagggacagagacaaaattcagggcttccaggcaaagggagaagctgatatcctggccgcgctgaagaagctccaggaccagaggcagtacattgtggctgagtttgagcagggtcatcagttcctgagggagcgggaggaacacctgctggaacagctggcgaagctggagcaggagctcacggagggcagggagaagttcaagagccggggcgtcggggagcttgcccggctggccctggtcatctccgaactggagggcaaggcgcagcagccagctgcagagctcatgcaggacacgagagacttcctaaacaggtatccacggaagaagttctgggttgggaaacccattgctcgagtggttaaaaaaaagaccggagaattctcagataaactcctctctctgcaacgaggcctgagggaattccaggggaagctgctgagagacttggaatataagacagtgagcgtcaccctggacccacagtcggccagtgggtacctgcagctgtcagaggactggaagtgcgtgacctacaccagcctgtacaagagtgcctacctgcacccccagcagtttgactgtgagcctggggtgctaggcagcaagggcttcacctggggcaaggtctactgggaagtggaagtggagagggagggctggtctgaggatgaagaagagggggatgaggaggaagagggagaagaggaggaggaggaagaggaggccggctatggggatggatatgacgactgggaaacggacgaagatgaggaatcgttgggcgatgaagaggaagaagaggaggaggaagaggaggaagttctggaaagctgcatggtgggggtggctagagactctgtgaagaggaagggagacctctccctgcggccagaggatggcgtgtgggcgctgcgcctctcctcctccggcatctgggccaacaccagccccgaggctgagcttttcccagcactgcggccccggagagtgggcatcgccctggattatgaagggggcaccgtgactttcaccaacgcagagtcacaggaactcatctacaccttcactgccaccttcacccggcgcctggtccccttcctgtggctcaagtggccaggaacacgcctcctgctaagaccctgagccctgacatctgcccccagccccaaccctcagatgcttcacttctttggaattccaggactctcaatggggggacgggatgcctggcctaagcacctggagcaggggaccccatatccactggtagccacctccccattgctgtggccccctgaaatctcactcagtgctgttgctccatctactgccctaatggggctcttttcccacctcctgctggtttcccgagggaacttctgaccctggagtccatgagggctcctttcctttttgaccacgaccttggccccagctctgcactctctggaataagggcccgatgcagcattttcttgcccagtgtggcaagacctcagaaaaaccagtcaattacgcctaagatcattttgctgtccttaaaccccccaggttccttcttgcacaaatccactctgctgcccaccttccctggcattttaaacagacctaccccaccccaactcagagttaagcatacatggcaatgctgaaaataaacaaaatccactgaggcttcccaggccatttaaagcctggagtaccagcgcatatcatctcatggggtccagagtggagtccaggcttctctgaaaccagggctgagcatatttccatagccaaggaggtgggactccctggagctatctgtggtcttagggaaggatccagacatacacggctttggggtacaagctgtgatcactgatcaataaattatctctagattggtccttgtgaggggagttttaagaatccagaacatcttgctcttgatcagcacatccaaaaacaccaagacaaacatccagtggagcagaacctctcctgcctcgggagttctgaccgggttccccagcagggtgttaagcctctgtctctggccctaccagcatccaggttccactttcctaggagagagtggagatgggaagacagggaaaggaaggcagcaggaggccacaagcccaccaggtcttcatgtcaagagagggagtaacatgtcttctcattgcccacggacccaacctctgtccaggtgcccctcatcatcacagtttaacacaagctcccctgctccagccaaattgatctcccagtcttgtccttacccattccaagtgctctgccagcccctgttcatccaagttttaagtcctccaccctgttctaagagactgttccaacggctctgggcctcagtggtcacttgaccaccattgtctcagagctgcccactttgtgtgtgtcacatgctgcctgagtcacatgtacatcttatttctgcctctagttttgtaagctcctggagggcggataacatcttatactactcttgtattctcatggcacctagtgcagtgctgggcacagagtaggtgctcaataaagacttgttgaatgaa

SEQ ID NO: 22272 - DNA, 3318 bp, Homo sapiens
  misc_feature 1..3318: note = ENST00000453195
  source 1..3318: mol_type = unassigned DNA; mol_type = unassigned DNA
gggagattacggggcggggacgagctgtcgcgctggttgctcgtgcaggagcgggacccggaacagaccgccgtgagagaggaggggtgccggccgggattcgcggcccggagctcgggaccggttgcttcattccagcctcgcagtcacctctgtgccctgctggttgtcttcccagcgctgctgtagttgccttccatggatctataggagagcaagtcctccaggagaagaagtcctcaccagtgaacggagacctctctgaactaaggataccatggccacgtcagccccactacggagcctggaagaggaggtgacctgctccatctgtcttgattacctgcgggaccctgtgaccattgactgtggccacgtcttctgccgcagctgcaccacagacgtccgccccatctcagggagccgccccgtctgcccactctgcaagaagccttttaagaaggagaacatccgacccgtgtggcaactggccagcctggtggagaacattgagcggctgaaggtggacaagggcaggcagccgggagaggtgacccgggagcagcaggatgcaaagttgtgcgagcgacaccgagagaagctgcactactactgtgaggacgacgggaagctgctgtgcgtgatgtgccgggagtcccgggagcacaggccccacacggccgtcctcatggagaaggccgcccagccccacagggaaaaaatcctgaaccacctgagtaccctaaggagggacagagacaaaattcagggcttccaggcaaagggagaagctgatatcctggccgcgctgaagaagctccaggaccagaggcagtacattgtggctgagtttgagcagggtcatcagttcctgagggagcgggaggaacacctgctggaacagctggcgaagctggagcaggagctcacggagggcagggagaagttcaagagccggggcgtcggggagcttgcccggctggccctggtcatctccgaactggagggcaaggcgcagcagccagctgcagagctcatgcaggacacgagagacttcctaaacaggtatccacggaagaagttctgggttgggaaacccattgctcgagtggttaaaaaaaagaccggagaattctcagataaactcctctctctgcaacgaggcctgagggaattccaggggaagctgctgagagacttggaatataagacagtgagcgtcaccctggacccacagtcggccagtgggtacctgcagctgtcagaggactggaagtgcgtgacctacaccagcctgtacaagagtgcctacctgcacccccagcagtttgactgtgagcctggggtgctaggcagcaagggcttcacctggggcaaggtctactgggaagtggaagtggagagggagggctggtctgaggatgaagaagagggggatgaggaggaagagggagaagaggaggaggaggaagaggaggccggctatggggatggatatgacgactgggaaacggacgaagatgaggaatcgttgggcgatgaagaggaagaagaggaggaggaagaggaggaagttctggaaagctgcatggtgggggtggctagagactctgtgaagaggaagggagacctctccctgcggccagaggatggcgtgtgggcgctgcgcctctcctcctccggcatctgggccaacaccagccccgaggctgagcttttcccagcactgcggccccggagagtgggcatcgccctggattatgaagggggcaccgtgactttcaccaacgcagagtcacaggaactcatctacaccttcactgccaccttcacccggcgcctggtccccttcctgtggctcaagtggccaggaacacgcctcctgctaagaccctgagccctgacatctgcccccagccccaaccctcagatgcttcacttctttggaattccaggactctcaatggggggacgggatgcctggcctaagcacctggagcaggggaccccatatccactggtagccacctccccattgctgtggccccctgaaatctcactcagtgctgttgctccatctactgccctaatggggctcttttcccacctcctgctggtttcccgagggaacttctgaccctggagtccatgagggctcctttcctttttgaccacgaccttggccccagctctgcactctctggaataagggcccgatgcagcattttcttgcccagtgtggcaagacctcagaaaaaccagtcaattacgcctaagatcattttgctgtccttaaaccccccaggttccttcttgcacaaatccactctgctgcccaccttccctggcattttaaacagacctaccccaccccaactcagagttaagcatacatggcaatgctgaaaataaacaaaatccactgaggcttcccaggccatttaaagcctggagtaccagcgcatatcatctcatggggtccagagtggagtccaggcttctctgaaaccagggctgagcatatttccatagccaaggaggtgggactccctggagctatctgtggtcttagggaaggatccagacatacacggctttggggtacaagctgtgatcactgatcaataaattatctctagattggtccttgtgaggggagttttaagaatccagaacatcttgctcttgatcagcacatccaaaaacaccaagacaaacatccagtggagcagaacctctcctgcctcgggagttctgaccgggttccccagcagggtgttaagcctctgtctctggccctaccagcatccaggttccactttcctaggagagagtggagatgggaagacagggaaaggaaggcagcaggaggccacaagcccaccaggtcttcatgtcaagagagggagtaacatgtcttctcattgcccacggacccaacctctgtccaggtgcccctcatcatcacagtttaacacaagctcccctgctccagccaaattgatctcccagtcttgtccttacccattccaagtgctctgccagcccctgttcatccaagttttaagtcctccaccctgttctaagagactgttccaacggctctgggcctcagtggtcacttgaccaccattgtctcagagctgcccactttgtgtgtgtcacatgctgcctgagtcacatgtacatcttatttctgcctctagttttgtaagctcctggagggcggataacatcttatactactcttgtattctcatggcacctagtgcagtgctgggcacagagtaggtgctcaataaagacttgttgaatgaa

SEQ ID NO: 22273 - DNA, 1124 bp, Homo sapiens
  misc_feature 1..1124: note = ENST00000416596
  source 1..1124: mol_type = unassigned DNA; mol_type = unassigned DNA
acggggcggggacgagctgtcgcgctggttgctcgtgcaggagcgggacccggaacagaccgccgtgagagaggaggggtgccggccgggattcgcggcccggagctcgggaccggagtcaggaatggagagaagggtaatggttttacctcttattgtggaaacctgttgagatcacagagaatatactgacggcataaaagggcagaaccatagcagggtgcggttgcttcattccagcctcgcagtcacctctgtgccctgctggttgtcttcccagcgctgctgtagttgccttccatggatctataggagagcaagtcctccaggagaagaagtcctcaccagtgaacggagacctctctgaactaaggataccatggccacgtcagccccactacggagcctggaagaggaggtgacctgctccatctgtcttgattacctgcgggaccctgtgaccattgactgtggccacgtcttctgccgcagctgcaccacagacgtccgccccatctcagggagccgccccgtctgcccactctgcaagaagccttttaagaaggagaacatccgacccgtgtggcaactggccagcctggtggagaacattgagcggctgaaggtggacaagggcaggcagccgggagaggtgacccgggagcagcaggatgcaaagttgtgcgagcgacaccgagagaagctgcactactactgtgaggacgacgggaagctgctgtgcgtgatgtgccgggagtcccgggagcacaggccccacacggccgtcctcatggagaaggccgcccagccccacagggaaaaaatcctgaaccacctgagtaccctaaggagggacagagacaaaattcagggcttccaggcaaagggagaagctgatatcctggccgcgctgaagaagctccaggaccagaggcagtacattgtggctgagtttgagcagggtcatcagttcctgagggagcgggaggaacacctgctggaacagctggcgaagctggagcaggagctcacggagggcagggagaagttcaagagccggggcgtcggggagcttgcccggctggccctggtcatctccgaactggagggcaaggcgcagcagc

SEQ ID NO: 22274 - DNA, 603 bp, Homo sapiens
  misc_feature 1..603: note = ENST00000418026
  source 1..603: mol_type = unassigned DNA; mol_type = unassigned DNA
gtgcaggagcgggacccggaacagaccgccgtgagagaggaggggtgccggccgggattcgcggcccggagctcgggaccggagaagaagtcctcaccagtgaacggagacctctctgaactaaggataccatggccacgtcagccccactacggagcctggaagaggaggtgacctgctccatctgtcttgattacctgcgggaccctgtgaccattgactgtggccacgtcttctgccgcagctgcaccacagacgtccgccccatctcagggagccgccccgtctgcccactctgcaagaagccttttaagaaggagaacatccgacccgtgtggcaactggccagcctggtggagaacattgagcggctgaaggtggacaagggcaggcagccgggagaggtgacccgggagcagcaggatgcaaagttgtgcgagcgacaccgagagaagctgcactactactgtgaggacgacgggaagctgctgtgcgtgatgtgccgggagtcccgggagcacaggccccacacggccgtcctcatggagaaggccgcccagccccacagggaaaaaatcctgaaccacctgagtaccctaagga

SEQ ID NO: 22275 - DNA, 582 bp, Homo sapiens
  misc_feature 1..582: note = ENST00000434785
  source 1..582: mol_type = unassigned DNA; mol_type = unassigned DNA
aacagaccgccgtgagagaggaggggtgccggccgggattcgcggcccggagctcgggaccggagtcaggaatggagagaagggtaatggttttacctcttattgtggaaacctgttgagatcacagagaatatactgacggcataaaagggcagaaccatagcagggtgcgaagtcctcaccagtgaacggagacctctctgaactaaggataccatggccacgtcagccccactacggagcctggaagaggaggtgacctgctccatctgtcttgattacctgcgggaccctgtgaccattgactgtggccacgtcttctgccgcagctgcaccacagacgtccgccccatctcagggagccgccccgtctgcccactctgcaagaagccttttaagaaggagaacatccgacccgtgtggcaactggccagcctggtggagaacattgagcggctgaaggtggacaagggcaggcagccgggagaggtgacccgggagcagcaggatgcaaagttgtgcgagcgacaccgagagaagctgcactactactgtgaggacgacgggaagctgctgtgcgtg

SEQ ID NO: 22276 - DNA, 502 bp, Homo sapiens
  misc_feature 1..502: note = ENST00000487829
  source 1..502: mol_type = unassigned DNA; mol_type = unassigned DNA
acagaccgccgtgagagaggaggggtgccggccgggattcgcggcccggagctcgggaccggagtcaggaatggagagaagggtaatggttttacctcttattgtggaaacctgttgagatcacagagaatatactgacggcataaaagggcagaaccatagcagggtgcggttgcttcattccagcctcgcagtcacctctgtgccctgctggttgtcttcccagcgctgctgtagttgccttccatggatctataggagagcaagtcctccagctgcaccacagacgtccgccccatctcagggagccgccccgtctgcccactctgcaagaagccttttaagaaggagaacatccgacccgtgtggcaactggccagcctggtggagaacattgagcggctgaaggtggacaagggcaggcagccgggagaggtgacccgggagcagcaggatgcaaagttgtgcgagcgacaccgagagaagctgcactactactgtg

SEQ ID NO: 22277 - DNA, 3114 bp, Homo sapiens; identical to SEQ ID NO: 22269
  misc_feature 1..3114: note = ENST00000463977
  source 1..3114: mol_type = unassigned DNA

SEQ ID NO: 22278 - DNA, 3247 bp, Homo sapiens
  misc_feature 1..3247: note = ENST00000383607
  source 1..3247: mol_type = unassigned DNA
tcaggaatggagagaagggtaatggttttacctcttattgtggaaacctgttgagatcacagagaatatactgacggcataaaagggcagaaccatagcagggtgcgcgctgctgtagttgccttccatggatctataggagagcaagtcctccaggagaagaagtcctcaccagtgaacggagacctctctgaactaaggataccatggccacgtcagccccactacggagcctggaagaggaggtgacctgctccatctgtcttgattacctgcgggaccctgtgaccattgactgtggccacgtcttctgccgcagctgcaccacagacgtccgccccatctcagggagccgccccgtctgcccactctgcaagaagccttttaagaaggagaacatccgacccgtgtggcaactggccagcctggtggagaacattgagcggctgaaggtggacaagggcaggcagccgggagaggtgacccgggagcagcaggatgcaaagttgtgcgagcgacaccgagagaagctgcactactactgtgaggacgacgggaagctgctgtgcgtgatgtgccgggagtcccgggagcacaggccccacacggccgtcctcatggagaaggccgcccagccccacagggaaaaaatcctgaaccacctgagtaccctaaggagggacagagacaaaattcagggcttccaggcaaagggagaagctgatatcctggccgcgctgaagaagctccaggaccagaggcagtacattgtggctgagtttgagcagggtcatcagttcctgagggagcgggaggaacacctgctggaacagctggcgaagctggagcaggagctcacggagggcagggagaagttcaagagccggggcgtcggggagcttgcccggctggccctggtcatctccgaactggagggcaaggcgcagcagccagctgcagagctcatgcaggacacgagagacttcctaaacaggtatccacggaagaagttctgggttgggaaacccattgctcgagtggttaaaaaaaagaccggagaattctcagataaactcctctctctgcaacgaggcctgagggaattccaggggaagctgctgagagacttggaatataagacagtgagcgtcaccctggacccacagtcggccagtgggtacctgcagctgtcagaggactggaagtgcgtgacctacaccagcctgtacaagagtgcctacctgcacccccagcagtttgactgtgagcctggggtgctaggcagcaagggcttcacctggggcaaggtctactgggaagtggaagtggagagggagggctggtctgaggatgaagaagagggggatgaggaggaagagggagaagaggaggaggaggaagaggaggccggctatggggatggatatgacgactgggaaacggacgaagatgaggaatcgttgggcgatgaagaggaagaagaggaggaggaagaggaggaagttctggaaagctgcatggtgggggtggctagagactctgtgaagaggaagggagacctctccctgcggccagaggatggcgtgtgggcgctgcgcctctcctcctccggcatctgggccaacaccagccccgaggctgagcttttcccagcactgcggccccggagagtgggcatcgccctggattatgaagggggcaccgtgactttcaccaacgcagagtcacaggaactcatctacaccttcactgccaccttcacccggcgcctggtccccttcctgtggctcaagtggccaggaacacgcctcctgctaagaccctgagccctgacatctgcccccagccccaaccctcagatgcttcacttctttggaattccaggactctcaatggggggacgggatgcctggcctaagcacctggagcaggggaccccatatccactggtagccacctccccattgctgtggccccctgaaatctcactcagtgctgttgctccatctactgccctaatggggctcttttcccacctcctgctggtttcccgagggaacttctgaccctggagtccatgagggctcctttcctttttgaccacgaccttggccccagctctgcactctctggaataagggcccgatgcagcattttcttgcccagtgtggcaagacctcagaaaaaccagtcaattacgcctaagatcattttgctgtccttaaaccccccaggttccttcttgcacaaatccactctgctgcccaccttccctggcattttaaacagacctaccccaccccaactcagagttaagcatacatggcaatgctgaaaataaacaaaatccactgaggcttcccaggccatttaaagcctggagtaccagcgcatatcatctcatggggtccagagtggagtccaggcttctctgaaaccagggctgagcatatttccatagccaaggaggtgggactccctggagctatctgtggtcttagggaaggatccagacatacacggctttggggtacaagctgtgatcactgatcaataaattatctctagattggtccttgtgaggggagttttaagaatccagaacatcttgctcttgatcagcacatccaaaaacaccaagacaaacatccagtggagcagaacctctcctgcctcgggagttctgaccgggttccccagcagggtgttaagcctctgtctctggccctaccagcatccaggttccactttcctaggagagagtggagatgggaagacagggaaaggaaggcagcaggaggccacaagcccaccaggtcttcatgtcaagagagggagtaacatgtcttctcattgcccacggacccaacctctgtccaggtgcccctcatcatcacagtttaacacaagctcccctgctccagccaaattgatctcccagtcttgtccttacccattccaagtgctctgccagcccctgttcatccaagttttaagtcctccaccctgttctaagagactgttccaacggctctgggcctcagtggtcacttgaccaccattgtctcagagctgcccactttgtgtgtgtcacatgctgcctgagtcacatgtacatcttatttctgcctctagttttgtaagctcctggagggcggataacatcttatactactcttgtattctcatggcacctagtgcagtgctgggcacagagtaggtgctcaataaagacttgttgaatgaa

SEQ ID NO: 22279 - DNA, 3478 bp, Homo sapiens
  misc_feature 1..3478: note = ENST00000327357
  source 1..3478: mol_type = unassigned DNA; mol_type = unassigned DNA
aacagaccgccgtgagagaggaggggtgccggccgggattcgcggcccggagctcgggaccggagtcaggaatggagagaagggtaatggttttacctcttattgtggaaacctgttgagatcacagagaatatactgacggcataaaagggcagaaccatagcagggtgcggttgcttcattccagcctcgcagtcacctctgtgccctgctggttgtcttcccagcgctgctgtagttgccttccatggatctataggagagcaagtcctccaggagctggtggtgtctgtcgattgactgagtgctggagctggcagccctgtgcaggctgccacctttgcccctttactgtgcttgctcctgactctatgtcgcgtcttcaaggagaagaagtcctcaccagtgaacggagacctctctgaactaaggataccatggccacgtcagccccactacggagcctggaagaggaggtgacctgctccatctgtcttgattacctgcgggaccctgtgaccattgactgtggccacgtcttctgccgcagctgcaccacagacgtccgccccatctcagggagccgccccgtctgcccactctgcaagaagccttttaagaaggagaacatccgacccgtgtggcaactggccagcctggtggagaacattgagcggctgaaggtggacaagggcaggcagccgggagaggtgacccgggagcagcaggatgcaaagttgtgcgagcgacaccgagagaagctgcactactactgtgaggacgacgggaagctgctgtgcgtgatgtgccgggagtcccgggagcacaggccccacacggccgtcctcatggagaaggccgcccagccccacagggaaaaaatcctgaaccacctgagtaccctaaggagggacagagacaaaattcagggcttccaggcaaagggagaagctgatatcctggccgcgctgaagaagctccaggaccagaggcagtacattgtggctgagtttgagcagggtcatcagttcctgagggagcgggaggaacacctgctggaacagctggcgaagctggagcaggagctcacggagggcagggagaagttcaagagccggggcgtcggggagcttgcccggctggccctggtcatctccgaactggagggcaaggcgcagcagccagctgcagagctcatgcaggacacgagagacttcctaaacaggtatccacggaagaagttctgggttgggaaacccattgctcgagtggttaaaaaaaagaccggagaattctcagataaactcctctctctgcaacgaggcctgagggaattccaggggaagctgctgagagacttggaatataagacagtgagcgtcaccctggacccacagtcggccagtgggtacctgcagctgtcagaggactggaagtgcgtgacctacaccagcctgtacaagagtgcctacctgcacccccagcagtttgactgtgagcctggggtgctaggcagcaagggcttcacctggggcaaggtctactgggaagtggaagtggagagggagggctggtctgaggatgaagaagagggggatgaggaggaagagggagaagaggaggaggaggaagaggaggccggctatggggatggatatgacgactgggaaacggacgaagatgaggaatcgttgggcgatgaagaggaagaagaggaggaggaagaggaggaagttctggaaagctgcatggtgggggtggctagagactctgtgaagaggaagggagacctctccctgcggccagaggatggcgtgtgggcgctgcgcctctcctcctccggcatctgggccaacaccagccccgaggctgagcttttcccagcactgcggccccggagagtgggcatcgccctggattatgaagggggcaccgtgactttcaccaacgcagagtcacaggaactcatctacaccttcactgccaccttcacccggcgcctggtccccttcctgtggctcaagtggccaggaacacgcctcctgctaagaccctgagccctgacatctgcccccagccccaaccctcagatgcttcacttctttggaattccaggactctcaatggggggacgggatgcctggcctaagcacctggagcaggggaccccatatccactggtagccacctccccattgctgtggccccctgaaatctcactcagtgctgttgctccatctactgccctaatggggctcttttcccacctcctgctggtttcccgagggaacttctgaccctggagtccatgagggctcctttcctttttgaccacgaccttggccccagctctgcactctctggaataagggcccgatgcagcattttcttgcccagtgtggcaagacctcagaaaaaccagtcaattacgcctaagatcattttgctgtccttaaaccccccaggttccttcttgcacaaatccactctgctgcccaccttccctggcattttaaacagacctaccccaccccaactcagagttaagcatacatggcaatgctgaaaataaacaaaatccactgaggcttcccaggccatttaaagcctggagtaccagcgcatatcatctcatggggtccagagtggagtccaggcttctctgaaaccagggctgagcatatttccatagccaaggaggtgggactccctggagctatctgtggtcttagggaaggatccagacatacacggctttggggtacaagctgtgatcactgatcaataaattatctctagattggtccttgtgaggggagttttaagaatccagaacatcttgctcttgatcagcacatccaaaaacaccaagacaaacatccagtggagcagaacctctcctgcctcgggagttctgaccgggttccccagcagggtgttaagcctctgtctctggccctaccagcatccaggttccactttcctaggagagagtggagatgggaagacagggaaaggaaggcagcaggaggccacaagcccaccaggtcttcatgtcaagagagggagtaacatgtcttctcattgcccacggacccaacctctgtccaggtgcccctcatcatcacagtttaacacaagctcccctgctccagccaaattgatctcccagtcttgtccttacccattccaagtgctctgccagcccctgttcatccaagttttaagtcctccaccctgttctaagagactgttccaacggctctgggcctcagtggtcacttgaccaccattgtctcagagctgcccactttgtgtgtgtcacatgctgcctgagtcacatgtacatcttatttctgcctctagttttgtaagctcctggagggcggataacatcttatactactcttgtattctcatggcacctagtgcagtgctgggcacagagtaggtgctcaataaagacttgttgaatgaa

SEQ ID NO: 22280 - DNA, 3318 bp, Homo sapiens; identical to SEQ ID NO: 22272
  misc_feature 1..3318: note = ENST00000396558
  source 1..3318: mol_type = unassigned DNA; mol_type = unassigned DNA

SEQ ID NO: 22281 - DNA, 1124 bp, Homo sapiens; identical to SEQ ID NO: 22273
  misc_feature 1..1124: note = ENST00000412755
  source 1..1124: mol_type = unassigned DNA; mol_type = unassigned DNA

SEQ ID NO: 22282 - DNA, 603 bp, Homo sapiens; identical to SEQ ID NO: 22274
  misc_feature 1..603: note = ENST00000419171
  source 1..603: mol_type = unassigned DNA; mol_type = unassigned DNA

SEQ ID NO: 22283 - DNA, 582 bp, Homo sapiens; identical to SEQ ID NO: 22275
  misc_feature 1..582: note = ENST00000427612
  source 1..582: mol_type = unassigned DNA; mol_type = unassigned DNA

SEQ ID NO: 22284 - DNA, 502 bp, Homo sapiens; identical to SEQ ID NO: 22276
  misc_feature 1..502: note = ENST00000461313
  source 1..502: mol_type = unassigned DNA; mol_type = unassigned DNA

SEQ ID NO: 22285 - DNA, 3115 bp, Homo sapiens; identical to SEQ ID NO: 22263
  misc_feature 1..3115: note = ENST00000472707
  source 1..3115: mol_type = unassigned DNA; mol_type = unassigned DNA

SEQ ID NO: 22286 - DNA, 3250 bp, Homo sapiens; identical to SEQ ID NO: 22262
  misc_feature 1..3250: note = ENST00000422349
  source 1..3250: mol_type = unassigned DNA; mol_type = unassigned DNA

SEQ ID NO: 22287 - DNA, 3478 bp, Homo sapiens
  misc_feature 1..3478: note = ENST00000445259
  source 1..3478: mol_type = unassigned DNA; mol_type = unassigned DNA
aacagaccgccgtgagagaggaggggcgccggccgggattcgcggcccggagctcgggaccggagtcaggaatggagagaagggtaatggttttacctcttattgtggaaacctgttgagatcacagagaatatactgacggcataaaagggcagaaccatagcagggtgcggttgcttcattccagcctcgcagtcacctctgtgccctgctggttgtcttcccagcgctgctgtagttgccttccatggatctataggagagcaagtcctccaggagctggtggtgtctgtcgattgactgagtgctggagctggcagccctgtgcaggctgccacctttgcccctttactgtgcttgctcctgactctatgtcgcgtctccaaggagaagaagtcctcaccagtgaacggagacctctctgaactaaggataccatggccacgtcagccccactacggagcctggaagaggaggtgacctgctccatctgtcttgattacctgcgggaccctgtgaccattgactgtggccacgtcttctgccgcagctgcaccacagacgtccgccccatctcagggagccgccccgtctgcccactctgcaagaagccttttaagaaggagaacatccgacccgtgtggcaactggccagcctggtggagaacattgagcggctgaaggtggacaagggcaggcagccgggagaggtgacccgggagcagcaggatgcaaagttgtgcgagcgacaccgagagaagctgcactactactgtgaggacgacgggaagctgctgtgcgtgatgtgccgggagtcccgggagcacaggccccacacggccgtcctcatggagaaggccgcccagccccacagggaaaaaatcctgaaccacctgagtaccctaaggagggacagagacaaaattcagggcttccaggcaaagggagaagctgatatcctggccgcgctgaagaagctccaggaccagaggcagtacattgtggctgagtttgagcagggtcatcagttcctgagggagcgggaggaacacctgctggaacagctggcgaagctggagcaggagctcacggagggcagggagaagttcaagagccggggcgtcggggagcttgcccggctggccctggtcatctccgaactggagggcaaggcgcagcagccagctgcagagctcatgcaggacacgagagacttcctaaacaggtatccacggaagaagttctgggttgggaaacccattgctcgagtggttaaaaaaaagaccggagaattctcagataaactcctctctctgcaacgaggcctgagggaattccaggggaagctgctgagagacttggaatataagacagtgagcgtcaccctggacccacagtcggccagtgggtacctgcagctgtcagaggactggaagtgcgtgacctacaccagcctgtacaagagtgcctacctgcacccccagcagtttgactgtgagcctggggtgctgggcagcaagggcttcacctggggcaaggtctactgggaagtggaagtggagagggagggctggtctgaggatgaagaagagggggatgaggaggaagagggagaagaggaggaggaggaagaggaggccggctatggggatggatatgacgactgggaaacggacgaagatgaggaatcgttgggcgatgaagaggaagaagaggaggaggaagaggaggaagttctggaaagctgcatggtgggggtggctagagactctgtgaagaggaagggagacctctccctgcggccagaggatggcgtgtgggcgctgcgcctctcctcctccggcatctgggccaacaccagccccgaggctgagcttttcccagcactgcggccccggagagtgggcatcgccctggattatgaagggggcaccgtgactttcaccaacgcagagtcacaggaactcatctacaccttcactgccaccttcacccggcgcctggtccccttcctgtggctcaagtggccaggaacacgcctcctgctaagaccctgagccctgacatctgcccccagccccaaccctcagatgcttcacttctttggaattccaggactctcaatggggggacgggatgcctggcctaagcacctggagcaggggaccccatatccactggtagccacctccccattgctgtggccccctgaaatctcactcagtgctgttgctccatctactgccctaatggggctcttttcccacctcctgctggtttcccgagggaacttctgaccctggagtccatgagggctcctttcctttttgaccacgaccttggccccagctctgcactctctggaataagggcccgatgcagcattttcttgcccagtgtggcaagacctcagaaaaaccagtcaattacgcctaagatcattttgctgtccttaaaccccccaggttccttcttgcacaaatccactctgctgcccaccttccctggcattttaaacagacctaccccaccccaactcagagttaagcatacatggcaatgctgaaaataaacaaaatccactgaggcttcccaggccatttaaagcctggagtaccagcgcatatcatctcatggggtccagagtggagtccaggcttctctgaaaccagggctgagcatatttccatagccaaggaggtgggactccctggagctatctgtggtcttagggaaggatccagacatacacggctttggggtacaagctgtgatcactgatcaataaattatctctagattggtccttgtgaggggagttttaagaatccagaacatcttgctcttgatcagcacatccaaaaacaccaagacaaacatccagtggagcagaacctctcctgcctcgggagttctgaccaggttccccagcagggtgttaagcctctgtctctggccctaccagcatccaggttccactttcctaggagagagtggagatgggaagacagggaaaggaaggcagcaggaggccacaagcccaccaggtcttcatgtcaagagagggagtaacatgtcttctcattgcccacggacccaacctctgtccaggtgcccctcatcatcacagtttaacacaagctcccctgctccagccaaattgatctcccagtcttgtccttacccattccaagtgctctgccagcccctgttcatccaagttttaagtcctccaccctgttctaagagactgttccaacggctctgggcctcagtggtcacttgaccaccattgtctcagagctgcccactttgtgtgtgtcacatgctgcctgagtcacacgtacatcttatttctgcctctagttttgtaagctcctggagggcggataacatcttatactactcttgtattctcatggcacctagtgcagtgctgggcacagagtaggtgctcaataaagacttgttgaatgaa

SEQ ID NO: 22288 - DNA, 3318 bp, Homo sapiens
  misc_feature 1..3318: note = ENST00000427535
  source 1..3318: mol_type = unassigned DNA; mol_type = unassigned DNA
gggagattacggggcggggacgagctgtcgcgctggttgctcgtgcaggagcgggacccggaacagaccgccgtgagagaggaggggcgccggccgggattcgcggcccggagctcgggaccggttgcttcattccagcctcgcagtcacctctgtgccctgctggttgtcttcccagcgctgctgtagttgccttccatggatctataggagagcaagtcctccaggagaagaagtcctcaccagtgaacggagacctctctgaactaaggataccatggccacgtcagccccactacggagcctggaagaggaggtgacctgctccatctgtcttgattacctgcgggaccctgtgaccattgactgtggccacgtcttctgccgcagctgcaccacagacgtccgccccatctcagggagccgccccgtctgcccactctgcaagaagccttttaagaaggagaacatccgacccgtgtggcaactggccagcctggtggagaacattgagcggctgaaggtggacaagggcaggcagccgggagaggtgacccgggagcagcaggatgcaaagttgtgcgagcgacaccgagagaagctgcactactactgtgaggacgacgggaagctgctgtgcgtgatgtgccgggagtcccgggagcacaggccccacacggccgtcctcatggagaaggccgcccagccccacagggaaaaaatcctgaaccacctgagtaccctaaggagggacagagacaaaattcagggcttccaggcaaagggagaagctgatatcctggccgcgctgaagaagctccaggaccagaggcagtacattgtggctgagtttgagcagggtcatcagttcctgagggagcgggaggaacacctgctggaacagctggcgaagctggagcaggagctcacggagggcagggagaagttcaagagccggggcgtcggggagcttgcccggctggccctggtcatctccgaactggagggcaaggcgcagcagccagctgcagagctcatgcaggacacgagagacttcctaaacaggtatccacggaagaagttctgggttgggaaacccattgctcgagtggttaaaaaaaagaccggagaattctcagataaactcctctctctgcaacgaggcctgagggaattccaggggaagctgctgagagacttggaatataagacagtgagcgtcaccctggacccacagtcggccagtgggtacctgcagctgtcagaggactggaagtgcgtgacctacaccagcctgtacaagagtgcctacctgcacccccagcagtttgactgtgagcctggggtgctgggcagcaagggcttcacctggggcaaggtctactgggaagtggaagtggagagggagggctggtctgaggatgaagaagagggggatgaggaggaagagggagaagaggaggaggaggaagaggaggccggctatggggatggatatgacgactgggaaacggacgaagatgaggaatcgttgggcgatgaagaggaagaagaggaggaggaagaggaggaagttctggaaagctgcatggtgggggtggctagagactctgtgaagaggaagggagacctctccctgcggccagaggatggcgtgtgggcgctgcgcctctcctcctccggcatctgggccaacaccagccccgaggctgagcttttcccagcactgcggccccggagagtgggcatcgccctggattatgaagggggcaccgtgactttcaccaacgcagagtcacaggaactcatctacaccttcactgccaccttcacccggcgcctggtccccttcctgtggctcaagtggccaggaacacgcctcctgctaagaccctgagccctgacatctgcccccagccccaaccctcagatgcttcacttctttggaattccaggactctcaatggggggacgggatgcctggcctaagcacctggagcaggggaccccatatccactggtagccacctccccattgctgtggccccctgaaatctcactcagtgctgttgctccatctactgccctaatggggctcttttcccacctcctgctggtttcccgagggaacttctgaccctggagtccatgagggctcctttcctttttgaccacgaccttggccccagctctgcactctctggaataagggcccgatgcagcattttcttgcccagtgtggcaagacctcagaaaaaccagtcaattacgcctaagatcattttgctgtccttaaaccccccaggttccttcttgcacaaatccactctgctgcccaccttccctggcattttaaacagacctaccccaccccaactcagagttaagcatacatggcaatgctgaaaataaacaaaatccactgaggcttcccaggccatttaaagcctggagtaccagcgcatatcatctcatggggtccagagtggagtccaggcttctctgaaaccagggctgagcatatttccatagccaaggaggtgggactccctggagctatctgtggtcttagggaaggatccagacatacacggctttggggtacaagctgtgatcactgatcaataaattatctctagattggtccttgtgaggggagttttaagaatccagaacatcttgctcttgatcagcacatccaaaaacaccaagacaaacatccagtggagcagaacctctcctgcctcgggagttctgaccaggttccccagcagggtgttaagcctctgtctctggccctaccagcatccaggttccactttcctaggagagagtggagatgggaagacagggaaaggaaggcagcaggaggccacaagcccaccaggtcttcatgtcaagagagggagtaacatgtcttctcattgcccacggacccaacctctgtccaggtgcccctcatcatcacagtttaacacaagctcccctgctccagccaaattgatctcccagtcttgtccttacccattccaagtgctctgccagcccctgttcatccaagttttaagtcctccaccctgttctaagagactgttccaacggctctgggcctcagtggtcacttgaccaccattgtctcagagctgcccactttgtgtgtgtcacatgctgcctgagtcacacgtacatcttatttctgcctctagttttgtaagctcctggagggcggataacatcttatactactcttgtattctcatggcacctagtgcagtgctgggcacagagtaggtgctcaataaagacttgttgaatgaa

SEQ ID NO: 22289 - DNA, 1124 bp, Homo sapiens
  misc_feature 1..1124: note = ENST00000423901
  source 1..1124: mol_type = unassigned DNA; mol_type = unassigned DNA
acggggcggggacgagctgtcgcgctggttgctcgtgcaggagcgggacccggaacagaccgccgtgagagaggaggggcgccggccgggattcgcggcccggagctcgggaccggagtcaggaatggagagaagggtaatggttttacctcttattgtggaaacctgttgagatcacagagaatatactgacggcataaaagggcagaaccatagcagggtgcggttgcttcattccagcctcgcagtcacctctgtgccctgctggttgtcttcccagcgctgctgtagttgccttccatggatctataggagagcaagtcctccaggagaagaagtcctcaccagtgaacggagacctctctgaactaaggataccatggccacgtcagccccactacggagcctggaagaggaggtgacctgctccatctgtcttgattacctgcgggaccctgtgaccattgactgtggccacgtcttctgccgcagctgcaccacagacgtccgccccatctcagggagccgccccgtctgcccactctgcaagaagccttttaagaaggagaacatccgacccgtgtggcaactggccagcctggtggagaacattgagcggctgaaggtggacaagggcaggcagccgggagaggtgacccgggagcagcaggatgcaaagttgtgcgagcgacaccgagagaagctgcactactactgtgaggacgacgggaagctgctgtgcgtgatgtgccgggagtcccgggagcacaggccccacacggccgtcctcatggagaaggccgcccagccccacagggaaaaaatcctgaaccacctgagtaccctaaggagggacagagacaaaattcagggcttccaggcaaagggagaagctgatatcctggccgcgctgaagaagctccaggaccagaggcagtacattgtggctgagtttgagcagggtcatcagttcctgagggagcgggaggaacacctgctggaacagctggcgaagctggagcaggagctcacggagggcagggagaagttcaagagccggggcgtcggggagcttgcccggctggccctggtcatctccgaactggagggcaaggcgcagcagc

SEQ ID NO: 22290 - DNA, 682 bp, Homo sapiens; identical to SEQ ID NO: 22268
  misc_feature 1..682: note = ENST00000444979
  source 1..682: mol_type = unassigned DNA; mol_type = unassigned DNA

SEQ ID NO: 22291 - DNA, 603 bp, Homo sapiens; identical to SEQ ID NO: 22257
  misc_feature 1..603: note = ENST00000415789
  source 1..603: mol_type = unassigned DNA; mol_type = unassigned DNA

SEQ ID NO: 22292 - DNA, 582 bp, Homo sapiens
  misc_feature 1..582: note = ENST00000447942
  source 1..582: mol_type = unassigned DNA; mol_type = unassigned DNA
aacagaccgccgtgagagaggaggggcgccggccgggattcgcggcccggagctcgggaccggagtcaggaatggagagaagggtaatggttttacctcttattgtggaaacctgttgagatcacagagaatatactgacggcataaaagggcagaaccatagcagggtgcgaagtcctcaccagtgaacggagacctctctgaactaaggataccatggccacgtcagccccactacggagcctggaagaggaggtgacctgctccatctgtcttgattacctgcgggaccctgtgaccattgactgtggccacgtcttctgccgcagctgcaccacagacgtccgccccatctcagggagccgccccgtctgcccactctgcaagaagccttttaagaaggagaacatccgacccgtgtggcaactggccagcctggtggagaacattgagcggctgaaggtggacaagggcaggcagccgggagaggtgacccgggagcagcaggatgcaaagttgtgcgagcgacaccgagagaagctgcactactactgtgaggacgacgggaagctgctgtgcgtg

SEQ ID NO: 22293 - DNA, 502 bp, Homo sapiens
  misc_feature 1..502: note = ENST00000477353
  source 1..502: mol_type = unassigned DNA; mol_type = unassigned DNA
acagaccgccgtgagagaggaggggcgccggccgggattcgcggcccggagctcgggaccggagtcaggaatggagagaagggtaatggttttacctcttattgtggaaacctgttgagatcacagagaatatactgacggcataaaagggcagaaccatagcagggtgcggttgcttcattccagcctcgcagtcacctctgtgccctgctggttgtcttcccagcgctgctgtagttgccttccatggatctataggagagcaagtcctccagctgcaccacagacgtccgccccatctcagggagccgccccgtctgcccactctgcaagaagccttttaagaaggagaacatccgacccgtgtggcaactggccagcctggtggagaacattgagcggctgaaggtggacaagggcaggcagccgggagaggtgacccgggagcagcaggatgcaaagttgtgcgagcgacaccgagagaagctgcactactactgtg

SEQ ID NO: 22294 - DNA, 3114 bp, Homo sapiens; identical to SEQ ID NO: 22269
  misc_feature 1..3114: note = ENST00000487616
  source 1..3114: mol_type = unassigned DNA; mol_type = unassigned DNA

SEQ ID NO: 22295 - DNA, 3250 bp, Homo sapiens; identical to SEQ ID NO: 22270
  misc_feature 1..3250: note = ENST00000433314
  source 1..3250: mol_type = unassigned DNA; mol_type = unassigned DNA

SEQ ID NO: 22296 - DNA, 3478 bp, Homo sapiens; identical to SEQ ID NO: 22279
  misc_feature 1..3478: note = ENST00000447711
  source 1..3478: mol_type = unassigned DNA; mol_type = unassigned DNA

SEQ ID NO: 22297 - DNA, 3318 bp, Homo sapiens; identical to SEQ ID NO: 22272
  misc_feature 1..3318: note = ENST00000456093
  source 1..3318: mol_type = unassigned DNA; mol_type = unassigned DNA

SEQ ID NO: 22298 - DNA, 1124 bp, Homo sapiens; identical to SEQ ID NO: 22273
  misc_feature 1..1124: note = ENST00000438785
  source 1..1124: mol_type = unassigned DNA; mol_type = unassigned DNA

SEQ ID NO: 22299 - DNA, 682 bp, Homo sapiens; identical to SEQ ID NO: 22268
  misc_feature 1..682: note = ENST00000415966
  source 1..682: mol_type = unassigned DNA; mol_type = unassigned DNA

SEQ ID NO: 22300 - DNA, 603 bp, Homo sapiens; identical to SEQ ID NO: 22274
  misc_feature 1..603: note = ENST00000433836
  source 1..603: mol_type = unassigned DNA; mol_type = unassigned DNA

SEQ ID NO: 22301 - DNA, 582 bp, Homo sapiens; identical to SEQ ID NO: 22275
  misc_feature 1..582: note = ENST00000429583
  source 1..582: mol_type = unassigned DNA; mol_type = unassigned DNA

SEQ ID NO: 22302 - DNA, 502 bp, Homo sapiens; identical to SEQ ID NO: 22276
  misc_feature 1..502: note = ENST00000486529
  source 1..502: mol_type = unassigned DNA; mol_type = unassigned DNA

SEQ ID NO: 22303 - DNA, 3318 bp, Homo sapiens; identical to SEQ ID NO: 22272
  misc_feature 1..3318: note = ENST00000425523
  source 1..3318: mol_type = unassigned DNA; mol_type = unassigned DNA

SEQ ID NO: 22304 - DNA, 3478 bp, Homo sapiens; identical to SEQ ID NO: 22279
  misc_feature 1..3478: note = ENST00000439094
  source 1..3478: mol_type = unassigned DNA; mol_type = unassigned DNA

SEQ ID NO: 22305 - DNA, 3250 bp, Homo sapiens; identical to SEQ ID NO: 22270
  misc_feature 1..3250: note = ENST00000456770
  source 1..3250: mol_type = unassigned DNA; mol_type = unassigned DNA

SEQ ID NO: 22306 - DNA, 3114 bp, Homo sapiens; identical to SEQ ID NO: 22269
  misc_feature 1..3114: note = ENST00000471458
  source 1..3114: mol_type = unassigned DNA; mol_type = unassigned DNA

SEQ ID NO: 22307 - DNA, 1124 bp, Homo sapiens; identical to SEQ ID NO: 22273
  misc_feature 1..1124: note = ENST00000422802
  source 1..1124: mol_type = unassigned DNA; mol_type = unassigned DNA

SEQ ID NO: 22308 - DNA, 603 bp, Homo sapiens; identical to SEQ ID NO: 22274
  misc_feature 1..603: note = ENST00000453442
  source 1..603: mol_type = unassigned DNA; mol_type = unassigned DNA

SEQ ID NO: 22309 - DNA, 502 bp, Homo sapiens; identical to SEQ ID NO: 22276
  misc_feature 1..502: note = ENST00000484938
  source 1..502: mol_type = unassigned DNA; mol_type = unassigned DNA

SEQ ID NO: 22310 - DNA, 582 bp, Homo sapiens; identical to SEQ ID NO: 22275
  misc_feature 1..582: note = ENST00000440149
  source 1..582: mol_type = unassigned DNA; mol_type = unassigned DNA

SEQ ID NO: 22311 - DNA, 682 bp, Homo sapiens; identical to SEQ ID NO: 22268
  misc_feature 1..682: note = ENST00000438064
  source 1..682: mol_type = unassigned DNA; mol_type = unassigned DNA

SEQ ID NO: 22312 - DNA, 2991 bp, Homo sapiens
  misc_feature 1..2991: note = ENST00000380034
  source 1..2991: mol_type = unassigned DNA; mol_type = unassigned DNA
gcggttcctctaggaaaattcctttgtgcagatcaggcccgtggattggtgagtgaatcctaaccacgtcttccctggcctgtcttcactcttctccccagaatcaccacttctgcactggtgtctgaaggtgtattgagtgattttgtggagggcagaagtaggaagtctttgggacaaaactgtatttaccttgggatctgtgaacaagaggaacctcagcagccaggacaggcaggagcagtggaatagctactatggcttctggaatcctggttaatgtaaaggaggaggtgacctgccccatctgcctggaactcctgacacaacccctgagcctggactgcggccacagcttctgccaagcatgcctcactgcaaaccacaagaagtccatgctagacaaaggagagagtagctgccctgtgtgccggatcagttaccagcctgagaacatacggcctaatcggcatgtagccaacatagtggagaagctcagggaggtcaagttgagcccagaggggcagaaagttgatcattgtgcacgccatggagagaaacttctactcttctgtcaggaggacgggaaggtcatttgctggctttgtgagcggtctcaggagcaccgtggtcaccacacgttcctcacagaggaggttgcccgggagtaccaagtgaagctccaggcagctctggagatgctgaggcagaagcagcaggaagctgaagagttagaagctgacatcagagaagagaaagcttcctggaagactcaaatacagtatgacaaaaccaacgtcttggcagattttgagcaactgagagacatcctggactgggaggagagcaatgagctgcaaaacctggagaaggaggaggaagacattctgaaaagccttacgaactctgaaactgagatggtgcagcagacccagtccctgagagagctcatctcagatctggagcatcggctgcaggggtcagtgatggagctgcttcagggtgtggatggcgtcataaaaaggacggagaacgtgaccttgaagaagccagaaacttttccaaaaaatcaaaggagagtgtttcgagctcctgatctgaaaggaatgctagaagtgtttagagagctgacagatgtccgacgctactgggttgatgtgacagtggctccaaacaacatttcatgtgctgtcatttctgaagataagagacaagtgagctctccgaaaccacagataatatatggggcacgagggacaagataccagacatttgtgaatttcaattattgtactggcatcctgggctctcaaagtatcacatcagggaaacattactgggaggtagacgtgtccaagaaaactgcttggatcctgggggtatgtgctggcttccaacctgatgcaatgtgtaatattgaaaaaaatgaaaattatcaacctaaatacggctactgggttatagggttagaggaaggagttaaatgtagtgctttccaggatagttccttccatactccttctgttcctttcattgtgcccctctctgtgattatttgtcctgatcgtgttggagttttcctagactatgaggcttgcactgtctcattcttcaatatcacaaaccatggatttctcatctataagttttctcactgttctttttctcagcctgtatttccatatttaaatcctagaaaatgtggagtccccatgactctgtgctcaccaagctcttgaaccttcttacacactcagccccttctgtacagcacctcttgtccaggtgcatctcatacacctgaactcatttgcatcattttaaccatcttttccttgctgtctcccttctttctatttgaacgtccttcactcatcagtaaaatgtaataattgccttgtgccatattgtccccaatattttattgacatttgatagcaatttttttcatcattttccgtactcctaaggaaaactgacctatacctcataaaatgagaccgctatttaggtattacttctgccagatatttatcacccaattgcctctgacactgactaagaagatgaagaaaagcttttcaacagcctttctatatcatcgtgtgataattgttcaccaatgaatgagtccttagccctgtgtcagtttaccctcgatgcccttatttgtgagttaaagagaaaatatcataaatggtatactcttaagtatagaggttttgtatctagaggatctcagttcaactcctgtctctccatataccagcagtgtaactgtgaataacatacttaaatggctgtgcttatttccttttcttttcttttttctttttttttttttttgagatgaagttttgctcttgttccccaggctggagtgcaatggcacgatctcggttcactgcaacctccacctctcagattcaagcaattctcctgcctcagcctcccaagtagctgggattacaggtgcccaccaccacccctggctaaatttgtattttcagtagagacggggtttccccatgttggttaggctcgtctagaacctctgacctcaggtgatccacccgcctcggcctcccaaagtgctgggattacaggcgtgagccacggcgcccagcctgtgcttattttcttaaaataatttttgtattaaaaacttcacattaaataagtgctaatgttttattgcatagtagggtgactagagttaacaataacctattgcatatattttgaaatagctagaagagaggattttgaaagttctcaacacaaagaaatgacacatatttgaggtgatggatatgctaattaccctggttcggttattacgcaatgtatacatgtatcaaaacatcacactgtaccacataaatatgtatatttattatttgtcaattaaaagcaaaataaaacaaaaaaccttcatctaatactttggatcattgtgaaaaaataaattcctgaagtataaagcatcta

SEQ ID NO: 22313 - DNA, 2290 bp, Homo sapiens
  misc_feature 1..2290: note = ENST00000380027
  source 1..2290: mol_type = unassigned DNA; mol_type = unassigned DNA
atttccttctagaagccaggagcaaaggacagacctctctctggtataaggaggaagagattgagaagaggaattctccagagtctattaactatactacatcaacgcctccaagatactatggtacccatcccaggggaagtggggctacaagaacagtataaatatctcctattggcataataaatggtgtaccccaagaatatgccaagggatgttttgtagagattttgagactaaggagatttggaaattgtgtggctattagcagtttcattcataatgaaatttataatcccttaaaaaacttggaggaagataattgcaggaagaacaccttgaataagcagaactcagctgtgagatcaggagcaagaggagcacattggaagaatttcgaaaaagggcaccttttctaatttttaatacttggctgggttaatctgaaactatgtcagaagaagtggcatgataacaagatcctgagactcaagagaaaagggagattgagtgggaatgcctctagttcccacggctcctcctgtgaacagcacagctacacggcccggctgattcattcagagggcgggactcaccaggccctacgtggagaaatgccattggcccatagtttatctttcactttcctgccctgagtgtgagcaagaatttcctgcggttcctctaggaaaattcctttgtgcagatcaggcccgtggattgggatctgtgaacaagaggaacctcagcagccaggacaggcaggagcagtggaatagctactatggcttctggaatcctggttaatgtaaaggaggaggtgacctgccccatctgcctggaactcctgacacaacccctgagcctggactgcggccacagcttctgccaagcatgcctcactgcaaaccacaagaagtccatgctagacaaaggagagagtagctgccctgtgtgccggatcagttaccagcctgagaacatacggcctaatcggcatgtagccaacatagtggagaagctcagggaggtcaagttgagcccagaggggcagaaagttgatcattgtgcacgccatggagagaaacttctactcttctgtcaggaggacgggaaggtcatttgctggctttgtgagcggtctcaggagcaccgtggtcaccacacgttcctcacagaggaggttgcccgggagtaccaagtgaagctccaggcagctctggagatgctgaggcagaagcagcaggaagctgaagagttagaagctgacatcagagaagagaaagcttcctggaagactcaaatacagtatgacaaaaccaacgtcttggcagattttgagcaactgagagacatcctggactgggaggagagcaatgagctgcaaaacctggagaaggaggaggaagacattctgaaaagccttacgaactctgaaactgagatggtgcagcagacccagtccctgagagagctcatctcagatctggagcatcggctgcaggggtcagtgatggagctgcttcagggtgtggatggcgtcataaaaaggacggagaacgtgaccttgaagaagccagaaacttttccaaaaaatcaaaggagagtgtttcgagctcctgatctgaaaggaatgctagaagtgtttagagagctgacagatgtccgacgctactggggctggagtgcaatggcacgatctcggttcactgcaacctccacctctcagattcaagcaattctcctgcctcagcctcccaagtagctgggattacaggtgcccaccaccacccctggctaaatttgtattttcagtagagacggggtttccccatgttggttaggctcgtctagaacctctgacctcaggtgatccacccgcctcggcctcccaaagtgctgggattacaggcgtgagccacggcgcccagcctgtgcttattttcttaaaataatttttgtattaaaaacttcacattaaataagtgctaatgttttattgcatagtagggtgactagagttaacaataacctattgcatatattttgaaatagctagaagagaggattttgaaagttctcaacacaaagaaatgacacatatttgaggtgatggatatgctaattaccctggttcggttattacgcaatgtatacatgtatcaaaacatcacactgtaccacataaatatgtatatttattatttgtcaattaaaagcaaaataaaacaaaaaaccttcatctaatactttggatcattgtgaaaaaataaattcctgaagtataaag

SEQ ID NO: 22314 - DNA, 2759 bp, Homo sapiens
  misc_feature 1..2759: note = ENST00000433961
  source 1..2759: mol_type = unassigned DNA; mol_type = unassigned DNA
gtgaacaagaggaacctcagcagccaggacaggcaggagcagtggaatagctactatggcttctggaatcctggttaatgtaaaggaggaggtgacctgccccatctgcctggaactcctgacacaacccctgagcctggactgcggccacagcttctgccaagcatgcctcactgcaaaccacaagaagtccatgctagacaaaggagagagtagctgccctgtgtgccggatcagttaccagcctgagaacatacggcctaatcggcatgtagccaacatagtggagaagctcagggaggtcaagttgagcccagaggggcagaaagttgatcattgtgcacgccatggagagaaacttctactcttctgtcaggaggacgggaaggtcatttgctggctttgtgagcggtctcaggagcaccgtggtcaccacacgttcctcacagaggaggttgcccgggagtaccaagtgaagctccaggcagctctggagatgctgaggcagaagcagcaggaagctgaagagttagaagctgacatcagagaagagaaagcttcctggaagactcaaatacagtatgacaaaaccaacgtcttggcagattttgagcaactgagagacatcctggactgggaggagagcaatgagctgcaaaacctggagaaggaggaggaagacattctgaaaagccttacgaactctgaaactgagatggtgcagcagacccagtccctgagagagctcatctcagatctggagcatcggctgcaggggtcagtgatggagctgcttcaggacggagaacgtgaccttgaagaagccagaaacttttccaaaaaatcaaaggagagtgtttcgagctcctgatctgaaaggaatgctagaagtgtttagagagctgacagatgtccgacgctactgggttgatgtgacagtggctccaaacaacatttcatgtgctgtcatttctgaagataagagacaagtgagctctccgaaaccacagataatatatggggcacgagggacaagataccagacatttgtgaatttcaattattgtactggcatcctgggctctcaaagtatcacatcagggaaacattactgggaggtagacgtgtccaagaaaactgcttggatcctgggggtatgtgctggcttccaacctgatgcaatgtgtaatattgaaaaaaatgaaaattatcaacctaaatacggctactgggttatagggttagaggaaggagttaaatgtagtgctttccaggatagttccttccatactccttctgttcctttcattgtgcccctctctgtgattatttgtcctgatcgtgttggagttttcctagactatgaggcttgcactgtctcattcttcaatatcacaaaccatggatttctcatctataagttttctcactgttctttttctcagcctgtatttccatatttaaatcctagaaaatgtggagtccccatgactctgtgctcaccaagctcttgaaccttcttacacactcagccccttctgtacagcacctcttgtccaggtgcatctcatacacctgaactcatttgcatcattttaaccatcttttccttgctgtctcccttctttctatttgaacgtccttcactcatcagtaaaatgtaataattgccttgtgccatattgtccccaatattttattgacatttgatagcaatttttttcatcattttccgtactcctaaggaaaactgacctatacctcataaaatgagaccgctatttaggtattacttctgccagatatttatcacccaattgcctctgacactgactaagaagatgaagaaaagcttttcaacagcctttctatatcatcgtgtgataattgttcaccaatgaatgagtccttagccctgtgtcagtttaccctcgatgcccttatttgtgagttaaagagaaaatatcataaatggtatactcttaagtatagaggttttgtatctagaggatctcagttcaactcctgtctctccatataccagcagtgtaactgtgaataacatacttaaatggctgtgcttatttccttttcttttcttttttctttttttttttttttgagatgaagttttgctcttgttccccaggctggagtgcaatggcacgatctcggttcactgcaacctccacctctcagattcaagcaattctcctgcctcagcctcccaagtagctgggattacaggtgcccaccaccacccctggctaaatttgtattttcagtagagacggggtttccccatgttggttaggctcgtctagaacctctgacctcaggtgatccacccgcctcggcctcccaaagtgctgggattacaggcgtgagccacggcgcccagcctgtgcttattttcttaaaataatttttgtattaaaaacttcacattaaataagtgctaatgttttattgcatagtagggtgactagagttaacaataacctattgcatatattttgaaatagctagaagagaggattttgaaagttctcaacacaaagaaatgacacatatttgaggtgatggatatgctaattaccctggttcggttattacgcaatgtatacatgtatcaaaacatcacactgtaccacataaatatgtatatttattatttgtcaattaaaagcaaaataaaacaaaaaaccttcatctaatactttggatcattgtgaaaaaataaattcctgaagtataaa

SEQ ID NO: 22315 - DNA, 3170 bp, Homo sapiens
  misc_feature 1..3170: note = ENST00000396847
  source 1..3170: mol_type = unassigned DNA; mol_type = unassigned DNA
ctttgtgcagatcaggcccgtggattggtgagtgaatcctaaccacgtcttccctggcctgtcttcactcttctccccagaatcaccacttctgcactggtgtctgaaggtgtattgagtgattttgtggagggcagaagtaggaagtctttgggacaaaactgtatttaccttgggatctgtgaacaagaggaacctcagcagccaggacaggcaggagcagtggaatagctactatggcttctggaatcctggttaatgtaaaggaggaggtgacctgccccatctgcctggaactcctgacacaacccctgagcctggactgcggccacagcttctgccaagcatgcctcactgcaaaccacaagaagtccatgctagacaaaggagagagtagctgccctgtgtgccggatcagttaccagcctgagaacatacggcctaatcggcatgtagccaacatagtggagaagctcagggaggtcaagttgagcccagaggggcagaaagttgatcattgtgcacgccatggagagaaacttctactcttctgtcaggaggacgggaaggtcatttgctggctttgtgagcggtctcaggagcaccgtggtcaccacacgttcctcacagaggaggttgcccgggagtaccaagtgaagctccaggcagctctggagatgctgaggcagaagcagcaggaagctgaagagttagaagctgacatcagagaagagaaagcttcctggaagactcaaatacagtatgacaaaaccaacgtcttggcagattttgagcaactgagagacatcctggactgggaggagagcaatgagctgcaaaacctggagaaggaggaggaagacattctgaaaagccttacgaactctgaaactgagatggtgcagcagacccagtccctgagagagctcatctcagatctggagcatcggctgcaggggtcagtgatggagctgcttcagggtgtggatggcgtcataaaaaggacggagaacgtgaccttgaagaagccagaaacttttccaaaaaatcaaaggagagtgtttcgagctcctgatctgaaaggaatgctagaagtgtttagagagctgacagatgtccgacgctactggggtaaggagaagtcacattatcataagccaccctgcggcttatcattattattatctttatcttttagaattttatgttctctattaggctcatgttttaagatttatgattctccttccaagacacacataacttacccctccttataacttctaaacaaggttcctcccagttttctctcaagtctttatcaagatttctctcatatcacaaataaagttacattatatcccttagctgacctgttaatttttctacagttgatgtgacagtggctccaaacaacatttcatgtgctgtcatttctgaagataagagacaagtgagctctccgaaaccacagataatatatggggcacgagggacaagataccagacatttgtgaatttcaattattgtactggcatcctgggctctcaaagtatcacatcagggaaacattactgggaggtagacgtgtccaagaaaactgcttggatcctgggggtatgtgctggcttccaacctgatgcaatgtgtaatattgaaaaaaatgaaaattatcaacctaaatacggctactgggttatagggttagaggaaggagttaaatgtagtgctttccaggatagttccttccatactccttctgttcctttcattgtgcccctctctgtgattatttgtcctgatcgtgttggagttttcctagactatgaggcttgcactgtctcattcttcaatatcacaaaccatggatttctcatctataagttttctcactgttctttttctcagcctgtatttccatatttaaatcctagaaaatgtggagtccccatgactctgtgctcaccaagctcttgaaccttcttacacactcagccccttctgtacagcacctcttgtccaggtgcatctcatacacctgaactcatttgcatcattttaaccatcttttccttgctgtctcccttctttctatttgaacgtccttcactcatcagtaaaatgtaataattgccttgtgccatattgtccccaatattttattgacatttgatagcaatttttttcatcattttccgtactcctaaggaaaactgacctatacctcataaaatgagaccgctatttaggtattacttctgccagatatttatcacccaattgcctctgacactgactaagaagatgaagaaaagcttttcaacagcctttctatatcatcgtgtgataattgttcaccaatgaatgagtccttagccctgtgtcagtttaccctcgatgcccttatttgtgagttaaagagaaaatatcataaatggtatactcttaagtatagaggttttgtatctagaggatctcagttcaactcctgtctctccatataccagcagtgtaactgtgaataacatacttaaatggctgtgcttatttccttttcttttcttttttctttttttttttttttgagatgaagttttgctcttgttccccaggctggagtgcaatggcacgatctcggttcactgcaacctccacctctcagattcaagcaattctcctgcctcagcctcccaagtagctgggattacaggtgcccaccaccacccctggctaaatttgtattttcagtagagacggggtttccccatgttggttaggctcgtctagaacctctgacctcaggtgatccacccgcctcggcctcccaaagtgctgggattacaggcgtgagccacggcgcccagcctgtgcttattttcttaaaataatttttgtattaaaaacttcacattaaataagtgctaatgttttattgcatagtagggtgactagagttaacaataacctattgcatatattttgaaatagctagaagagaggattttgaaagttctcaacacaaagaaatgacacatatttgaggtgatggatatgctaattaccctggttcggttattacgcaatgtatacatgtatcaaaacatcacactgtaccacataaatatgtatatttattatttgtcaattaaaagcaaaataaaacaaaaaa

SEQ ID NO: 22316 - DNA, 767 bp, Homo sapiens
  misc_feature 1..767: note = ENST00000438025
  source 1..767: mol_type = unassigned DNA; mol_type = unassigned DNA
gtggtcaccacacgttcctcacagaggaggttgcccgggagtaccaagtgaagctccaggcagctctggagatgctgaggcagaagcagcaggaagctgaagagttagaagctgacatcagagaagagaaagcttcctggaagactcaaatacagtatgacaaaaccaacgtcttggcagattttgagcaactgagagacatcctggactgggaggagagcaatgagctgcaaaacctggagaaggaggaggaagacattctgaaaagccttacgaactctgaaactgagatggtgcagcagacccagtccctgagagagctcatctcagatctggagcatcggctgcaggggtcagtgatggagctgcttcagggtgtggatggcgtcataaaaagagctgacagatgtccgacgctactggggctggagtgcaatggcacgatctcggttcactgcaacctccacctctcagattcaagcaattctcctgcctcagcctcccaagtagctgggattacaggtgcccaccaccacccctggctaaatttgtattttcagtagagacggggtttccccatgttggttaggctcgtctagaacctctgacctcaggtgatccacccgcctcggcctcccaaagtgctgggattacaggcgtgagccacggcgcccagcctgtgcttattttcttaaaataatttttgtattaaaaacttcacattaaataagtgctaatgttttattgcatagtagggtgactagagt

SEQ ID NO: 22317 - DNA, 918 bp, Homo sapiens
  misc_feature 1..918: note = ENST00000483835
  source 1..918: mol_type = unassigned DNA; mol_type = unassigned DNA
ggaggacgggaaggtcatttgctggctttgtgagcggtctcaggagcaccgtggtcaccacacgttcctcacagaggaggttgcccgggagtaccaagtgaagctccaggcagctctggagatgctgaggcagaagcagcaggaagctgaagagttagaagctgacatcagagaagagaaagcttcctggaagactcaaatacagtatgacaaaaccaacgtcttggcagattttgagcaactgagagacatcctggactgggaggagagcaatgagctgcaaaacctggagaaggaggaggaagacattctgaaaagccttacgaactctgaaactgagatggtgcagcagacccagtccctgagagagctcatctcagatctggagcatcggctgcaggggtcagtgatggagctgcttcagggtgtggatggcgtcataaaaaggacggagaacgtgaccttgaagaagccagaaacttttccaaaaaatcaaaggagagtgtttcgagctcctgatctgaaaggaatgctagaagtgtttagagagctgacagatgtccgacgctactgggttgatgtgacagtggctccaaacaacatttcatgtgctgtcatttctgaagataagagacaagtgagctctccgaaaccacagataatatatggggcacgagggacaagataccagacatttgtgaatttcaattattgtactggcatcctgggctctcaaagtatcacatcagggaaacattactgggaggtagacgtgtccaagaaaactgcttggatcctgggggctggagtgcaatggcacgatctcggttcactgcaacctccacctctcagattcaagcaattctcctgcctcagcctcccaagtagctgggattacaggtgcccaccaccacccct

SEQ ID NO: 22318 - DNA, 662 bp, Homo sapiens
  misc_feature 1..662: note = ENST00000492086
  source 1..662: mol_type = unassigned DNA; mol_type = unassigned DNA
gaggcagaagcagcaggaagctgaagagttagaagctgacatcagagaagagaaagcttcctggaagactcaaatacagtatgacaaaaccaacgtcttggcagattttgagcaactgagagacatcctggactgggaggagagcaatgagctgcaaaacctggagaaggaggaggaagacattctgaaaagccttacgaactctgaaactgagatggtgcagcagacccagtccctgagagagctcatctcagatctggagcatcggctgcaggggtcagtgatggagctgcttcaggacggagaacgtgaccttgaagaagccagaaacttttccaaaaaatcaaaggagagtgtttcgagctcctgatctgaaaggaatgctagaagtgtttagagagctgacagatgtccgacgctactggggtaaggagaagtcacattatcataagccaccctgcggcttatcattattattatctttatcttttagaattttatgttctctattaggctcatgttttaagatttatgattctccttccaagacacacataacttacccctccttataacttctaaacaaggttcctcccagttttctctcaagtctttatcaagatttctctcatatcacaaataaagttacattatatccctta

SEQ ID NO: 22319 - DNA, 602 bp, Homo sapiens
  misc_feature 1..602: note = ENST00000465634
  source 1..602: mol_type = unassigned DNA; mol_type = unassigned DNA
gctttgtgagcggtctcaggagcaccgtggtcaccacacgttcctcacagaggaggttgcccgggagtaccaagtgaagctccaggcagctctggagatgctgaggcagaagcagcaggaagctgaagagttagaagctgacatcagagaagagaaagcttcctggaagactcaaatacagtatgacaaaaccaacgtcttggcagattttgagcaactgagagacatcctggactgggaggagagcaatgagctgcaaaacctggagaaggaggaggaagacattctgaaaagccttacgaactctgaaactgagatggtgcagcagacccagtccctgagagagctcatctcagatctggagcatcggctgcaggggtcagtgatggagctgcttcaggacggagaacgtgaccttgaagaagccagaaacttttccaaaaaatcaaaggagagtgtttcgagctcctgatctgaaaggaatgctagaagtgtttagaggtgaggagagctagatcaacaacagggttatggaattcaagtggtgttagggtgctaaatagggaagagggtgcagtttccaaatatggatagaggggata

SEQ ID NO: 22320 - DNA, 756 bp, Homo sapiens
  misc_feature 1..756: note = ENST00000487241
  source 1..756: mol_type = unassigned DNA; mol_type = unassigned DNA
gtcaagttgagcccagaggggcagaaagttgatcattgtgcacgccatggagagaaacttctactcttctgtcaggaggacgggaaggtcatttgctggctttgtgagcggtctcaggagcaccgtggtcaccacacgttcctcacagaggaggttgcccgggagtaccaagtgaagctccaggcagctctggagatgctgaggcagaagcagcaggaagctgaagagttagaagctgacatcagagaagagaaagcttcctggaagactcaaatacagtatgacaaaaccaacgtcttggcagattttgagcaactgagagacatcctggactgggaggagagcaatgagctgcaaaacctggagaaggaggaggaagacattctgaaaagccttacgaactctgaaactgagatggtgcagcagacccagtccctgagagagctcatctcagatctggagcatcggctgcaggggtcagtgatggagctgcttcaggtaaaaagtggaaagaagcctgagcactgagattaaagaaaagtgaaggctatttccttctctgcgttgctgtgctttttctaatattaacaatgttctctgcaggaccgcttttctgaatcaattgctgaagttataagaataattgaatgtagaagtagcaagagataatcccatttttattaatttatccagagcagtagaaaaatttgacgtagtggagatgatcaattagctctagtcatgtttgataggttc

SEQ ID NO: 22321 - DNA, 1054 bp, Homo sapiens
  misc_feature 1..1054: note = ENST00000412903
  source 1..1054: mol_type = unassigned DNA; mol_type = unassigned DNA
tccgttctgctggaacacaaacgcgcttctcagtttctctggaggaacttggttggcgaagagcttggcgcttcttgtaaaccttgtcccgctggacaaagacttgtgaaggaacacggagtgccaccaggactccgtggccctccccgcctctctctcctttttcccttcatggcggtgaagctgtggacgcttctcttcaggaggtgagctccagatgagacgccacatcccagcggagtcccggaagggtcaccccgcaggtctaaggcccgcctgttctgtgccgtgacctgtgctaccgaagtcatctgttgctgtagggaggccagggactcagccgatgcctcaatggccaactgcagggatctgtgaacaagaggaacctcagcagccaggacaggcaggagcagtggaatagctactatggcttctggaatcctggttaatgtaaaggaggaggtgacctgccccatctgcctggaactcctgacacaacccctgagcctggactgcggccacagcttctgccaagcatgcctcactgcaaaccacaagaagtccatgctagacaaaggagagagtagctgccctgtgtgccggatcagttaccagcctgagaacatacggcctaatcggcatgtagccaacatagtggagaagctcagggaggtcaagttgagcccagaggggcagaaagttgatcattgtgcacgccatggagagaaacttctactcttctgtcaggaggacgggaaggtcatttgctggctttgtgagcggtctcaggagcaccgtggtcaccacacgttcctcacagaggaggttgcccgggagtaccaagtgaagctccaggcagctctggagatgctgaggcagaagcagcaggaagctgaagagttagaagctgacatcagagaagagaaagcttcctggaagactcaaatacagtatgacaaaaccaacgtcttggcagattttgagcaactgagagacatcctggactgggaggagagcaatgagctgcaaaacctggagaaggaggaggaagaca

SEQ ID NO: 22322 - DNA, 607 bp, Homo sapiens
  misc_feature 1..607: note = ENST00000419850
  source 1..607: mol_type = unassigned DNA; mol_type = unassigned DNA
cctttgtgcagatcaggcccgtggattggtgagtgaatcctaaccacgtcttccctggcctgtcttcactcttctccccagaatcaccacttctgcactggtgtctgaaggtgtattgagtgattttgtggagggcagaagtaggaagtctttgggacaaaactgtatttaccttgaatgaagccgcggacgcttgcagtgagtgttacagttcttaaaggcggcatgtccggagtttcttccttctgatgttcggatgtgttcagagtttcttctttctggtgggttcgtggtctcgctggctcaggagggaagctgcagaccttcgcgggatctgtgaacaagaggaacctcagcagccaggacaggcaggagcagtggaatagctactatggcttctggaatcctggttaatgtaaaggaggaggtgacctgccccatctgcctggaactcctgacacaacccctgagcctggactgcggccacagcttctgccaagcatgcctcactgcaaaccacaagaagtccatgctagacaaaggagagagtagctgccctgtgtgccggatcagttaccagcctgagaacatacggcctaatcggcat

SEQ ID NO: 22323 - DNA, 4050 bp, Homo sapiens
  misc_feature 1..4050: note = ENST00000282369
  source 1..4050: mol_type = unassigned DNA; mol_type = unassigned DNA
tggttaacagcttatgggcggggagctcggcaaaactcagactaaaaacagaaaaagagaaaagaaaggacaaattcgatacacccgcgtcggtcctccagagtttgtgaaggggtgtaaacatgtcggagtctggggagatgagtgaatttggctacatcatggaattgatagctaaaggcaaggttaccattaagaatatcgaaagggagctcatttgcccagcatgcaaggagctgtttacccacccattgattctcccttgccaacatagtatctgtcataaatgtgtaaaagaactcctgctgactctcgatgattcattcaacgatgtgggatcagacaactccaatcaaagcagtcctcgacttcggctcccctcccctagtatggataaaattgaccgaattaacagaccaggctggaagcgcaattcattgaccccgaggacaactgttttcccttgccctggctgtgagcatgatgtggatcttggagaacgaggaatcaatggtctgtttcgaaacttcactttggaaactattgtggaaagatatcgtcaagcagctagggcagccacagccattatgtgtgacctttgtaaaccaccacctcaagaatccacaaaaagctgcatggactgtagtgcaagttactgcaatgaatgcttcaaaattcatcacccttggggtactataaaagctcaacatgagtatgttggtccaactactaacttcagacccaagattttaatgtgcccagaacatgaaacagagagaataaacatgtactgtgaattatgtaggaggccagtttgccatctgtgtaagttgggtggtaatcatgccaaccaccgtgtaaccactatgagcagtgcctacaaaaccttaaaggaaaagctttcaaaggatattgattaccttattggtaaggaaagccaggtgaagagtcaaatatctgaactaaacttgttaatgaaagaaacagagtgtaatggagagagggctaaagaagaagcaattacacattttgaaaagctctttgaagttctggaagagaggaaatcatctgttttgaaagcaattgactcctctaagaaactaagattagacaaatttcagactcaaatggaagagtaccagggacttctagagaacaatggacttgtgggatatgctcaagaagtgctaaaggagacagatcagtcttgctttgtgcagacagcaaagcagctccacctcagaatacagaaagccacagaatctttgaagagctttagacctgcagctcagacttcttttgaagactatgttgttaatacctctaaacaaacagaacttcttggagaattatcctttttctctagtggcatagacgtgccagagatcaatgaggaacagagcaaagtttataacaatgccttgataaattggcaccatccagaaaaggataaagctgatagctatgttcttgaatatcggaaaatcaatagagatgatgaaatgtcatggaatgagatagaagtgtgtggaacaagtaaaataattcaagacttggaaaacagtagtacctatgctttcagagtaagagcttacaagggttcaatctgtagtccttgcagcagagaattgattcttcatactcctccagctccagttttcagcttcctctttgatgaaaaatgtggctataataatgaacacctcctgctgaacttgaagagagaccgtgtagagagtagagctggatttaatcttctgcttgctgcagaacgcatccaagtgggttattacacaagcttagactacatcattggagatactggcattacaaaaggaaaacacttctgggccttccgtgtggaaccatattcatacctggtaaaagtgggagttgcttctagcgataaactacaagaatggctccgttctccccgggatgcagttagtccaagatatgagcaagacagtgggcatgacagtggaagtgaggatgcctgttttgattcttcacaaccatttaccttagttactataggcatgcagaaattttttatacccaagtcacctacttcttctaatgaacctgaaaatagagttctccctatgccaacaagtattgggattttccttgactgtgataaaggcaaagtagatttctatgatatggatcagatgaaatgcctttatgaacgccaagtggactgttcacatacactgtatccagcatttgcattaatgggcagtggaggaattcagcttgaagaacccatcacagcaaaatatctggaataccaagaggacatgtagttgaaacatctgatgtgactcaggataaaaactgtaaacaaagcaatgccttagcgttaaccttcgtaactaattacatatcgctgagtgttctgtcaccccacttgtgtttgagtatgattcttcttgaaatacagaaaatctaaacagccttgtgtcttcatgtcgttgttctgcctttcacaaatgatgaaagtgaagatgttctttccaagttaatactgaagtggttaactttgcaactggactgtcttttactttatgtacaggatatctaatttatttctgtcagctggtgttgctgacactttccttatggtgggggggatacaaaagtatttattatgattctcttctgtttgacttttcatttttatatcatgtttatgtcctaagagaagatattttttaaatgccttatggataggaattagtactaagcaatgtgtcttgcatttgttttcaataggaaaacaaagttctagataggttaaaagaaaaacaccataaaagtggtagtatatttaagtggaaaattatgtattttaaagtgtgtaactattaaaaatatattgcctggaaaaggaatactactgttttgttttgttaagaccacaaactgtattgctaaggacattttaagagtctgcttagccataacactcatttaacagcatgggtagtaagcatggtttcttgcagaaaacacaaagttctcagctaacacattaaacttctcactttatatactttttttcagagaaatttatctttagtttttcttattctgtgaaaatatttgttcttatgtcaaagaattatttttcagatatattggtaaagatggactgatattaaaagtcatatttattcttttacccccttactgtgttttgtgattttcatttttggcccaattattacatatcaggttttcctgatttatatttacatgtttgaaaagttcattatatattttagtagcgttacatatattataaatttttgtaacatttaaatgttcacttatgtggcattttctgtttctcattggtaataagcatttctaatataagcaagtaaaaatacaaatttaattacttagaaatgataactaagatcacaatgactgtgtaccctttaaaatatcttttaatttgaggaattacattctatctaaattgtgtgtctgtttttgaaaggtgttgctttcaagtaggtggtttttatttaaagtacttatttttttgaggttaaaatattcagaaactacttttatgcattgtagcagtaatcatttatggaatgcttttgacatgttttaacagggtaaccaaaacttttaggcctgttttttttggttgtccttgttgttatatttttaatggaaatctgttactcaggctggtagcattaaattagctttttaccctcaactcaagtagcaaatatcatggagaacttcagtgtttagcaggctgttaatttcccatctatgaatagcactttatgatgtaggctaaactaagcaaataatgcagcgttatgtggatcattatgcaataaagctgctaaagtcacatttgtggttgatactcaagccttgtacaagcacatatgatgtagacatttttaaatgtgaagctttaacaggaataggatagctgtttcaaaccttgtgcaattgtaaataaattgtttagctgtgtttctttcatttttaataaaaaattaaaaagaa

SEQ ID NO: 22324 - DNA, 4218 bp, Homo sapiens
  misc_feature 1..4218: note = ENST00000513154
  source 1..4218: mol_type = unassigned DNA; mol_type = unassigned DNA
gtccacgccccgcggtgccccgcccaggtctctgcgcggcgccgttcccagccgcagtccgcaggagccgctgctgcagccggcagctgggcgggattcccggggtagtcgctgggagcaaagctcgcttctcccgcgcctgtgcttttgcctgccccggcttacttctccccgcgtcggtccgctggccacgtacagctgaccagctcatcttccagcttcggaccgaggctccacggccgccgcagggacccgcccaccagaccctgcgctcggtagccggtgtgagtggaacgtgccgctgatgacacctggcagaaggcagccatggagggcgatggctcagattcgccggttaccattaagaatatcgaaagggagctcatttgcccagcatgcaaggagctgtttacccacccattgattctcccttgccaacatagtatctgtcataaatgtgtaaaagaactcctgctgactctcgatgattcattcaacgatgtgggatcagacaactccaatcaaagcagtcctcgacttcggctcccctcccctagtatggataaaattgaccgaattaacagaccaggctggaagcgcaattcattgaccccgaggacaactgttttcccttgccctggctgtgagcatgatgtggatcttggagaacgaggaatcaatggtctgtttcgaaacttcactttggaaactattgtggaaagatatcgtcaagcagctagggcagccacagccattatgtgtgacctttgtaaaccaccacctcaagaatccacaaaaagctgcatggactgtagtgcaagttactgcaatgaatgcttcaaaattcatcacccttggggtactataaaagctcaacatgagtatgttggtccaactactaacttcagacccaagattttaatgtgcccagaacatgaaacagagagaataaacatgtactgtgaattatgtaggaggccagtttgccatctgtgtaagttgggtggtaatcatgccaaccaccgtgtaaccactatgagcagtgcctacaaaaccttaaaggaaaagctttcaaaggatattgattaccttattggtaaggaaagccaggtgaagagtcaaatatctgaactaaacttgttaatgaaagaaacagagtgtaatggagagagggctaaagaagaagcaattacacattttgaaaagctctttgaagttctggaagagaggaaatcatctgttttgaaagcaattgactcctctaagaaactaagattagacaaatttcagactcaaatggaagagtaccagggacttctagagaacaatggacttgtgggatatgctcaagaagtgctaaaggagacagatcagtcttgctttgtgcagacagcaaagcagctccacctcagaatacagaaagccacagaatctttgaagagctttagacctgcagctcagacttcttttgaagactatgttgttaatacctctaaacaaacagaacttcttggagaattatcctttttctctagtggcatagacgtgccagagatcaatgaggaacagagcaaagtttataacaatgccttgataaattggcaccatccagaaaaggataaagctgatagctatgttcttgaatatcggaaaatcaatagagatgatgaaatgtcatggaatgagatagaagtgtgtggaacaagtaaaataattcaagacttggaaaacagtagtacctatgctttcagagtaagagcttacaagggttcaatctgtagtccttgcagcagagaattgattcttcatactcctccagctccagttttcagcttcctctttgatgaaaaatgtggctataataatgaacacctcctgctgaacttgaagagagaccgtgtagagagtagagctggatttaatcttctgcttgctgcagaacgcatccaagtgggttattacacaagcttagactacatcattggagatactggcattacaaaaggaaaacacttctgggccttccgtgtggaaccatattcatacctggtaaaagtgggagttgcttctagcgataaactacaagaatggctccgttctccccgggatgcagttagtccaagatatgagcaagacagtgggcatgacagtggaagtgaggatgcctgttttgattcttcacaaccatttaccttagttactataggcatgcagaaattttttatacccaagtcacctacttcttctaatgaacctgaaaatagagttctccctatgccaacaagtattgggattttccttgactgtgataaaggcaaagtagatttctatgatatggatcagatgaaatgcctttatgaacgccaagtggactgttcacatacactgtatccagcatttgcattaatgggcagtggaggaattcagcttgaagaacccatcacagcaaaatatctggaataccaagaggacatgtagttgaaacatctgatgtgactcaggataaaaactgtaaacaaagcaatgccttagcgttaaccttcgtaactaattacatatcgctgagtgttctgtcaccccacttgtgtttgagtatgattcttcttgaaatacagaaaatctaaacagccttgtgtcttcatgtcgttgttctgcctttcacaaatgatgaaagtgaagatgttctttccaagttaatactgaagtggttaactttgcaactggactgtcttttactttatgtacaggatatctaatttatttctgtcagctggtgttgctgacactttccttatggtgggggggatacaaaagtatttattatgattctcttctgtttgacttttcatttttatatcatgtttatgtcctaagagaagatattttttaaatgccttatggataggaattagtactaagcaatgtgtcttgcatttgttttcaataggaaaacaaagttctagataggttaaaagaaaaacaccataaaagtggtagtatatttaagtggaaaattatgtattttaaagtgtgtaactattaaaaatatattgcctggaaaaggaatactactgttttgttttgttaagaccacaaactgtattgctaaggacattttaagagtctgcttagccataacactcatttaacagcatgggtagtaagcatggtttcttgcagaaaacacaaagttctcagctaacacattaaacttctcactttatatactttttttcagagaaatttatctttagtttttcttattctgtgaaaatatttgttcttatgtcaaagaattatttttcagatatattggtaaagatggactgatattaaaagtcatatttattcttttacccccttactgtgttttgtgattttcatttttggcccaattattacatatcaggttttcctgatttatatttacatgtttgaaaagttcattatatattttagtagcgttacatatattataaatttttgtaacatttaaatgttcacttatgtggcattttctgtttctcattggtaataagcatttctaatataagcaagtaaaaatacaaatttaattacttagaaatgataactaagatcacaatgactgtgtaccctttaaaatatcttttaatttgaggaattacattctatctaaattgtgtgtctgtttttgaaaggtgttgctttcaagtaggtggtttttatttaaagtacttatttttttgaggttaaaatattcagaaactacttttatgcattgtagcagtaatcatttatggaatgcttttgacatgttttaacagggtaaccaaaacttttaggcctgttttttttggttgtccttgttgttatatttttaatggaaatctgttactcaggctggtagcattaaattagctttttaccctcaactcaagtagcaaatatcatggagaacttcagtgtttagcaggctgttaatttcccatctatgaatagcactttatgatgtaggctaaactaagcaaataatgcagcgttatgtggatcattatgcaataaagctgctaaagtcacatttgtggttgatactcaagccttgtacaagcacatatgatgtagacatttttaaatgtgaagctttaacaggaataggatagctgtttcaaaccttgtgcaattgtaaataaattgtttagctgtgtttctttcatttttaataaaaaattaaaaaga

SEQ ID NO: 22325 - DNA, 1952 bp, Homo sapiens
  misc_feature 1..1952: note = ENST00000514154
  source 1..1952: mol_type = unassigned DNA; mol_type = unassigned DNA
atgtcggagtctggggagatgagtgaatttggctacatcatggaattgatagctaaaggcaaggctggaagcgcaattcattgaccccgaggacaactgttttcccttgccctggctgtgagcatgatgtggatcttggagaacgaggaatcaatggtctgtttcgaaacttcactttggaaactattgtggaaagatatcgtcaagcagctagggcagccacagccattatgtgtgacctttgtaaaccaccacctcaagaatccacaaaaagctgcatggactgtagtgcaagttactgcaatgaatgcttcaaaattcatcacccttggggtactataaaagctcaacatgagtatgttggtccaactactaacttcagacccaagattttaatgtgcccagaacatgaaacagagagaataaacatgtactgtgaattatgtaggaggccagtttgccatctgtgtaagttgggtggtaatcatgccaaccaccgtgtaaccactatgagcagtgcctacaaaaccttaaaggaaaagctttcaaaggatattgattaccttattggtaaggaaagccaggtgaagagtcaaatatctgaactaaacttgttaatgaaagaaacagagtgtaatggagagagggctaaagaagaagcaattacacattttgaaaagctctttgaagttctggaagagaggaaatcatctgttttgaaagcaattgactcctctaagaaactaagattagacaaatttcagactcaaatggaagagtaccagggacttctagagaacaatggacttgtgggatatgctcaagaagtgctaaaggagacagatcagtcttgctttgtgcagacagcaaagcagctccacctcagaatacagaaagccacagaatctttgaagagctttagacctgcagctcagacttcttttgaagactatgttgttaatacctctaaacaaacagaacttcttggagaattatcctttttctctagtggcatagacgtgccagagatcaatgaggaacagagcaaagtttataacaatgccttgataaattggcaccatccagaaaaggataaagctgatagctatgttcttgaatatcggaaaatcaatagagatgatgaaatgtcatggaatgagatagaagtgtgtggaacaagtaaaataattcaagacttggaaaacagtagtacctatgctttcagagtaagagcttacaagggttcaatctgtagtccttgcagcagagaattgattcttcatactcctccagctccagttttcagcttcctctttgatgaaaaatgtggctataataatgaacacctcctgctgaacttgaagagagaccgtgtagagagtagagctggatttaatcttctgcttgctgcagaacgcatccaagtgggttattacacaagcttagactacatcattggagatactggcattacaaaaggaaaacacttctgggccttccgtgtggaaccatattcatacctggtaaaagtgggagttgcttctagcgataaactacaagaatggctccgttctccccgggatgcagttagtccaagatatgagcaagacagtgggcatgacagtggaagtgaggatgcctgttttgattcttcacaaccatttaccttagttactataggcatgcagaaattttttatacccaagtcacctacttcttctaatgaacctgaaaatagagttctccctatgccaacaagtattgggattttccttgactgtgataaaggcaaagtagatttctatgatatggatcagatgaaatgcctttatgaacgccaagtggactgttcacatacactgtatccagcatttgcattaatgggcagtggaggaattcagcttgaagaacccatcacagcaaaatatctggaataccaagaggacatgtag

SEQ ID NO: 22326 - DNA, 631 bp, Homo sapiens
  misc_feature 1..631: note = ENST00000513485
  source 1..631: mol_type = unassigned DNA; mol_type = unassigned DNA
agtttaaatccattgtttctggccgggtatggtggcccggcactttgggaggccaaggtgggaggatcacctgaggtcaggagttcgagaccagcctggacaacatggctggaagcgcaattcattgaccccgaggacaactgttttcccttgccctggctgtgagcatgatgtggatcttggagaacgaggaatcaatggtctgtttcgaaacttcactttggaaactattgtggaaagatatcgtcaagcagctagggcagccacagccattatgtgtgacctttgtaaaccaccacctcaagaatccacaaaaagctgcatggactgtagtgcaagttactgcaatgaatgcttcaaaattcatcacccttggggtactataaaagctcaacatgagtatgttggtccaactactaacttcagacccaagattttaatgtgcccagaacatgaaacagagagaataaacatgtactgtgaattatgtaggaggccagtttgccatctgtgtaagttgggtggtaatcatgccaaccaccgtgtaaccactatgagcagtgcctacaaaaccttaaaggaaaagctttcaaaggatattgattaccttattggtaaggaaagccaggtg

SEQ ID NO: 22327 - DNA, 805 bp, Homo sapiens
  misc_feature 1..805: note = ENST00000515104
  source 1..805: mol_type = unassigned DNA; mol_type = unassigned DNA
ctccacggccgccgcagggacccgcccaccagaccctgcgctcggtagccggtgtgagtggaacgtgccgctgatgacacctggcagaaggcagccatggagggcgatggctcagattcgccggtgtcgaatgtgcaattcttccgaagtttctcgaggaactgcttaattgagggagccgccacatcacacttaatcagtttgtttctccctcaatgacagatgaactaaattttctcttgggttaccattaagaatatcgaaagggagctcatttgcccagcatgcaaggagctgtttacccacccattgattctcccttgccaacatagtatctgtcataaatgtgtaaaagaactcctgctgactctcgatgattcattcaacgatgtgggatcagacaactccaatcaaagcagtcctcgacttcggctcccctcccctagtatggataaaattgaccgaattaacagaccaggctggaagcgcaattcattgaccccgaggacaactgttttcccttgccctggctgtgagcatgatgtggatcttggagaacgaggaatcaatggtctgtttcgaaacttcactttggaaactattgtggaaagatatcgtcaagcagctagggcagccacagccattatgtgtgacctttgtaaaccaccacctcaagaatccacaaaaagctgcatggactgtagtgcaagttactgcaatgaatgcttcaaaattcatcacccttggggtactataaaagctcaacatgagtatgttggtccaactactaacttcagacccaagg

SEQ ID NO: 22328 - DNA, 585 bp, Homo sapiens
  misc_feature 1..585: note = ENST00000510222
  source 1..585: mol_type = unassigned DNA; mol_type = unassigned DNA
attcccggggtagtcgctgggagcaaagctcgcttctcccgcgcctgtgcttttgcctgccccggcttacttctccccgcgtcggtccgctggccacgtacagctgaccagctcatcttccagcttcggaccgaggctccacggccgccgcagggacccgcccaccagaccctgcgctcggtagccggtgtgagtggaacgtgccgctgatgacacctggcagaaggcagccatggagggcgatggctcagattcgccggctggaagcgcaattcattgaccccgaggacaactgttttcccttgccctggctgtgagcatgatgtggatcttggagaacgaggaatcaatggtctgtttcgaaacttcactttggaaactattgtggaaagatatcgtcaagcagctagggcagccacagccattatgtgtgacctttgtaaaccaccacctcaagaatccacaaaaagctgcatggactgtagtgcaagttactgcaatgaatgcttcaaaattcatcacccttggggtactataaaagctcaacatgagtatgttggtccaactactaacttcagacccaag

SEQ ID NO: 22329 - DNA, 786 bp, Homo sapiens
  misc_feature 1..786: note = ENST00000508894
  source 1..786: mol_type = unassigned DNA; mol_type = unassigned DNA
cgcagtccgcaggagccgctgctgcagccggcagctgggcgggattcccggggtagtcgctgggagcaaagctcgcttctcccgcgcctgtgcttttgcctgccccggcttacttctccccgcgtcggtccgctggccacgtacagctgaccagctcatcttccagcttcggaccgaggctccacggccgccgcagggacccgcccaccagaccctgcgctcggtagccggtgtgagtggaacgtgccgctgatgacacctggcagaaggcagccatggagggcgatggctcagattcgccggttaccattaagaatatcgaaagggagctcatttgcccagcatgcaaggagctgtttacccacccattgattctcccttgccaacatagtatctgtcataaatgtgtaaaagaactcctgctgactctcgatgattcattcaacgatgtgggatcagacaactccaatcaaagcagtcctcgacttcggctcccctcccctagtatggataaaattgaccgaattaacagaccagcatcacaacggagatctgtggggtggagaggctggaagcgcaattcattgaccccgaggacaactgttttcccttgccctggctgtgagcatgatgtggatcttggagaacgaggaatcaatggtctgtttcgaaacttcactttggaaactattgtggaaagatatcgtcaagcagctagggcagccacagccattatgtgtgacctttgtaaaccaccacctcaagaatccacaaaaagctgcatgg

SEQ ID NO: 22330 - DNA, 693 bp, Homo sapiens
  misc_feature 1..693: note = ENST00000379618
  source 1..693: mol_type = unassigned DNA; mol_type = unassigned DNA
gatggggcttttttccagatcttcgcgccgagagccggggacggccaacctgccggcatgcgataaaggccggggaatgtctagctggggccgcgctgagccgagtgcggacccgctttgtgtgcgcgtttgtttgtctccgctgcggtccgaaccgctgccgcgacccccgaggaggcggggcctccgcgcgcccggctccgcctggtgagggtttcacggcctctgctgccgccgccgccgccctcgtttgttccgttagatcgcgcagccccgaccgctgcacccggatcctagcaagccgggcgaggctgcccgggagccctcgatggccttcatttcacccaagcccgcttcttgctttccccggcgcttcccctcttttcctggttaacagcttatgggcggggagctcggcaaaactcagactaaaaacagaaaaagagaaaagaaaggacaaattcgatacacccgcgtcggtcctccagagtttgtgaaggggtgtaaacatgtcggagtctggggagatgagtgaatttggctacatcatggaattgatagctaaaggcaagatgccggattggagacgaggctaccgctgcagacagggctgtgggaagacgacggaacttgccacagcgacagacttctcccaaacaggaaataaaagtgggaagcattttaaaacctaaa

SEQ ID NO: 22331 - DNA, 310 bp, Homo sapiens
  misc_feature 1..310: note = ENST00000511701
  source 1..310: mol_type = unassigned DNA; mol_type = unassigned DNA
tgtttctatttcttgtttagtatataccaatagaatggtggtaccctgcctgtctgatctcagagcaaaccaattaatatgcaccatggtcattaggacttgacccagccatgaatttaatctcttgttgggtattaggaatcaatatggaaaaagaccaagtcagcttatggagtagtatatgatttataggatgccggattggagacgaggctaccgctgcagacagggctgtgggaagacgacggaacttgccacagcgacagacttctcccaaacaggaaataaaagtgggaagcattttaaaacc

SEQ ID NO: 22332 - DNA, 1322 bp, Homo sapiens
  misc_feature 1..1322: note = ENST00000379617
  source 1..1322: mol_type = unassigned DNA; mol_type = unassigned DNA
gatggggcttttttccagatcttcgcgccgagagccggggacggccaacctgccggcatgcgataaaggccggggaatgtctagctggggccgcgctgagccgagtgcggacccgctttgtgtgcgcgtttgtttgtctccgctgcggtccgaaccgctgccgcgacccccgaggaggcggggcctccgcgcgcccggctccgcctggtgagggtttcacggcctctgctgccgccgccgccgccctcgtttgttccgttagatcgcgcagccccgaccgctgcacccggatcctagcaagccgggcgaggctgcccgggagccctcgatggccttcatttcacccaagcccgcttcttgctttccccggcgcttcccctcttttcctggttaacagcttatgggcggggagctcggcaaaactcagactaaaaacagaaaaagagaaaagaaaggacaaattcgatacacccgcgtcggtcctccagagtttgtgaaggggtgtaaacatgtcggagtctggggagatgagtgaatttggctacatcatggaattgatagctaaaggcaaggcttcagcaatgggcctgcagcaaacccatgagcattcccggttgacttctaaaggtggagaggcccgctgtccctttgaaatctctgaggttggaaagcagtctctcccaagaagaacttaggacaattcctctctctgttttgtgggggttggagggggagagttggtctggagtaggctcctaaccatttcaacgtaagcttatttcctaccactctcctcaggctcaaatcctgccccgccccgcagccccagcactagcccatttaagacccctgttttgtgtgtgattatacaggatttgaacactgaatattaaccatggaatagcagacctttgagactgacttgctttattttcctctgtggggttcggttccactttgtagttcgggtttgtaatgtaaagaataatgggaaactggtctaattatgagagttaagagagtagaggcctgtagttggcctgccctccgccccaccatccctcaaagttgagaccactgagttaaccatcctcttaatttctctcacttttcccccagatttgtttcatccttgtactggacttctcaagctctgtacataattaaaaatacatagctttacatttttacaaacttaatacctggaatatatgcttgttgtaaagtattcaaacttcacagaaaggttcacagagtaaaaagtctaagttcatgcccacctccaatctcattccttccccagtggcagcagtttgtgtgtc

SEQ ID NO: 22333 - DNA, 4615 bp, Homo sapiens
  misc_feature 1..4615: note = ENST00000543469
  source 1..4615: mol_type = unassigned DNA; mol_type = unassigned DNA
aactgtgttggtgtttgtggcttttctgaaaacacgatgaagcatcgtgaagataaatatcaaagacagtgaactaacaaccatttttatgacatgagacaataaattgaaaacattaaagataacattattttaattttagaataagaataaaagattctggaggagttggagaagagtgtattcagcccccaaaccacgagatcaacaaagaaatgcacaattttgaggaagagttaacttgtcccatatgttatagtatttttgaagatcctcgtgtactgccatgctctcatacattttgtagaaattgtttggaaaacattcttcaggcatctggtaacttttatatatggagacctttacgaattccactcaagtgccctaattgcagaagtattactgaaattgctccaactggcattgaatctttacctgttaattttgcactaagggctattattgaaaagtaccagcaagaagaccatccagatattgtcacctgccctgaacattacaggcaaccattaaatgtttactgtctattagataaaaaattagtttgtggtcattgccttaccataggtcaacatcatggtcatcctatagatgaccttcaaagtgcctatttgaaagaaaaggacactcctcaaaaactgcttgaacagttgactgacacacactggacagatcttacccatcttattgaaaagctgaaagaacaaaaatctcattctgagaaaatgatccaaggcgataaggaagctgttctccagtattttaaggagcttaatgatacattagaacagaaaaaaaaaagtttcctaacggctctctgtgatgttggcaatctaattaatcaagaatatactccacaaattgaaagaatgaaggaaatacgagagcagcagcttgaattaatggcactgacaatatctttacaagaagagtctccacttaaatttcttgaaaaagttgatgatgtacgccagcatgtacagatcttgaaacaaagaccacttcctgaggttcaacccgttgaaatttatcctcgagtaagcaaaatattgaaagaagaatggagcagaacagaaattggacaaattaagaacgttctcattcccaaaatgaaaatttctccaaaaaggatgtcatgttcctggcctgatgagggaactgacaagtgacttgtccaaggccatatagctgtgagaaaacccatgcattctcttttcagagttcatgctatcactcaactttaaagtaggccaagattaatgttggtaagggtttgtaatctgtaagaatgctaaaaacgtaagtatatatatcattttagatttgacattttgtatcttgccagtttttaggagaacttttcattttgttaagtatgcatgaatatagttgagtatatgagtaactggttcttatgctgctgttttgtatttttaccagcaggaagattgcaaaagttgatgtatgtaaatcttgaaatatttctaagttttatgtataacaaaatatgtattttaataaacttcttttgatattttatttgcactgtcttaatgagacttccatactcaggagtggtagctatgggattttcacatgggttctgggtacttctaattctttgaaacttagtactgcaggctgggtgcagtggctcatgcctatagtccagcactttgggaggctgaggcaggcagatcacttgaggccaggagtttgagaccagcttggccaacatggcaaaaccctgtctaccaaaaacacaaaaattagctgggcactgtggtgtgcacctgtagtcccagctactcatgtggctgaggcacttgaatcgcttgaacccgtgaggcagggttgcagtgagccaagatcttgccacagcactccaccctgggtgatgcagtgagactttcaaaaaaaaaaaaaaaatctgagctctactgcattggttattaaaatataataaaagtattaaattctattttcgcaccaaatgaaaacacttgattatcattatagcactttaaacttacttttcccttatatattcttgatttagaacaaattaccgtacttgaatttccgatcttgctttctttaaatctttatttaaaagtccatgctaataatgtgtttacatttttacagttacattatgatagaaactgttggattttttaaatatctaaaacaatggcccactgaagaaaggaacaattaactctttaattaattccttaggataaatacccagaaatttaacagctagggcagacttctaatacaataccgaaagtccttccaaaaaccaagtggttgccaacttatgtcccttagcattataacattcttgagccaatagtgtaaaaatacgctgacaattttataggcaaacattactcaaggtatcttactttccacttattactaaagtaattaacccctaaatagatgctcctcaacagtgggactacatcctggtaaacctatcataagttgaaactatcaagttgaaatgcatttagtacccggataaacctatcataaagttgaaaatttgtaaattgaaccagtgtaaatcagaggccatcttacttcatactcatgaagcaactatagtgggatatttttcaacttacgagatagcctaggcttgttgaaacactgtcctaatttactggctctctggtaattaagtcataaatggtcaaacatcaaattctagaaaagcatatatttaaattctcatcactataattcagaatgactggtttacaaaaatatgttcatagtatttgggtaataactgtggtgattgtctcaactggcaagctaagtggaatgccttaaagaatctatccaagattagttggcaggcatttccagtgttggtaaatcaaaggcccacgaaggtatgctgagccttgatagcacaaccttgcttaggactttgcctcaactaacatactttttagtttggcaagttacctgaccctccaggtaactcatttttctccatagtctgctacttacaagattgtcatatttttgtaatctagaagcaattatagagaatattttattagactttacaaatgacaactgcataaaacagaaaccagtttcatgatctagtttagggagtatgtattttatacaactcataatcctttacaaatagaaaaaaatcagtaatacactgaatcaacttgaagaatcttcagcataaagttcaacaaagtcccttagatgcaatttcttttggatttacagcaacactttttgttatgttgtatgtcttgtaaattccaataagtctatccgaaatctcaaacatattatttcgaagagaaattattatgaactgtgcattttttgtttgttcctaaagagaaacaaagaaaagtcaaacattaagtaataacaggtaaatcacacaaacatgtaacctcaaatattttttggacaataaacattacattgataacatgtaaaggaatgatggcaggaataattcataaaacagtatttgagtgtgaaaggaatttggttattttgacttctagtggaaaagatctaggaagatgacctaggattctagctgtgattctgctactaatttgcatttttaatttatattttactcctccaaaatggaaatatttggttcaaataaaaaataatttggtctccactgataccagaggagatggagatggagttattagacaataaagaaaaagctcaattgtaagaaataaagaattccatgtgtaatgtttaggatacccctaaaagtttctggaatgaaaatcccaaaatgattacttacatatatataaaatgcaacaatggacacatttttaaaatcaagggctgcatcaatctcatccatgaagtaaaggggagtgggcttgtagtggtgaagagcaaatactaaagccaatgaactaagtgttttctctcctcccgaaaggttgaagatctttttccaacttttcttaggtggtcgaacactgaaatgattaagaaaatcatagtcaaattacctgtaaagctaaagttaagactttgtgatttgctttccataattgagttctactatcttttttaggaatctgtaacttgcttttcacaaatatgaattctcttttctgttattttataaaaacgttattggaggatgcatacataggagcacataccaaagttttaagatttaaagagcaagctaagtattatacttcttgctattctttctccttatcaaatacaatttctcaatcctcatgttaaaaatgccttgaaaatttaagaaaagatgaactagacaaatattttgtaaatactggctgtctgcccctgtaaactgcaagcataaatagcatgcaagcaaattagtatttactagtaaatgaaacaagttgtacatcttgccttcacatcctacctccaagaaatactgagtttggagaatatgtagaaaaaggtaacagtgggattataaactcagcataattacacacctgaacatgattccttcagagaaaggatccaagctgtctacaagctcgagttcggcgtcccctcccaaagt

SEQ ID NO: 22334 - DNA, 601 bp, Homo sapiens
  misc_feature 1..601: note = ENST00000468542
  source 1..601: mol_type = unassigned DNA; mol_type = unassigned DNA
aagcgattctcctgcctcagcctcgtgagtagctggggttacaggcgcccgctaccacacccggctaatttttgtatttttagtagagacgaggtttcaccatgttggtcaggctggtctgaaactcctgaagagatccgcccacctcggcctctcaaagtgctgggattacaggcgtgagctaccgcgcccggcccgagacccctttcttgtctctgcatagcgcccacccctggcctagagcctcttcagctttccatcactaagctaagctctcacctctactttagcctcttccttacttagacttgtgttatgggcttcctccactctgattaacccatccacatgctccgatcttctcatcttcctgaagtcatttgatacctctcatctaatggttcagccttcactggaaatgcacaattttgaggaagagttaacttgtcccatatgttatagtatttttgaagatcctcgtgtactgccatgctctcatacattttgtagaaattgtttggaaaacattcttcaggcatctggtaacttttatatatggagacctttacgaattccactcaagtgccctaattgcagaagt

SEQ ID NO: 22335 - DNA, 577 bp, Homo sapiens
  misc_feature 1..577: note = ENST00000494486
  source 1..577: mol_type = unassigned DNA; mol_type = unassigned DNA
gggggcgcgacgatggagggagtggcttgggacctgcactcattccctcttgtcccatactggagtttggggagccactttcccgtccctccactgtggagctgcgttcctgtgagggaggaggccctctgtggtggcgagggtgagctgagcggacgccgccgagtcgaataagaataaaagattctggaggagttggagaagagtgtattcagcccccaaaccacgagatcaacaaagaaatgcacaattttgaggaagagttaacttgtcccatatgttatagtatttttgaagatcctcgtgtactgccatgctctcatacattttgtagaaattgtttggaaaacattcttcaggcatctggtaacttttatatatggagacctttacgaattccactcaagtgccctaattgcagaagtattactgaaattgctccaactggcattgaatctttacctgttaattttgcactaagggctattattgaaaagtaccagcaagaagaccatccagatattgtcacctgccctgaacattacaggcaaccattaaatgtttactgtctattaga

SEQ ID NO: 22336 - DNA, 576 bp, Homo sapiens
  misc_feature 1..576: note = ENST00000471155
  source 1..576: mol_type = unassigned DNA; mol_type = unassigned DNA
gcgctgtgtttccgtgctgtggagttgcctggtccgcttcctccccgcgaataagaataaaagattctggaggagttggagaagagtgtattcagcccccaaaccacgagatcaacaaattaggtccacaaagatgtgagccccagtttgggtggtggcaccacttgaattttcccatacttaaagctgactcactagaagtcttgggacaagtcatcgaattctataatgaaatgcacaattttgaggaagagttaacttgtcccatatgttatagtatttttgaagatcctcgtgtactgccatgctctcatacattttgtagaaattgtttggaaaacattcttcaggcatctggtaacttttatatatggagacctttacgaattccactcaagtgccctaattgcagaagtattactgaaattgctccaactggcattgaatctttacctgttaattttgcactaagggctattattgaaaagtaccagcaagaagaccatccagatattgtcacctgccctgaacattacaggcaaccattaaatgtttactgtctattagataaaaaat

SEQ ID NO: 22337 - DNA, 603 bp, Homo sapiens
  misc_feature 1..603: note = ENST00000496222
  source 1..603: mol_type = unassigned DNA; mol_type = unassigned DNA
gtgtttccgtgctgtggagttgcctggtccgcttcctccccgcggtgagtctaaggacctttacggatgcggagaagaataagaataaaagattctggaggagttggagaagagtgtattcagcccccaaaccacgagatcaacaaagaaatgcacaattttgaggaagagttaacttgtcccatatgttatagtatttttgaagatcctcgtgtactgccatgctctcatacattttgtagaaattgtttggaaaacattcttcaggcatctggtaacttttatatatggagacctttacgaattccactcaagtgccctaattgcagaagtattactgaaattgctccaactggcattgaatctttacctgttaattttgcactaagggctattattgaaaagtaccagcaagaagaccatccagatattgtcacctgccctgaacattacaggcaaccattaaatgtttactgtctattagataaaaaattagtttgtggtcattgccttaccataggtcaacatcatggtcatcctatagatgaccttcaaagtgcctatttgaaagaaaaggacactcctcaaaaactgcttgaacag

SEQ ID NO: 22338 - DNA, 548 bp, Homo sapiens
  misc_feature 1..548: note = ENST00000471396
  source 1..548: mol_type = unassigned DNA; mol_type = unassigned DNA
gctgtgtttccgtgctgtggagttgcctggtccgcttcctccccgcggtgagtctaaggacctttacggatgcggagaaggaaatgcacaattttgaggaagagttaacttgtcccatatgttatagtatttttgaagatcctcgtgtactgccatgctctcatacattttgtagaaattgtttggaaaacattcttcaggcatctggtaacttttatatatggagacctttacgaattccactcaagtgccctaattgcagaagtattactgaaattgctccaactggcattgaatctttacctgttaattttgcactaagggctattattgaaaagtaccagcaagaagaccatccagatattgtcacctgccctgaacattacaggcaaccattaaatgtttactgtctattagataaaaaattagtttgtggtcattgccttaccataggtcaacatcatggtcatcctatagatgaccttcaaagtgcctatttgaaagaaaaggacactcctcaaaaactgcttgaacagttgactgacaca

SEQ ID NO: 22339 - DNA, 860 bp, Homo sapiens
  misc_feature 1..860: note = ENST00000479460
  source 1..860: mol_type = unassigned DNA; mol_type = unassigned DNA
ctccccgcggtgagtctaaggacctttacggatgcggagaaggtggttctgagtcctttttcttttcctgtagcacagtctggtgtgcctagtgtgttgggcggggagtcctgggggcgcgacgatggagggagtggcttgggacctgcactcattccctcttgtcccatactggagtttggggagccactttcccgtccctccactgtggagctgcgttcctgtgagggaggaggccctctgtggtggcgaggaataagaataaaagattctggaggagttggagaagagtgtattcagcccccaaaccacgagatcaacaaagaaatgcacaattttgaggaagagttaacttgtcccatatgttatagtatttttgaagatcctcgtgtactgccatgctctcatacattttgtagaaattgtttggaaaacattcttcaggcatctggtaacttttatatatggagacctttacgaattccactcaagtgccctaattgcagaagtattactgaaattgctccaactggcattgaatctttacctgttaattttgcactaagggctattattgaaaagtaccagcaagaagaccatccagatattgtcacctgccctgaacattacaggcaaccattaaatgtttactgtctattagataaaaaattagtttgtggtcattgccttaccataggtcaacatcatggtcatcctatagatgaccttcaaagtgcctatttgaaagaaaaggacactcctcaaaaactgcttgaacagttgactgacacacactggacagatcttacccatcttattgaaaagctgaaagaacaaaaatctcattctgagaaaatgat

SEQ ID NO: 22340 - DNA, 3867 bp, Homo sapiens
  misc_feature 1..3867: note = ENST00000309784
  source 1..3867: mol_type = unassigned DNA; mol_type = unassigned DNA
agcccttcggggcagaggagggcggggactcggggcggctctcagcatccgcctggagctcgtggcgctgtgtttccgtgctgtggagttgcctggtccgcttcctccccgcgaataagaataaaagattctggaggagttggagaagagtgtattcagcccccaaaccacgagatcaacaaagaaatgcacaattttgaggaagagttaacttgtcccatatgttatagtatttttgaagatcctcgtgtactgccatgctctcatacattttgtagaaattgtttggaaaacattcttcaggcatctggtaacttttatatatggagacctttacgaattccactcaagtgccctaattgcagaagtattactgaaattgctccaactggcattgaatctttacctgttaattttgcactaagggctattattgaaaagtaccagcaagaagaccatccagatattgtcacctgccctgaacattacaggcaaccattaaatgtttactgtctattagataaaaaattagtttgtggtcattgccttaccataggtcaacatcatggtcatcctatagatgaccttcaaagtgcctatttgaaagaaaaggacactcctcaaaaactgcttgaacagttgactgacacacactggacagatcttacccatcttattgaaaagctgaaagaacaaaaatctcattctgagaaaatgatccaaggcgataaggaagctgttctccagtattttaaggagcttaatgatacattagaacagaaaaaaaaaagtttcctaacggctctctgtgatgttggcaatctaattaatcaagaatatactccacaaattgaaagaatgaaggaaatacgagagcagcagcttgaattaatggcactgacaatatctttacaagaagagtctccacttaaatttcttgaaaaagttgatgatgtacgccagcatgtacagatcttgaaacaaagaccacttcctgaggttcaacccgttgaaatttatcctcgagtaagcaaaatattgaaagaagaatggagcagaacagaaattggacaaattaagaacgttctcattcccaaaatgaaaatttctccaaaaaggatgtcatgttcctggcctggtaaggatgaaaaggaagttgaatttttaaaaattttaaacattgttgtagttacattaatttcagtaatactgatgtcgatactctttttcaaccaacacatcataacctttttaagtgaaatcactttaatatggttttctgaagcctctctatctgtttaccaaagtttatctaacagtctgcataaggtaaagaatatactgtgtcacattttctatttgttgaaggaatttgtgtggaaaatagtttcccattgaaaatgtcaacctgaattgtttaaatgggcttattctgtacattgctaaacaaaaaatggggtagcatggataaagagcaaactaagctttattagtgctgcaactaatataaacaaatgtttatatttgttgcttcttttggttagcaatgatatgtcaaagttatatctgaaatagtcaaatctttgggaaacagaatctagtaacaatttgaaaagtaatacactatcccatttttattggctttatgatggttgacataatgttgctgtgacatttaaacattcttgtaccaatattgtcttttaccattattatatactgcagttaattggctttacagttctttatatatatagcaaaatcctgaaagaacatatacctttattttgatgtggcttgaagcttttgaatgggtgaataaggatgatagaaaggtttcaaaatcaagcaacaaagtcttaaagtgataaggcatggcttaaagatcttttgatcaaacatacctgtgtttgagatagatttaagagccctaaatgcttatcaccattcactccaaataaaactattgcttttggataactgttagagtaaagtggctttttaaaagaaatttttgagactgggtctcaccttgttgcccaggctggagtgtagttgtctggtcatgactcactgcagtttcgaccacccaggctcaatcgatcctcccgcctctgcctctggagcagctgggacaaggcacacacccccatgcctggctaattaaaaaaattgttttttgtagaaacgaggttttgccatattgcccaggttggtctcaaacttctgggctcaagagatctgcccaccttggcctcccaaagtgctgggattacagacgttagccacactgtgcctgggggccagcattttctaatacttgtcatattctatagtttgtgcaaatttaagattgtttttttttctgctcgtcagtcaaatcagttcttggattaaaaactcattcttattagaacagaatcatgttggtaacttggtctgcaacaggttttgatggcatcatgtggactttattcatcttaactcatttaaattttctaccacattcccttaagctaatgcaaaagtaccaacaacttaatcttttttttttttttttttttttttttttgagacggagtcttgctctgtcgcccaggctggagtgcagtggcgtgatctcggctcattgcaagccccgcctcccgggttcacaccattctcctgcctcagcctcccgagtagctgggactacaggcatctgctaccacgcccagctaattttctgtatttttagtagagatggggtttcactgtgttagccaggatggtctctatctcctgacctcatgatccactcgcctcagcctcccaaaatgctgggattataggcgtgagccgccacgcccggcccaacaacttaatcttttattagctttgcttaagagggccaattaaatcaaagccctttagttccctttaacagggactggagttatgatgcatgtgttacgacttttggcccactgtccatgcaactctaagtgcaggttgatttgctttccagaaatcccaaaggggctgctcttggatcaccgaagagccttacctatatcaaatcaaaaagacattctgggtcagattagactatgctcctggccctacagattgcacataaactatcataaatacagctttttcagggaactagttctaaaactcttacctgctgagaataagtcttaacactaagatgactgtattatatcaatttattattagaatcagacttatacctagcacaattaactattgtgtgggcaaagaacatttaaagggcatagtagaggtaaggagagacacatactcagctagagataaaaatactaagttgcactgattacttaaaatactagtcacaccataaaagtgccctgtagtttcaaaaacacgtaagcaatgaaatgttagccattatgtgttaaactacttaatctcatttctgtgatgtgaatatttttaaccccctttttgtagatgagggaactgacaagtgacttgtccaaggccatatagctgtgagaaaacccatgcattctcttttcagagttcatgctatcactcaactttaaagtaggccaagattaatgttggtaagggtttgtaatctgtaagaatgctaaaaacgtaagtatatatatcattttagatttgacattttgtatcttgccagtttttaggagaacttttcattttgttaagtatgcatgaatatagttgagtatatgagtaactggttcttatgctgctgttttgtatttttaccagcaggaagattgcaaaagttgatgtatgtaaatcttgaaatatttctaagttttatgtataacaaaatatgtattttaataaacttcttttgatatttta

SEQ ID NO: 22341 - DNA, 3437 bp, Homo sapiens
  misc_feature 1..3437: note = ENST00000291416
  source 1..3437: mol_type = unassigned DNA; mol_type = unassigned DNA
ccactacctctagactgccctcccgggctggcgtcccacggagtctcagccgcgcaccccttcctcgcgttaccctccttccggacagcaccccctcccttctccggtagctcctacccctgcctgtgcgggcctcgtccccgcgcccagccctcggtgctgcctccgacagcgccgcgctctctcagccgcccccctgcccctcgggcccccctctctgctgcccctggcgccatggcgtgcagcctcaaggacgagctgctgtgctccatctgcctgagcatctaccaggacccggtgagcctgggctgcgagcattacttctgccgccgctgcatcacggagcactgggtgcggcaggaggcgcagggcgcccgcgactgccccgagtgccggcgcacgttcgccgagcccgcgctggcgcccagcctcaagctggccaacatcgtggagcgctacagctccttcccgctggacgccatcctcaacgcgcgccgcgccgcgcgaccctgccaggcgcacgacaaggtcaagctcttctgcctcacggaccgcgcgcttctctgcttcttctgcgacgagcctgcactgcacgagcagcatcaggtcaccggcatcgacgacgccttcgacgagctgcagagggagctgaaggaccaacttcaggcccttcaagacagcgagcgggaacacaccgaagcgctgcagctgctcaagcgacaactggcggagaccaagtcttccaccaagagcctgcggaccactatcggcgaggccttcgagcggctgcaccggctgctgcgtgaacgccagaaggccatgctagaggagctggaggcggacacggcccgcacgctgaccgacatcgagcagaaagtccagcgctacagccagcagctgcgcaaggtccaggagggagcccagatcctgcaggagcggctggctgaaaccgaccggcacaccttcctggctggggtggcctcactgtccgagcggctcaagggaaaaatccatgagaccaacctcacatatgaagacttcccgacctccaagtacacaggccccctgcagtacaccatctggaagtccctgttccaggacatccacccagtgccagccgccctaaccctggacccgggcacagcccaccagcgcctgatcctgtcggacgactgcaccattgtggcttacggcaacttgcacccacagccactgcaggactcgccaaagcgcttcgatgtggaggtgtcggtgctgggttctgaagccttcagtagtggcgtccactactgggaggtggtggtggcggagaagacccagtgggtgatcgggctggcacacgaagccgcaagccgcaagggcagcatccagatccagcccagccgcggcttctactgcatcgtgatgcacgatggcaaccagtacagcgcctgcacggagccctggacgcggcttaacgtccgggacaagcttgacaaggtgggtgtcttcctggactatgaccaaggcttgctcatcttctacaatgctgatgacatgtcctggctctacaccttccgcgagaagttccctggcaagctctgctcttacttcagccctggccagagccacgccaatggcaagaacgttcagccgctgcggatcaacaccgtccgcatctagtccaggcagaaggagaccacaacctcctgggaccactgccacctgcaagagccctgcccaggagatagaagacctggactccagcccaccgtggccactggagacctcaggccagttgtttaccctccagcctccagtctgtaaaatggaggttgcattccctacttcctaaactctcttccagcatcgatgttctgtagctctgaccttgatagggatacagctttgatccaaggatgtgacatggcttctcctcagggcaacccctgcccaaccctcatccccatcttctcaggggcaggggactaccttccagtgtctccctccagcccagccctgacctcaggaagtgtcagagcatggccagtagttggcagcccgaaagacacacagcaccctcttatgtcccatggcctaagacttacccctgaccaagctagtgatgggccatttacccttgaccccagtccacagtggtcacaggtagtacctggtcctagggttgcctgagagccaacctctcctgccacccccacaccaagaactatatggttcctacttctcccactgatctgctggtcagtgatgatgctgtggcctgtggaaggcacctggtagttgagtccacacattatagtcatgtgccaccaccttcctgcccacaggccgagggacagggtgagggtatacccaaagctgatgcagagcccattagcctaaaagcaactgcaggacaagcctccctggatgatcgaggtccccagtagctctgaacaagagtccagccaaccctcttcagccaggcctctgtgacctgctagggtgcaggaggcttccagaagcagttgttgtaattaggacccaagcactgggaggggctgttggctggaccccttgtcagacttggcatctatctcagttaggatcctgctgcagaaaacaagagccacttgtagctggtttaattagacaaggatttactacctggcccctggtggcttgcaaaattgttggaagagctggagaagcagactctgctgaatttccaggaactcccagcgccagattcatcatgtctgttgtgaccaggaaagctgcccccatctgcaggaagccactatgccagaaagctgctgactgcagaactaggctccctctgccacggtccgtgccagccaatagatgtcctgaggcctgcccctctcccacttcactcagttcccaaatctaaatttttacaagagattctgtttgggggaacttaagtcagatccagaaccttggctgcaagggagtctgggaaatgtcatttccctagaaggaagttagggtgggtggagcaagccccacctgcgtttttctgccacagcatccaatcgtgaagaactcgggagagggtggagtccacatctagggttgtcctgccccttggctctatccctgcccagaggtgggaactggaggagtgggctgcaagactgagcctaaatgtctccccggccttgacttttctttctagtcctggggcctagattctgcacttggggtctctgacacaacacaccatcccaaagtagccggaagagctaaacacagggggttcttaaaatggctgcccccgccacccgggcctcccttgggcaaaaggaattgtcagccctaccccaacccttcaactaccagaatctgggccaccccagcagtatttttatttaaaatgttgcccattttatgagttatgatcaatttgtattaaattaaagttacagatgtca

SEQ ID NO: 22342 - DNA, 1638 bp, Homo sapiens
  misc_feature 1..1638: note = ENST00000543586
  source 1..1638: mol_type = unassigned DNA; mol_type = unassigned DNA
tctcaggttcctaacccccagagaggggatccgattcagtctcagccgccccctccaggcctcatgtgaccattggagcccttcccaaggcttccttcatgccagagaagacagcagtggatcagccttggacgcaagccctgagggagctgaaggaccaacttcaggcccttcaagacagcgagcgggaacacaccgaagcgctgcagctgctcaagcgacaactggcggagaccaagtcttccaccaagagcctgcggaccactatcggcgaggccttcgagcggctgcaccggctgctgcgtgaacgccagaaggccatgctagaggagctggaggcggacacggcccgcacgctgaccgacatcgagcagaaagtccagcgctacagccagcagctgcgcaaggtccaggagggagcccagatcctgcaggagcggctggctgaaaccgaccggcacaccttcctggctggggtggcctcactgtccgagcggctcaagggaaaaatccatgagaccaacctcacatatgaagacttcccgacctccaagtacacaggccccctgcagtacaccatctggaagtccctgttccaggacatccacccagtgccagccgccctaaccctggacccgggcacagcccaccagcgcctgatcctgtcggacgactgcaccattgtggcttacggcaacttgcacccacagccactgcaggactcgccaaagcgcttcgatgtggaggtgtcggtgctgggttctgaagccttcagtagtggcgtccactactgggaggtggtggtggcggagaagacccagtgggtgatcgggctggcacacgaagccgcaagccgcaagggcagcatccagatccagcccagccgcggcttctactgcatcgtgatgcacgatggcaaccagtacagcgcctgcacggagccctggacgcggcttaacgtccgggacaagcttgacaaggtgggtgtcttcctggactatgaccaaggcttgctcatcttctacaatgctgatgacatgtcctggctctacaccttccgcgagaagttccctggcaagctctgctcttacttcagccctggccagagccacgccaatggcaagaacgttcagccgctgcggatcaacaccgtccgcatctagtccaggcagaaggagaccacaacctcctgggaccactgccacctgcaagagccctgcccaggagatagaagacctggactccagcccaccgtggccactggagacctcaggccagttgtttaccctccagcctccagtctgtaaaatggaggttgcattccctacttcctaaactctcttccagcatcgatgttctgtagctctgaccttgatagggatacagctttgatccaaggatgtgacatggcttctcctcagggcaacccctgcccaaccctcatccccatcttctcaggggcaggggactaccttccagtgtctccctccagcccagccctgacctcaggaagtgtcagagcatggccagtagttggcagcccgaaagacacacagcaccctcttatgtcccatggcctaagacttacccctgaccaagctagtgatgggccatttacccttgaccccagtccacagt

SEQ ID NO: 22343 - DNA, 806 bp, Homo sapiens
  misc_feature 1..806: note = ENST00000485148
  source 1..806: mol_type = unassigned DNA; mol_type = unassigned DNA
ggctggttccgggttgagaggctgcgctggaccgaagcggtggctgctaagctcgcggggcctcaaggacgagctgctgtgctccatctgcctgagcatctaccaggacccggtgagcctgggctgcgagcattacttctgccgccgctgcatcacggagcactgggtgcggcaggaggcgcagggcgcccgcgactgccccgagtgccggcgcacgttcgccgagcccgcgctggcgcccagcctcaagctggccaacatcgtggagcgctacagctccttcccgctggacgccatcctcaacgcgcgccgcgccgcgcgaccctgccaggcgcacgacaaggtcaagctcttctgcctcacggaccgcgcgcttctctgcttcttctgcgacgagcctgcactgcacgagcagcatcaggtcaccggcatcgacgacgccttcgacgagctgcagagggagctgaaggaccaacttcaggcccttcaagacagcgagcgggaacacaccgaagcgctgcagctgctcaagcgacaactggcggagaccaagtcttccaccaagagcctgcggaccactatcggcgaggccttcgagcggctgcaccggctgctgcgtgaacgccagaaggccatgctagaggagctggaggcggacacggcccgcacgctgaccgacatcgagcagaaagtccagcgctacagccagcagctgcgcaaggtccaggagggagcccagatcctgcaggagcggctggctgaaaccgaccggcacaccttcctggctggggtggcctcactgtccg

SEQ ID NO: 22344 - DNA, 306 bp, Homo sapiens
  misc_feature 1..306: note = ENST00000486583
  source 1..306: mol_type = unassigned DNA; mol_type = unassigned DNA
ggattcggctggttccgggttgagaggctgcgctggaccgaagcggtggctgctaagctcgcggggcgccgcgctctctcagccgcccccctgcccctcgggcccccctctctgctgcccctggcgccatggcgtgcagcctcaaggacgagctgctgtgctccatctgcctgagcatctaccaggacccggtgagcctgggctgcgagcattacttctgccgccgctgcatcacggagcactgggtgcggcaggaggcgcagggcgcccgcgactgccccgagtgccggcgcacgttcgccgagc

SEQ ID NO: 22345 - DNA, 9320 bp, Homo sapiens
  misc_feature 1..9320: note = ENST00000444294
  source 1..9320: mol_type = unassigned DNA; mol_type = unassigned DNA
gggaggggattcccgagccagccggacgctcgccctccgcccgccggctgcagcgtcgcgcggcccaaggtcagaggcgccgcaggagcagcagctgggaaccagggaagcgggtcaatcccggccgcagggagaaagccccagggcgcagtcagccggcgtccacagccgcccaggagtagggtgagcggctgtctccgggccggtcgggtcccgccgaggtggccgcggccccagcgacccggcgggtggcggcccaggggtcggcgagcaggcagctggagccccaccttcggctcccgggcgctgtccgccgcctcgtggtgctgatcccagccccacggctgagcggccttcgcacctgcctgtctcacctcgctatcaccccgataaggagttgggccggggcagaaggggggcctcggggtagccgcccaccggagccaggggctgaagcagcgagcgcacagcagcccggccgctggtcctggggtggagaggaggcgcgcgctgcagccggcggcggcgctggtgctgattcatcacctaaagctcctcgcaggccaccgcgagggcagccgaccggctccggaatctggccgcaggttgaagccgctggtgcgggaccctcgggcaggaggtgaggaccccctcccttctctcgcccctcaatcatcttagggcggtggctacaggacagagagaggggcgtgcccctcggctgtgaagtgggcatgcccgtgtgatgcccccgcccgtcgtctcaccggggcgcaccgcgctggtcctcctccgccagtctcccgagctccggccattcatccccagcgcagagcagcgctggcagccggcgccgcgatggaggaagagctgaagtgtcccgtgtgcggctctctgtttcgggagcctatcatcctgccctgttcccacaatgtctgcctgccttgcgctcgcaccatcgcggtgcagaccccggacggtgagcagcacctgccccagccgctcctgctttcccggggatcggggctgcaggcgggcgccgccgccgctgcctctctggagcacgacgctgcggctggcccggcctgcggcggtgcaggcgggagtgcagctggcggcctcggcggcggtgcgggaggtggcggagaccacgcggacaagctcagcttgtacagcgagacagacagcggctacgggtcctacaccccgagcctcaagtcccccaacggggttcgcgtgctgcccatggtgcccgcaccacccggctcctcggctgcggcggctcggggtgccgcctgctcctcgctgtcctcgtcttcgagctccatcacgtgcccgcagtgccaccgcagcgcatccctggaccaccgcggcctgcgcggcttccagcgcaaccggctgctcgaggccatcgtgcagcggtaccagcagggccgcggggccgtgccggggacgtctgcagccgcggcggtggccatctgccagctgtgcgaccgcaccccgccagagccagcagccacgctctgcgagcagtgcgacgtcctctactgctctgcctgccagctcaagtgccatccatcccggggacccttcgccaagcatcgcctggtgcagccgccgccgccgccgccgccgcccgccgaggcagcctccgggcccactggcaccgcccagggcgcccccagcggaggcggcggctgcaagagcccgggaggcgcgggggcgggggcgactgggggcagcacggcccgcaagttccccacgtgtcccgagcatgaaatggagaactacagcatgtactgcgtgagctgtcgaaccccggtgtgttatctgtgcctggaggagggccggcacgccaagcacgaggtgaagccgctgggggccatgtggaagcagcacaaggcacaactatctcaggccttaaatggagtttcagataaggcaaaggaagcaaaggagtttctggttcagctaaagaacatattgcagcagatccaggaaaacggactggactacgaagcctgcctcgttgctcagtgtgatgcccttgtggatgctttaactcgtcagaaagccaagctgctcaccaaggtgactaaagagagggaacacaagttgaagatggtttgggaccagatcaatcactgcacattgaagctgcgtcagtccaccggactgatggagtactgcctggaggtgatcaaggagaacgacccctccgggttcttacagatctcagatgctctgatcaagcgcgtccaggtgtctcaggagcagtgggtcaaaggcgccctggagccgaaagtgtctgcggagtttgatctgactttggacagcgagccgctgctgcaggccatccaccagctggacttcattcagatgaaattgccacccgtccccctactgcagctggagaaatgctgcacccgtaacaacagcgtcacgctggcctggaggatgccacccttcacccacagccccgtggacggctacatcctggagctggacgacggtgccgggggacagttccgggaagtgtacgtcggtaaggagactttgtgtaccatcgacggtcttcacttcaacagcacctacaacgcccgagtcaaagctttcaactcttctggtgtcgggccttacagtaaaactgtcgtcctgcagacatccgatgtggcctggttcacatttgaccccaactctgggcatcgggacatcattttatccaatgacaaccagacagccacctgcagcagctatgacgaccgggtggtgctgggcacagctgcgttctccaagggcgtgcactactgggagctgcacgtggaccggtacgacaaccacccagaccccgccttcggggtggccagggccagcgtggtcaaggacatgatgctgggcaaggatgacaaggcctgggccatgtatgtggacaacaaccgcagctggttcatgcactgcaactcccacaccaacaggacggaaggtggcgtgtgcaagggggccaccgtgggcgtgctgctggacctgaataagcacactctcaccttcttcatcaacgggcagcagcagggccccacagccttcagccacgtggacggggtcttcatgccagccctcagcctcaaccgcaacgtgcaggtcaccctgcacacaggattggaagtgccgactaacctggggcggccaaagctgtcaggcaattagccccgctccagctcggcactgtgcctgtgacagtgacattcacaggcaaaacgcccaccattctcactaagctcaaataacccacaaaagcaggatatgcaaatcatgggtgcaacctggcagcgtggagtgtcatagaaacacattttcttggggacgcagggaatgggtccacgggccatgctcacagctgccactgtcagtggcaaaggaaggtacgtgtgtcacccttattccacccagacattacgaacactccccaagaaggacctttctcaagggagtcagcattcgggcttcatgtctatgtttcctgccatctgttttcaaagcttgtctttttttggagggagaggaaggtagactttgagactggcctcctgagagcggcagtcaggagctgcgctgtaatcccacgccccgggtgttggccctccgtggggaccttgcctcctcagagtcccgagattgcagattctcatcatgctgagaaagttatcttttagcttcttggtcctagagtctttagtagcacctgccacttgcagacccaatgcaggattgatagaaagggacattaatcattcatgcttgacttttgcctctctcactgaagtgttagaaccttttaaaatggcttcctttattaatcagccaattgtgttctctctctctcttcctccatccttcatttcttctccctccctccttctctttctctcttcttctctctctccttccttccctcctttgctctctctttcttcctttcctccttctctcttactttcctccatccctgcctctttcttccctctttcgctctctttccctccctccttctctctctctctcacacacacacaggcatgacagtctcctaaaattaattcactcagttcttagttcttaaatccacgtgaaaacacaagaattttaacaactatgtcataggtcttcgcctggtgatggctcctttctgaaactggcagcccaagaagttaactgaaaatgcatccagattgctcttctgagctgaaccactctcagactcataagcatttaaaatgggagaccctgggaaagcctgttctagtcagtccaccctattgtcattatgaaagcatcatgaacacaagtggcccctgtggcaggccgggacggctctgccctgatgcagtgggcgggatctctggggaaggcaggaaatagaagggcagtatcaggtaccttgtctcccagcttcccactgtgagactgggtgtgccgagtctgacctgccagggcaggactctggaaacaccaggcttctcccttgagatccacattgattcatccacacctctcagagacagctcatggcaggggttttgagcctgccaggctcttgttcccagggaacccttcctctcctccctcctctcatcttcccagtcacctgccacctccagctccacctggtagtaacatttctctctccttttaaaaagaatatattttgtcaagcattttatttctgaggctgagaagtgacttgtcaatttgctggactggatttttataaaattcgcccattcaccagcaccaactgtgcgtccttggttctgccttcctgttcagacaccgcgcctgctttctgagtaactgcctgccggagccatgcaggtaccccccctccactcagcaggcccgacaatcctacctcaaagctcatgctcttggtctgcaaggctgcttggtccgctgtctctgcagatgtggccggcaaggccagctgccccgtctccaggagctgctcggtgctgtgttgcagtctctgctgcggagcctgggagctatctgcttcatggaagtctaggtcttgcctcttccttgtcatctcaccaagcggtttctgggtctcctcctcccatcccagagccctgtccagagctcttggtggtgacacacaagacctgggaccctgtgtccttgcccgcacctctgcctctgtctcccatatccctgcagcttcatccttagccatagctctgggtggcctttgcttggagcatggagacgatccctaaagattgaggatgaagaggagccaccactttcctggggccaaggaagccatcagctttgggaagtgtctagctctcttctgaaaaaaaaacaggcctacaccctgcccccagaatgagagtgggctaggcagggctgcctggtgacagcagcttctcacaggggagccctggggaaggctgtggagcctccaccatcaccacagcccaggtcaccaggtggccccagctctgcagaagaatcgcccatcattggagcacaagttgcctggggctaccctgaacctaacccctttgagggagcagcatccaggtcaggagagaagtggaaagtgcaggagggtaatgccctcaaatccggtggcctctttcagaaaaaagttccctgaagtccagagaggtgcagccaggactccctcctccccactgccaccctgagcttgggggctgggattctcccttttctgactcctccaggagcccagaagcaatacggccgatgccagggacagcatccagctctccttcacagacacctctcctgtcttcagcacaaaacaccttcaatgttctgacttcaaagagaacgacaggtccgtgccacacacttgtgtttttgagggatcagaaaagtgaagaaggaacttatcaattcctcatggccaggaaggtcccgggtttcagagtagaaatgacagacaggtcatggaattctcatccaccatcgaattccataacacgttacatcatggtggcacatttgtacatacatataaatgatatcaagatgaggcttttgttgggctggctgaggagtaacttggtgtaaatctatcaagcagtttcagtgaaaaaggaattcaaagtagtttaaaaatgtcgagttccattgcattgtaaatagtgcctctgtaatgtggttctgcagttgttctttgctagtgagcaagcttggtcaaagtgtatgccttttccttttaaaattaatctcttccgaaaatatccactagcacctcactgcatacatagcatcccagctcctaattcaaagcaggggaaggtatttccccaaagcctgcttttcctctctctgttctccttgggaaaataatgattccaattaaagaggacaccagtaatactgacccacaaggtaactgacctaaacactataaaactgtatatatttccaggctgcatcttcagcctgatatgtactttgtagttgcaacagcgccctaggtgccctatggcccaccaagtttgaggagggtggtgctttccggattgagcctgggcaggctctgtggagctcaccaagagagctgggggcaggcccaccctcctctttgcgccctttctctccctcttggtgcccctgccctccgccccaccacagcactctcaggaaaggatcagaatgcaggatctttgtgtatttcttccagggatatttgcatttaagccttaattctcattgcaagcgaaaggcttggtccccctgggaaggcgggtttcggcaccggtgggcaggtggttcagtgtcaaggaggctgctgctggtcccatggccacctgctggctttgaggtagtgagggagggtcaatccttagggggagtcaacatgtgaatgctaaagaacactgctgcacagcccgtggggtggcgccagggtttctcaacctctactgacattttgcgataggttctgtatgccgtaggatgtttagcaacatccctggtctctacccatcatctgccagtagcaacccccaagttaggtgtgacaaccaaaagtatctgtcgacattgctaggtatctcctgggggcctccacaagttgagaaccaccaggttatgccagtggtttgtcatgcatggatctgtagagggactgtggcgctccggctgctttgttccatagaaagcctgtatgtgacaaagctgccagcctttatcttgatacccaagcccaggattttccatgtgtcttcagggggcaggtaggggaaaatggggtgagccacctccaacagatgccaacctgttgggtcttgaattttcactcactgaagatgccccctgcccgctccccacttcctagaaagcaaaactcgttacctttgttttccttggccacattttactggaagcaacaggaacttcttaatgggtttgtggccctcaattggtttttaaaaaaatctaacagatcttattggcaaatattcaagatggtgatgctggaaaatttcaggacttttcttttgcaagtgagccggtagctgtgtttgttgaccacattctttggcagttcctcccagaagatcaaaggatcctgcagctttaacctaatatctaggctgtaaaaatatgagggcaggtttcgggcaggatgtattgatcagacaccaagttcagccctcggttacttccctcttttaacctggctttaatagtgattcatggtatgagtgggggccaatctcttatcctttctgtgcctcagtatccccacctgaaatgagactagtcatactaacctacctcctctgatgtattgtgaggattatacaataacatttttaaagaaaaaaagtgcagtctttcatctctggcatctaagctaatgattcccattcagtgactcaaacctgtggggggcgttccagtgttctctgaccagtgtcttccatccaagcctccttgtgaccagggcaaggagctgcctggcctccagtgggtaaaatagacctttaagacaggtttcctatgaccatagaaagtaacaccccatatgtttccattcccggcgaggcctgtttgaatggcgctctgtgtgagtgctatgaacaggctacctgtcagcagtctcactgcgaggcctcaaggcctctgtgagcagaagcccctttaaaccaaggaaggacactaacccaggcctctgccttctttgttacctaagttctggtatctaaggggtctctcatctcacagcttgcctcctttgtttcgaggggtctctgcagtgtgaatgggtttgaaatccagtgtggatagcacgaagagatgcaactgagccgaagttttgaaggctggttgggctagtgggtcatcatgtcactttcagatgactgataaccgctgggactgctggggcttcaccagcacgagctatgcaggttgggggaggccctggctttttcaatgattgacgttgacatcagtcaggagctgggagttgagacctccagggaagtctcgtccggatccatcgctcttctctcaaggagcacagtcctgggaaaggcctagggacctgtgggccggtgatgcgggcactgcagaccaggccaggccctcgggtaaagctctgaggagaggccaaaaccaggcttcaggttcgggaaggtgactgcttgcaactgcagtagcaggaacatgtcaggtgcttactgggtgagacccagccggggaagcctctccaactcctcctagccctggaaaccagacacccagagccccaggctttctcggcacccagaagaagtggggagcgggcaaagcagaaaacattcaatgcatgatgtaggattgctgcgttggcactaagctgttgtattaagcatgagaggtgtttgtttaacgttggcaaagggatttaacaagaaacaaaaagcttcgcgtccttgttttgaccgtcgacagaagtccaattttcttgcctttctttatccccatttctcctccctccccttcccccatcacatccactttcggtcactcgttgttggtatttggtggcagctcttggtcctattgctgtggatgttccactgaaaacacggggggtagcggggagtggtaaggaaagcaacttttttctaatttttgtattggtatccacaagcgtttgtattttttgaattgcaaacactgtgttttctggtctttgggggttagttgaactttctgtattaccttttggaaaacctgagttttaccacagtcttaagcagatttgaaataaattcttttgacactgccaa

SEQ ID NO: 22346 - DNA, 2166 bp, Homo sapiens
  misc_feature 1..2166: note = ENST00000449018
  source 1..2166: mol_type = unassigned DNA; mol_type = unassigned DNA
atggaggaagagctgaagtgtcccgtgtgcggctctctgtttcgggagcctatcatcctgccctgttcccacaatgtctgcctgccttgcgctcgcaccatcgcggtgcagaccccggacggcgggagtgcagctggcggcctcggcggcggtgcgggaggtggcggagaccacgcggacaagctcagcttgtacagcgagacagacagcggctacgggtcctacaccccgagcctcaagtcccccaacggggttcgcgtgctgcccatggtgcccgcaccacccggctcctcggctgcggcggctcggggtgccgcctgctcctcgctgtcctcgtcttcgagctccatcacgtgcccgcagtgccaccgcagcgcatccctggaccaccgcggcctgcgcggcttccagcgcaaccggctgctcgaggccatcgtgcagcggtaccagcagggccgcggggccgtgccggggacgtctgcagccgcggcggtggccatctgccagctgtgcgaccgcaccccgccagagccagcagccacgctctgcgagcagtgcgacgtcctctactgctctgcctgccagctcaagtgccatccatcccggggacccttcgccaagcatcgcctgggcgcccccagcggaggcggcggctgcaagagcccgggaggcgcgggggcgggggcgactgggggcagcacggcccgcaagttccccacgtgtcccgagcatgaaatggagaactacagcatgtactgcgtgagctgtcgaaccccggtgtgttatctgtgcctggaggagggccggcacgccaagcacgaggtgaagccgctgggggccatgtggaagcagcacaaggcacaactatctcaggccttaaatggagtttcagataaggcaaaggaagcaaaggagtttctggttcagctaaagaacatattgcagcagatccaggaaaacggactggactacgaagcctgcctcgttgctcagtgtgatgcccttgtggatgctttaactcgtcagaaagccaagctgctcaccaaggtgactaaagagagggaacacaagttgaagatggtttgggaccagatcaatcactgcacattgaagctgcgtcagtccaccggactgatggagtactgcctggaggtgatcaaggagaacgacccctccgggttcttacagatctcagatgctctgatcaagcgcgtccaggtgtctcaggagcagtgggtcaaaggcgccctggagccgaaagtgtctgcggagtttgatctgactttggacagcgagccgctgctgcaggccatccaccagctggacttcattcagatgaaatgtagggtgccacccgtccccctactgcagctggagaaatgctgcacccgtaacaacagcgtcacgctggcctggaggatgccacccttcacccacagccccgtggacggctacatcctggagctggacgacggtgccgggggacagttccgggaagtgtacgtcggtaaggagactttgtgtaccatcgacggtcttcacttcaacagcacctacaacgcccgagtcaaagctttcaactcttctggtgtcgggccttacagtaaaactgtcgtcctgcagacatccgatgtggcctggttcacatttgaccccaactctgggcatcgggacatcattttatccaatgacaaccagacagccacctgcagcagctatgacgaccgggtggtgctgggcacagctgcgttctccaagggcgtgcactactgggagctgcacgtggaccggtacgacaaccacccagaccccgccttcggggtggccagggccagcgtggtcaaggacatgatgctgggcaaggatgacaaggcctgggccatgtatgtggacaacaaccgcagctggttcatgcactgcaactcccacaccaacaggacggaaggtggcgtgtgcaagggggccaccgtgggcgtgctgctggacctgaataagcacactctcaccttcttcatcaacgggcagcagcagggccccacagccttcagccacgtggacggggtcttcatgccagccctcagcctcaaccgcaacgtgcaggtcaccctgcacacaggattggaagtgccgactaacctggggcggccaaagctgtcaggcaattag

SEQ ID NO: 22347 - DNA, 3936 bp, Homo sapiens
  misc_feature 1..3936: note = ENST00000366653
  source 1..3936: mol_type = unassigned DNA; mol_type = unassigned DNA
atggaggaagagctgaagtgtcccgtgtgcggctctctgtttcgggagcctatcatcctgccctgttcccacaatgtctgcctgccttgcgctcgcaccatcgcggtgcagaccccggacggtgagcagcacctgccccagccgctcctgctttcccggggatcggggctgcaggcgggcgccgccgccgctgcctctctggagcacgacgctgcggctggcccggcctgcggcggtgcaggcgggagtgcagctggcggcctcggcggcggtgcgggaggtggcggagaccacgcggacaagctcagcttgtacagcgagacagacagcggctacgggtcctacaccccgagcctcaagtcccccaacggggttcgcgtgctgcccatggtgcccgcaccacccggctcctcggctgcggcggctcggggtgccgcctgctcctcgctgtcctcgtcttcgagctccatcacgtgcccgcagtgccaccgcagcgcatccctggaccaccgcggcctgcgcggcttccagcgcaaccggctgctcgaggccatcgtgcagcggtaccagcagggccgcggggccgtgccggggacgtctgcagccgcggcggtggccatctgccagctgtgcgaccgcaccccgccagagccagcagccacgctctgcgagcagtgcgacgtcctctactgctctgcctgccagctcaagtgccatccatcccggggacccttcgccaagcatcgcctggtgcagccgccgccgccgccgccgccgcccgccgaggcagcctccgggcccactggcaccgcccagggcgcccccagcggaggcggcggctgcaagagcccgggaggcgcgggggcgggggcgactgggggcagcacggcccgcaagttccccacgtgtcccgagcatgaaatggagaactacagcatgtactgcgtgagctgtcgaaccccggtgtgttatctgtgcctggaggagggccggcacgccaagcacgaggtgaagccgctgggggccatgtggaagcagcacaaggcacaactatctcaggccttaaatggagtttcagataaggcaaaggaagcaaaggagtttctggttcagctaaagaacatattgcagcagatccaggaaaacggactggactacgaagcctgcctcgttgctcagtgtgatgcccttgtggatgctttaactcgtcagaaagccaagctgctcaccaaggtgactaaagagagggaacacaagttgaagatggtttgggaccagatcaatcactgcacattgaagctgcgtcagtccaccggactgatggagtactgcctggaggtgatcaaggagaacgacccctccgggttcttacagatctcagatgctctgatcaagcgcgtccaggtgtctcaggagcagtgggtcaaaggcgccctggagccgaaagtgtctgcggagtttgatctgactttggacagcgagccgctgctgcaggccatccaccagctggacttcattcagatgaaatgtagggtgccacccgtccccctactgcagctggagaaatgctgcacccgtaacaacagcgtcacgctggcctggaggatgccacccttcacccacagccccgtggacggctacatcctggagctggacgacggtgccgggggacagttccgggaagtgtacgtcggtaaggagactttgtgtaccatcgacggtcttcacttcaacagcacctacaacgcccgagtcaaagctttcaactcttctggtgtcgggccttacagtaaaactgtcgtcctgcagacatccgatgtggcctggttcacatttgaccccaactctgggcatcgggacatcattttatccaatgacaaccagacagccacctgcagcagctatgacgaccgggtggtgctgggcacagctgcgttctccaagggcgtgcactactgggagctgcacgtggaccggtacgacaaccacccagaccccgccttcggggtggccagggccagcgtggtcaaggacatgatgctgggcaaggatgacaaggcctgggccatgtatgtggacaacaaccgcagctggttcatgcactgcaactcccacaccaacaggacggaaggtggcgtgtgcaagggggccaccgtgggcgtgctgctggacctgaataagcacactctcaccttcttcatcaacgggcagcagcagggccccacagccttcagccacgtggacggggtcttcatgccagccctcagcctcaaccgcaacgtgcaggtcaccctgcacacaggattggaagtgccgactaacctggggcggccaaagctgtcaggcaattagccccgctccagctcggcactgtgcctgtgacagtgacattcacaggcaaaacgcccaccattctcactaagctcaaataacccacaaaagcaggatatgcaaatcatgggtgcaacctggcagcgtggagtgtcatagaaacacattttcttggggacgcagggaatgggtccacgggccatgctcacagctgccactgtcagtggcaaaggaaggtacgtgtgtcacccttattccacccagacattacgaacactccccaagaaggacctttctcaagggagtcagcattcgggcttcatgtctatgtttcctgccatctgttttcaaagcttgtctttttttggagggagaggaaggtagactttgagactggcctcctgagagcggcagtcaggagctgcgctgtaatcccacgccccgggtgttggccctccgtggggaccttgcctcctcagagtcccgagattgcagattctcatcatgctgagaaagttatcttttagcttcttggtcctagagtctttagtagcacctgccacttgcagacccaatgcaggattgatagaaagggacattaatcattcatgcttgacttttgcctctctcactgaagtgttagaaccttttaaaatggcttcctttattaatcagccaattgtgttctctctctctcttcctccatccttcatttcttctccctccctccttctctttctctcttcttctctctctccttccttccctcctttgctctctctttcttcctttcctccttctctcttactttcctccatccctgcctctttcttccctctttcgctctctttccctccctccttctctctctctctcacacacacacaggcatgacagtctcctaaaattaattcactcagttcttagttcttaaatccacgtgaaaacacaagaattttaacaactatgtcataggtcttcgcctggtgatggctcctttctgaaactggcagcccaagaagttaactgaaaatgcatccagattgctcttctgagctgaaccactctcagactcataagcatttaaaatgggagaccctgggaaagcctgttctagtcagtccaccctattgtcattatgaaagcatcatgaacacaagtggcccctgtggcaggccgggacggctctgccctgatgcagtgggcgggatctctggggaaggcaggaaatagaagggcagtatcaggtaccttgtctcccagcttcccactgtgagactgggtgtgccgagtctgacctgccagggcaggactctggaaacaccaggcttctcccttgagatccacattgattcatccacacctctcagagacagctcatggcaggggttttgagcctgccaggctcttgttcccagggaacccttcctctcctccctcctctcatcttcccagtcacctgccacctccagctccacctggtagtaacatttctctctccttttaaaaagaatatattttgtcaagcattttatttctgaggctgagaagtgacttgtcaatttgctggactggatttttataaaattcgcccattcaccagca

SEQ ID NO: 22348 - DNA, 1954 bp, Homo sapiens
  misc_feature 1..1954: note = ENST00000354556
  source 1..1954: mol_type = unassigned DNA; mol_type = unassigned DNA
caccgccagccaaagcagtcccttccatttcaggcaccggcctgggcccgggagacaccgcaaggctatttaagatggtgtggtttgcccatctacgttgatcgtcccaagaaaggggcaccgtctgcagaacttgccaggaaagtcatcctgggcggcgcgggccacgccagggtctccccgcgcggcttcctcccccggcgccttctctcgggcgcgcgtgcgccccctgcaggcggcccccgggagagcctcgcgggggagccgggagcctggtttccccgccaacccccatcccgcccgccccggcggccaccctgggggcgaggcagcccggcgcgtgggaggggacggcgcgccattggcttgtgcgcggaaccgagaggagggaccagcgcgggccgccagactcgcccttctgcagaggccgggctggaggagaagatggcggccaagcagcccccgcctctgatgaagaagcacagccagacggacctcgtgagccgcctgaagacccgcaagatcctcggcgtgggcggggaggatgacgacggggaggtgcatcgctccaagatcagccaggtcttaggcaatgaaatcaagtttaccattcgggagcctttggggctcagggtctggcagttcgtctctgctgtgctcttctccggcattgccatcatggcgcttgccttccctgaccagctctatgatgcggtctttgatggagcccaggtgaccagcaagacccccatccgcctctacggcggtgccctcctcaaggtggaaactgagtcagacagaggcgaggtgacttgtctgaggtcacagctagtgagtggtgaagccaagattggaacccaggcaatccagcttggaaggacaaaggatggggtctctgaaacatctccagcctcagccctgctcctggccttctctctcatccagacatggctgcagcctctgggctgggactggcctccctacctccccttcaatccagtgcttccctgctgccagaaggagctttccagaaagcacatgtcaccacagccctctcttgctggaacccaacctctacaggagaccaagctgcctcctacagaccacaggacctccaagactcaccatcgccacctcttgttattcctgccctgactttcctatcaccaccatcaaaggagagtcccccagagattacatctcatggcccgggcttgcggagtgctgggctcccagacaaatgcaatcaaaggagacatgtctcctgggaagagcctcccacaacctcaaagccccgaaagccctccgtgtttatgttcttgcttgatccccacaaccgtccagcaaagccagcacagcagagatgattctatttccccaggagtggtgcccagagaagttaagcagtttgcctgagatgacacagccgtgttggagccgtgcttgcttgggatgaactaagtggcgcgcatttgattttactgctgatttcacagctccttcagctaccccaagctgccatcaatgtcccatcaatttcactttgtctgctcctctctgcaatgagctttctcagctctcagcctgtgttcagtaaagagacgttgctggtcttgtgtcacgtctcctcctgcctgaataatgctcgtgtgcagcatgaaggagaggtctctcagaactcaagggcctgaagctcccagaagcttccagatccagaggcaacaggtgtcttccggtcccagggagggcaagtttcctgaacctcgaaggcaggcagacagtggaggcctcccttccttctcacagcatcctccagctccaaggcaggcttcccccaacccccagggcccaggaactgtcatcagagcagaaatcaagcccagtcccaggcctcaccccacagggcatctgccccattgatatttgcttggtaataaatactggagacagaggg

SEQ ID NO: 22349 - DNA, 3381 bp, Homo sapiens
  misc_feature 1..3381: note = ENST00000395648
  source 1..3381: mol_type = unassigned DNA; mol_type = unassigned DNA
agtccagccggcccggccctgccctgccctgccctgtcctgccctgccctgccctgccctgccctgcactgcccggcccggcacgggcggcgcgatgtgaggcgtccgagcccggagcctccgcctggcatcagctccacgtagcccagcgccggcacgcgcgaggcccgaagtgggaatgatggctccatttcacagatgaggaaaccgagactcagagcacaaggccacacagcaggaagagcccttctgcagaggccgggctggaggagaagatggcggccaagcagcccccgcctctgatgaagaagcacagccagacggacctcgtgagccgcctgaagacccgcaagatcctcggcgtgggcggggaggatgacgacggggaggtgcatcgctccaagatcagccaggtcttaggcaatgaaatcaagtttaccattcgggagcctttggggctcagggtctggcagttcgtctctgctgtgctcttctccggcattgccatcatggcgcttgccttccctgaccagctctatgatgcggtctttgatggagcccaggtgaccagcaagacccccatccgcctctacggcggtgccctcctcagcatctccctgatcatgtggaacgctctctacacggctgagaaggtcatcattcgatggaccctgctcaccgaagcttgctatttcggggtccagttcttggtggtcactgccacgctagctgagacgggcctcatgtccctggggatcctgctgctcctggtcagccgcctcctttttgtcgtcatcagcatttactactattaccaagtcggccgaagacccaagaaggcctagttgcccgctgggcctggggccctgcccatgcctgggccagagtggcgctggggcctcggcttccctttggctcctggaaggcaggagggtcccctgccctgccccagtcctgccccagggaggcagggggtggggggccttcctttcctcctgggcaccccgtgtgctgtgatctcctgggctttcaggcttgacatgctggtctggggagagacagggcctctgctgccctgttcttcaccctcacagtgatacctcctttccttgggtctcttggcctccagaccccctcaatagacactgactaaagtcaggctggagtcatgagggtagtgggctaagtcgagggtccagcctcttctgccaggaagcccttcttgcttttgagagaggctgtgaccaccccccatccttctccctacactcccagccaacctagtgcccaagcagctaaacttggcttccttctaatcctggaaaaccctgtacccctcctcctcaatctggccctctccacatgcacaccctgaaaacacacacagacacacaacacacacacatacacacccctgaacacacacacagacacacatacacccatgatgtgagcaaacacacacacgtgcgccttcatagcccagccaagggcatgcaggcagggtgtgctgcctgagatggcacctccctttcagccattcttcaagaatgggccacacacagctagaagtcctctcccagctagaagtcctgtccccactctcctggcctgacaagatgagctctcctgggaccttgctctagggcactctgcctctaccctaggacactggaatgccctgggagccccctccctgcaaccagcctgagttcagccccacggacaaagggacacacagcccccaatggagaccattgtaagtggtggggctgggagaggaggaacagaaggaaagccatagcgctctcttgccccttggcatgtaccccaaggcctgatggccactgggctcagcctgtcccccactcctgcctgcttcccggtgagctgccccccacacgtgcagcccgggctgcctccagggtctggctgagtgggatcaggtggccctccaactcagcacaggaaataagtagaaacatttcagcaggccacctcccctcatcttccccgccctgtccagcgccctggcaaaggctgacaactggctgtcttggggccgaacagcccctgccctgcctctgagggcccaccagcctgtgctgcatacccaccgcccagcttctccctgagggcccaccagcctgtgctgcatacccaccgcccagcttctccctgagggcccaccagcctgtgctgtacaccccgttagtccctgatcccaaccttctccctcctgccagcacaccgatgcacacaccggaagtggcgagcccaagccctggggacaggtgtagggagaaaagcagccccaggcctcagactcgcttcccatcctggcatagagtgggggatggctggagggtgtctataggtacagcccgctctggctgctgccaggtgggcccctgccaggggtcctcacccctgtccaccctgtgcctggctgtccctgcacccagatacagcaacatggcctgtacccagcagagtggtggcaccaccatggttacagcggatgccccgagactctgcttggtaaacgtggcagagcagaatgggaggctggaccctgaggaagggcccctctcctggcatctgtctcttgctacctaagcctgtgcctctccctaaagagctgcctccctgctgccgagccctggtctggccacgagccaccactgcctcccgctgctgcccacaggtggtgccgccaatgggcagtgccctcaggccgaagcctcaatcccccatctgagccaggcctaatcctctaatagtgatggttggtttgtcctcccataactgcaggtggattccacctggggaatgaggctgcgtgtcgggcgtctgctggccctgagacatccagtcttccacactcaactgtgggatgggagggtggcgtggccttaccccatgaggctgtccaggctctggcacacagctgtgctcacaaaatactgggtggcttggttagagctaattgtagtggagcctgcaggtgagggtgagggagggggctgcaggtcaggtaagatctggaagacagacgtacagcttggagggcagggggactctaaggcaaggagatttacagttgggaaggaggcagtggcagaggggtgagggacaggggcccttaagtccagcgaggaaagctcggtgtgggcccgctctacgctccgtttggggtgacctggaacgcctcttctcccagctccctccagccatcagcagcctcttgtcaagcttctgcctcgccccagtctatccccaaccccaaatcaagaccacctttcttcacggtcactatttattctttgttcctttttctttttgtaagaaacattcacaaaaaccagtgcaaaaccatca

SEQ ID NO: 22350 - DNA, 3703 bp, Homo sapiens
  misc_feature 1..3703: note = ENST00000533940
  source 1..3703: mol_type = unassigned DNA; mol_type = unassigned DNA
agtctttgcccccgcagggccgcggacggaggtggtggcggagttcccgctgcccacaagtctggcccgaccttctggggtgggggcctgggggcaggggccctgggccggagaacccggggccgcctaacggctcggagctcaccgccgggggacaccggcgctgaggcctgggtctcagaaagtgggaagtgggaatgatggctccatttcacagatgaggaaaccgagactcagagcacaaggccacacagcaggaagagagaaatgaaaacttacggtcccacagaaacgcgggtttgtagcagctctattcataatcatcaacaactggaaacaacccacatggccttcagtgaccgaatggataaacaagctgttacacgtaccccagggaatactgctctccaataaaaaggagcggactcttgatacacacagtgacttggaggaatctcaaaggcattctgctcaatgacaggagccagcctcaaaagatttggctgactgaggacgcgacaggtactcagcttctttctgcatctcagttgcccagcacaggggctggcacgcacccttctgcagaggccgggctggaggagaagatggcggccaagcagcccccgcctctgatgaagaagcacagccagacggacctcgtgagccgcctgaagacccgcaagatcctcggcgtgggcggggaggatgacgacggggaggtgcatcgctccaagatcagccaggtcttaggcaatgaaatcaagtttaccattcgggagcctttggggctcagggtctggcagttcgtctctgctgtgctcttctccggcattgccatcatggcgcttgccttccctgaccagctctatgatgcggtctttgatggagcccaggtgaccagcaagacccccatccgcctctacggcggtgccctcctcagcatctccctgatcatgtggaacgctctctacacggctgagaaggtcatcattcgatggaccctgctcaccgaagcttgctatttcggggtccagttcttggtggtcactgccacgctagctgagacgggcctcatgtccctggggatcctgctgctcctggtcagccgcctcctttttgtcgtcatcagcatttactactattaccaagtcggccgaagacccaagaaggcctagttgcccgctgggcctggggccctgcccatgcctgggccagagtggcgctggggcctcggcttccctttggctcctggaaggcaggagggtcccctgccctgccccagtcctgccccagggaggcagggggtggggggccttcctttcctcctgggcaccccgtgtgctgtgatctcctgggctttcaggcttgacatgctggtctggggagagacagggcctctgctgccctgttcttcaccctcacagtgatacctcctttccttgggtctcttggcctccagaccccctcaatagacactgactaaagtcaggctggagtcatgagggtagtgggctaagtcgagggtccagcctcttctgccaggaagcccttcttgcttttgagagaggctgtgaccaccccccatccttctccctacactcccagccaacctagtgcccaagcagctaaacttggcttccttctaatcctggaaaaccctgtacccctcctcctcaatctggccctctccacatgcacaccctgaaaacacacacagacacacaacacacacacatacacacccctgaacacacacacagacacacatacacccatgatgtgagcaaacacacacacgtgcgccttcatagcccagccaagggcatgcaggcagggtgtgctgcctgagatggcacctccctttcagccattcttcaagaatgggccacacacagctagaagtcctctcccagctagaagtcctgtccccactctcctggcctgacaagatgagctctcctgggaccttgctctagggcactctgcctctaccctaggacactggaatgccctgggagccccctccctgcaaccagcctgagttcagccccacggacaaagggacacacagcccccaatggagaccattgtaagtggtggggctgggagaggaggaacagaaggaaagccatagcgctctcttgccccttggcatgtaccccaaggcctgatggccactgggctcagcctgtcccccactcctgcctgcttcccggtgagctgccccccacacgtgcagcccgggctgcctccagggtctggctgagtgggatcaggtggccctccaactcagcacaggaaataagtagaaacatttcagcaggccacctcccctcatcttccccgccctgtccagcgccctggcaaaggctgacaactggctgtcttggggccgaacagcccctgccctgcctctgagggcccaccagcctgtgctgcatacccaccgcccagcttctccctgagggcccaccagcctgtgctgcatacccaccgcccagcttctccctgagggcccaccagcctgtgctgtacaccccgttagtccctgatcccaaccttctccctcctgccagcacaccgatgcacacaccggaagtggcgagcccaagccctggggacaggtgtagggagaaaagcagccccaggcctcagactcgcttcccatcctggcatagagtgggggatggctggagggtgtctataggtacagcccgctctggctgctgccaggtgggcccctgccaggggtcctcacccctgtccaccctgtgcctggctgtccctgcacccagatacagcaacatggcctgtacccagcagagtggtggcaccaccatggttacagcggatgccccgagactctgcttggtaaacgtggcagagcagaatgggaggctggaccctgaggaagggcccctctcctggcatctgtctcttgctacctaagcctgtgcctctccctaaagagctgcctccctgctgccgagccctggtctggccacgagccaccactgcctcccgctgctgcccacaggtggtgccgccaatgggcagtgccctcaggccgaagcctcaatcccccatctgagccaggcctaatcctctaatagtgatggttggtttgtcctcccataactgcaggtggattccacctggggaatgaggctgcgtgtcgggcgtctgctggccctgagacatccagtcttccacactcaactgtgggatgggagggtggcgtggccttaccccatgaggctgtccaggctctggcacacagctgtgctcacaaaatactgggtggcttggttagagctaattgtagtggagcctgcaggtgagggtgagggagggggctgcaggtcaggtaagatctggaagacagacgtacagcttggagggcagggggactctaaggcaaggagatttacagttgggaaggaggcagtggcagaggggtgagggacaggggcccttaagtccagcgaggaaagctcggtgtgggcccgctctacgctccgtttggggtgacctggaacgcctcttctcccagctccctccagccatcagcagcctcttgtcaagcttctgcctcgccccagtctatccccaaccccaaatcaagaccacctttcttcacggtcactatttattctttgttcctttttctttttgtaagaaacattcacaaaaaccagtgcaa

SEQ ID NO: 22351 - DNA, 2647 bp, Homo sapiens
  misc_feature 1..2647: note = ENST00000525680
  source 1..2647: mol_type = unassigned DNA; mol_type = unassigned DNA
aagccccggccgcgcagggcgccgcgcgcagtccagccggcccggccctgccctgccctgccctgtcctgccctgccctgccctgccctgccctgcactgcccggcccggcacgggcggcgcgatgtgaggcgtccgagcccggagcctccgcctggcatcagctccacgtagcccagcgccggcacgcgcgaggccccccttctgcagaggccgggctggaggagaagatggcggccaagcagcccccgcctctgatgaagaagcacagccagacggacctcgtgagccgcctgaagacccgcaagatcctcggcgtgggcggggaggatgacgacggggaggtgcatcgctccaagatcagccaggtcttaggcaatgaaatcaagtttaccattcgggagcctttggggctcagggtctggcagttcgtctctgctgtgctcttctccggcattgccatcatggcgcttgccttccctgaccagctctatgatgcggtctttgatggagcccaggtgaccagcaagacccccatccgcctctacggcggtgccctcctcagcatctccctgatcatgtggaacgctctctacacggctgagaaggtcatcattcgatggaccctgctcaccgaagcttgctatttcggggtccagttcttggtggtcactgccacgctagctgagacgggcctcatgtccctggggatcctgctgctcctggtcagccgcctcctttttgtcgtcatcagcatttactactattaccaagtcggccgaagacccaagaaggcctagttgcccgctgggcctggggccctgcccatgcctgggccagagtggcgctggggcctcggcttccctttggctcctggaaggcaggagggtcccctgccctgccccagtcctgccccagggaggcagggggtggggggccttcctttcctcctgggcaccccgtgtgctgtgatctcctgggctttcaggcttgacatgctggtctggggagagacagggcctctgctgccctgttcttcaccctcacagtgatacctcctttccttgggtctcttggcctccagaccccctcaatagacactgactaaagtcaggctggagtcatgagggtagtgggctaagtcgagggtccagcctcttctgccaggaagcccttcttgcttttgagagaggctgtgaccaccccccatccttctccctacactcccagccaacctagtgcccaagcagctaaacttggcttccttctaatcctggaaaaccctgtacccctcctcctcaatctggccctctccacatgcacaccctgaaaacacacacagacacacaacacacacacatacacacccctgaacacacacacagacacacatacacccatgatgtgagcaaacacacacacgtgcgccttcatagcccagccaagggcatgcaggcagggtgtgctgcctgagatggcacctccctttcagccattcttcaagaatgggccacacacagctagaagtcctctcccagctagaagtcctgtccccactctcctggcctgacaagatgagctctcctgggaccttgctctagggcactctgcctctaccctaggacactggaatgccctgggagccccctccctgcaaccagcctgagttcagccccacggacaaagggacacacagcccccaatggagaccattgtaagtggtggggctgggagaggaggaacagaaggaaagccatagcgctctcttgccccttggcatgtaccccaaggcctgatggccactgggctcagcctgtcccccactcctgcctgcttcccggtgagctgccccccacacgtgcagcccgggctgcctccagggtctggctgagtgggatcaggtggccctccaactcagcacaggaaataagtagaaacatttcagcaggccacctcccctcatcttccccgccctgtccagcgccctggcaaaggctgacaactggctgtcttggggccgaacagcccctgccctgcctctgagggcccaccagcctgtgctgcatacccaccgcccagcttctccctgagggcccaccagcctgtgctgcatacccaccgcccagcttctccctgagggcccaccagcctgtgctgtacaccccgttagtccctgatcccaaccttctccctcctgccagcacaccgatgcacacaccggaagtggcgagcccaagccctggggacaggtgtagggagaaaagcagccccaggcctcagactcgcttcccatcctggcatagagtgggggatggctggagggtgtctataggtacagcccgctctggctgctgccaggtgggcccctgccaggggtcctcacccctgtccaccctgtgcctggctgtccctgcacccagatacagcaacatggcctgtacccagcagagtggtggcaccaccatggttacagcggatgccccgagactctgcttggtaaacgtggcagagcagaatgggaggctggaccctgaggaagggcccctctcctggcatctgtctcttgctacctaagcctgtgcctctccctaaagagctgcctccctgctgccgagccctggtctggccacgagccaccactgcctccc

SEQ ID NO: 22352 - DNA, 2045 bp, Homo sapiens
  misc_feature 1..2045: note = ENST00000532253
  source 1..2045: mol_type = unassigned DNA
actgcccggcccggcacgggcggcgcgatgtgaggcgtccgagcccggagcctccgcctggcatcagctccacgtagcccagcgccggcacgcgcgaggccccccttctgcagaggccgggctggaggagaagatggcggccaagcagcccccgcctctgatgaagaagcacagccagacggacctcgtgagccgcctgaagacccgcaagatcctcggcgtgggcggggaggatgacgacggggaggtgcatcgctccaagggtctggcagttcgtctctgctgtgctcttctccggcattgccatcatggcgcttgccttccctgaccagctctatgatgcggtctttgatggagcccaggtgaccagcaagacccccatccgcctctacggcggtgccctcctcagcatctccctgatcatgtggaacgctctctacacggctgagaaggtcatcattcgatggaccctgctcaccgaagcttgctatttcggggtccagttcttggtggtcactgccacgctagctgagacgggcctcatgtccctggggatcctgctgctcctggtcagccgcctcctttttgtcgtcatcagcatttactactattaccaagtcggccgaagacccaagaaggcctagttgcccgctgggcctggggccctgcccatgcctgggccagagtggcgctggggcctcggcttccctttggctcctggaaggcaggagggtcccctgccctgccccagtcctgccccagggaggcagggggtggggggccttcctttcctcctgggcaccccgtgtgctgtgatctcctgggctttcaggcttgacatgctggtctggggagagacagggcctctgctgccctgttcttcaccctcacagtgatacctcctttccttgggtctcttggcctccagaccccctcaatagacactgactaaagtcaggctggagtcatgagggtagtgggctaagtcgagggtccagcctcttctgccaggaagcccttcttgcttttgagagaggctgtgaccaccccccatccttctccctacactcccagccaacctagtgcccaagcagctaaacttggcttccttctaatcctggaaaaccctgtacccctcctcctcaatctggccctctccacatgcacaccctgaaaacacacacagacacacaacacacacacatacacacccctgaacacacacacagacacacatacacccatgatgtgagcaaacacacacacgtgcgccttcatagcccagccaagggcatgcaggcagggtgtgctgcctgagatggcacctccctttcagccattcttcaagaatgggccacacacagctagaagtcctctcccagctagaagtcctgtccccactctcctggcctgacaagatgagctctcctgggaccttgctctagggcactctgcctctaccctaggacactggaatgccctgggagccccctccctgcaaccagcctgagttcagccccacggacaaagggacacacagcccccaatggagaccattgtaagtggtggggctgggagaggaggaacagaaggaaagccatagcgctctcttgccccttggcatgtaccccaaggcctgatggccactgggctcagcctgtcccccactcctgcctgcttcccggtgagctgccccccacacgtgcagcccgggctgcctccagggtctggctgagtgggatcaggtggccctccaactcagcacaggaaataagtagaaacatttcagcaggccacctcccctcatcttccccgccctgtccagcgccctggcaaaggctgacaactggctgtcttggggccgaacagcccctgccctgcctctgagggcccaccagcctgtgctgcatacccaccgcccagcttctccctgagggcccaccagcctgtgctgcatacccaccgcccagcttctccctgagggcccaccagcctgtgctgtacaccccgttagtccctgatcccaaccttctccctcctgccag

SEQ ID NO: 22353 - DNA, 566 bp, Homo sapiens
  misc_feature 1..566: note = ENST00000524774
  source 1..566: mol_type = unassigned DNA; mol_type = unassigned DNA
agaaaacccaatcataggaccaggtaacccattaactcatgaactccatgaacacagcatcctcctgacagaaccggacatgggcaggggccaggggctcagtcctccccctttataaagagatcgagtctcaatgcggggaagtgactcgcccagtgtcacatagggccttggaatgacaggagcaggctgaagcagcagcattgagtctggaggggacaggatcggggacagacagctttgatttgagaaatgtgaataggggcggaggcgtggagtccaggaccccagctgtcttgcagcagtggccagaggaagcaggagcagtcctcctgccctgctgggagggagtcagctgtcccacccccagcccccttttcatcccccgccccaggcatctccctgatcatgtggaacgctctctacacggctgagaaggtcatcattcgatggaccctgctcaccgaagcttgctatttcggggtccagttcttggtggtcactgccacgctagctgagacgggcctcatgtccctggggatcctgctgctcctggtcagccgcct

SEQ ID NO: 22354 - DNA, 658 bp, Homo sapiens
  misc_feature 1..658: note = ENST00000528473
  source 1..658: mol_type = unassigned DNA; mol_type = unassigned DNA
gatgtgaggcgtccgagcccggagcctccgcctggcatcagctccacgtagcccagcgccggcacgcgcgaggcccatttggctgactgaggacgcgacaggtactcagcttctttctgcatctcagttgcccagcacaggggctggcacgcacccttctgcagaggccgggctggaggagaagatggcggccaagcagcccccgcctctgatgaagaagcacagccagacggacctcgtgagccgcctgaagacccgcaagatcctcggcgtgggcggggaggatgacgacggggaggtgcatcgctccaagatcagccaggtcttaggcaatgaaatcaagtttaccattcgggagcctttggggctcagggtctggcagttcgtctctgctgtgctcttctccggcattgccatcatggcgcttgccttccctgaccagctctatgatgcggtctttgatggagcccaggtgaccagcaagacccccatccgcctctacggcggtgccctcctcagcatctccctgatcatgtggaacgctctctacacggctgagaaggtcatcattcgatggaccctgctcaccgaagcttgctatttcggggtccagttcttggtggtcactgccacgctagctgagacgggcctcatgtcc

SEQ ID NO: 22355 - DNA, 502 bp, Homo sapiens
  misc_feature 1..502: note = ENST00000528290
  source 1..502: mol_type = unassigned DNA; mol_type = unassigned DNA
aagccccggccgcgcagggcgccgcgcgcagtccagccggcccggccctgccctgccctgccctgtcctgccctgccctgccctgccctgccctgcactgcccggcccggcacgggcggcgcgatgtgaggcgtccgagcccggagcctccgcctggcatcagctccacgtagcccagcgccggcacgcgcgaggccccccttctgcagaggccgggctggaggagaagatggcggccaagcagcccccgcctctgatgaagaagcacagccagacggacctcgtgagccgcctgaagacccgcaagatcctcggcgtgggcggggaggatgacgacggggaggtgcatcgctccaagggtctggcagttcgtctctgctgtgctcttctccggcattgccatcatggcatctccctgatcatgtggaacgctctctacacggctgagaaggtcatcattcgatggaccctgctcaccgaagcttgctatttcggggtccag

SEQ ID NO: 22356 - DNA, 530 bp, Homo sapiens
  misc_feature 1..530: note = ENST00000533955
  source 1..530: mol_type = unassigned DNA; mol_type = unassigned DNA
ccggccctgccctgccctgccctgtcctgccctgccctgccctgccctgccctgcactgcccggcccggcacgggcggcgcgatgtgaggcgtccgagcccggagcctccgcctggcatcagctccacgtagcccagcgccggcacgcgcgaggccccccttctgcagaggccgggctggaggagaagatggcggccaagcagcccccgcctctgatgaagaagcacagccagacggacctcgtgagccgcctgaagacccgcaagatcctcggcgtgggcggggaggatgacgacggggaggtgcatcgctccaagatcagccaggtcttaggcaatgaaatcaagtttaccattcgggagcctttggggctcagggtctggcagttcgtctctgctgtgctcttctccggcattgccatcatggcgcttgccttccctgaccagcatctccctgatcatgtggaacgctctctacacggctgagaaggtcatcattcgatggaccctgctcaccgaagcttgctattt

SEQ ID NO: 22357 - DNA, 708 bp, Homo sapiens
  misc_feature 1..708: note = ENST00000531130
  source 1..708: mol_type = unassigned DNA; mol_type = unassigned DNA
agtccagccggcccggccctgccctgccctgccctgtcctgccctgccctgccctgccctgccctgcactgcccggcccggcacgggcggcgcgatgtgaggcgtccgagcccggagcctccgcctggcatcagctccacgtagcccagcgccggcacgcgcgaggccccccttctgcagaggccgggctggaggagaagatggcggccaagcagcccccgcctctgatgaagaagcacagccagacggacctcgtgagccgcctgaagacccgcaagatcctcggcgtgggcggggaggatgacgacggggaggtgcatcgctccaagatcagccaggtcttaggcaatgaaatcaagtttaccattcgggagcctttggggctcagggtctggcagttcgtctctgctgtgctcttctccggcattgccatcatggcgcttgccttccctgaccagctctatgatgcggtctttgatggagcccaggtgaccagcaagacccccatccgcctctacggcggtgccctcctcaatgctgcgcccacaccccggcctctgatgaagctctctgctggggatgtgctgccatcttgtggccattggtggaatacacccagtgggttggagcttgcagtcgccaccatctgcaaggagcgctcataagcatctccctgatcatgtggaacgctctctacacggctgagaa

SEQ ID NO: 22358 - DNA, 1078 bp, Homo sapiens
  misc_feature 1..1078: note = ENST00000531928
  source 1..1078: mol_type = unassigned DNA; mol_type = unassigned DNA
gccgcgcagggcgccgcgcgcagtccagccggcccggccctgccctgccctgccctgtcctgccctgccctgccctgccctgccctgcactgcccggcccggcacgggcggcgcgatgtgaggcgtccgagcccggagcctccgcctggcatcagctccacgtagcccagcgccggcacgcgcgaggcccggtctggaagctgggtaggaactgtggcctgaggccggtgtctcccctcagcccttctgcagaggccgggctggaggagaagatggcggccaagcagcccccgcctctgatgaagaagcacagccagacggacctcgtgagccgcctgaagacccgcaagatcctcggcgtgggcggggaggatgacgacggggaggtgcatcgctccaagatcagccaggtcttaggcaatgaaatcaagtttaccattcgggagcctttggggctcagggtctggcagttcgtctctgctgtgctcttctccggcattgccatcatggcgcttgccttccctgaccagctctatgatgcggtctttgatggagcccaggtgaccagcaagacccccatccgcctctacggcggtgccctcctcaatgctgcgcccacaccccggcctctgatgaagctctctgctggggatgtgctgccatcttgtggccattggtggaatacacccagtgggttggagcttgcagtcgccaccatctgcaaggagcgctcataagtgtgtgcactgcctctgggcgttgtggtacagagatggaggaagcccaggcccagcctctaggaattcacagcctagaggagaggcagatcaattcagtgtctgcaaaacccctcgcaccccccctattttatccccagagccacttctgtttgaaccacttctgtttcctctctaacctgagatgcacacgttaggatttggaattacaatttttaaagctcagcataggtaatatgcctctatttctacgaaatattctatggctccctattgcctacagaataaaggctgagctcctctggagttagggttgctggaataaaataaatgcacaccca

SEQ ID NO: 22359 - DNA, 586 bp, Homo sapiens
  misc_feature 1..586: note = ENST00000525667
  source 1..586: mol_type = unassigned DNA; mol_type = unassigned DNA
cttctctggctcaccagaggtgcctcctccatcctggcccctcgtgcaggggcccatctgtcaggctctggggctgcctccgagaacctgactcctacactgccacgcctgtgccttctccaggagcacactagatcccatggcgcttgccttccctgaccagctctatgatgcggtctttgatggagcccaggtgaccagcaagacccccatccgcctctacggcggtgccctcctcagtgagtactgctggggcgggccctgggggaggcgacgggcagctgggagacccagcggggctgaggagagcacgggggtccgtgcccgggcaccccttcctttcttcggccagatgctgcgcccacaccccggcctctgatgaagctctctgctggggatgtgctgccatcttgtggccattggtggaatacacccagtgggttggagcttgcagtcgccaccatctgcaaggagcgctcataagtgtgtgcactgcctctgggcgttgtggtacagagatggaggaagcccaggcccagcctctaggaattcacagcctagaggagaggcagatcaattcagtgtc

SEQ ID NO: 22360 - DNA, 1061 bp, Homo sapiens
  misc_feature 1..1061: note = ENST00000532921
  source 1..1061: mol_type = unassigned DNA; mol_type = unassigned DNA
ccggccctgccctgccctgccctgtcctgccctgccctgccctgccctgccctgcactgcccggcccggcacgggcggcgcgatgtgaggcgtccgagcccggagcctccgcctggcatcagctccacgtagcccagcgccggcacgcgcgaggccccccttctgcagaggccgggctggaggagaagatggcggccaagcagcccccgcctctgatgaagaagcacagccagacggacctcgtgagccgcctgaagacccgcaagatcctcggcgtgggcggggaggatgacgacggggaggtgcatcgctccaagatcagccaggtcttaggcaatgaaatcaagtttaccattcgggagcctttggggctcagggtctggcagttcgtctctgctgtgctcttctccggcattgccatcatggtgagcccccacccccagcccctgagatctggccccgtgtggctccctcagcccttctctggctcaccagaggtgcctcctccatcctggcccctcgtgcaggggcccatctgtcaggctctggggctgcctccgagaacctgactcctacactgccacgcctgtgccttctccaggagcacactagatcccatggtttgtggcctgactccttctcccaggaaccctggagttttctgtcctggcatgggggcgggtggggacaattgggtccagaccctggactgcccccaaggatgctgatcctgctcctggcggggaaggaagacgtctgtgggaagcatcagctgtcaccccccaccctctcccaagcgggacctctgagcccctctcgctgcccgcaggcgcttgccttccctgaccagctctatgatgcggtctttgatggagcccaggtgaccagcaagacccccatccgcctctacggcggtgccctcctcagtgagtactgctggggcgggccctgggggaggcgacgggcagctgggagacccagcggggctgaggagagcacgggggtccgtgcccgggcaccccttcctttcttcggccagatgctgcgcccacaccccggcc

SEQ ID NO: 22361 - DNA, 720 bp, Homo sapiens
  misc_feature 1..720: note = ENST00000525145
  source 1..720: mol_type = unassigned DNA; mol_type = unassigned DNA
cggcccggccctgccctgccctgccctgtcctgccctgccctgccctgccctgccctgcactgcccggcccggcacgggcggcgcgatgtgaggcgtccgagcccggagcctccgcctggcatcagctccacgtagcccagcgccggcacgcgcgaggccccccttctgcagaggccgggctggaggagaagatggcggccaagcagcccccgcctctgatgaagaagcacagccagacggacctcgtgagccgcctgaagacccgcaagatcctcggcgtgggcggggaggatgacgacggggaggtgcatcgctccaagatcagccaggtcttaggcaatgaaatcaagtttaccattcgggagcctttggggctcagggtctggcagttcgtctctgctgtgctcttctccggcattgccatcatggtgagcccccacccccagcccctgagatctggccccgtgtggctccctcagcccttctctggctcaccagaggtgcctcctccatcctggcccctcgtgcaggggcccatctgtcaggctctggggctgcctccgagaacctgactcctacactgccacgcctgtgccttctccaggagcacactagatcccatggcgcttgccttccctgaccagctctatgatgcggtctttgatggagcccaggtgaccagcaagacccccatccgcctctacggcggtgccctcctc

SEQ ID NO: 22362 - DNA, 556 bp, Homo sapiens
  misc_feature 1..556: note = ENST00000525683
  source 1..556: mol_type = unassigned DNA; mol_type = unassigned DNA
gtgcactccttctttctctctccaccagcacgtctgcgaggaagtgggaatgatggctccatttcacagatgaggaaaccgagactcagagcacaaggccacacagcaggaagagggcagctgtgattagagaagccagggccaccccggagccagcctctgaggcttcacctcaccccgtttacactgctgtctcctctgcatagatttggctgactgaggacgcgacagcccttctgcagaggccgggctggaggagaagatggcggccaagcagcccccgcctctgatgaagaagcacagccagacggacctcgtgagccgcctgaagacccgcaagatcctcggcgtgggcggggaggatgacgacggggaggtgcatcgctccaagatcagccaggtcttaggcaatgaaatcaagtttaccattcgggagcctttggggctcagggtctggcagttcgtctctgctgtgctcttctccggcattgccatcatggcgcttgccttccctgaccagctctatgatgcggtctttgatggagcccaggtgacc

SEQ ID NO: 22363 - DNA, 499 bp, Homo sapiens
  misc_feature 1..499: note = ENST00000525138
  source 1..499: mol_type = unassigned DNA; mol_type = unassigned DNA
cccatgtgaatgaccgtcgagacaggaaaaacctcccagtgacttctgagcggtgatggaggccatcagagggcctgatccccttgcccacagcagcagcttcagacccccgggggaggagcccaggaatgcctccttcttgccacctgctctgccctgacctctcgccctcttcagcacacccttctgcagaggccgggctggaggagaagatggcggccaagcagcccccgcctctgatgaagaagcacagccagacggacctcgtgagccgcctgaagacccgcaagatcctcggcgtgggcggggaggatgacgacggggaggtgcatcgctccaagatcagccaggtcttaggcaatgaaatcaagtttaccattcgggagcctttggggctcagggtctggcagttcgtctctgctgtgctcttctccggcattgccatcatggcgcttgccttccctgaccagctctatgatgcggtctttgatggagccca

SEQ ID NO: 22364 - DNA, 642 bp, Homo sapiens
  misc_feature 1..642: note = ENST00000533443
  source 1..642: mol_type = unassigned DNA; mol_type = unassigned DNA
agagtcgaaaaggacaggaattcttcatgttctgcccatgtgaatgaccgtcgagacaggaaaaacctcccagtgacttctgagcggtgatggaggccatcagagggcctgatccccttgcccacagcagcagcttcagacccccgggggaggagcccaggaatgcctccttcttgccacctgctctgccctgacctctcgccctcttcagcacaggcagctgtgattagagaagccagggccaccccggagccagcctctgaggcttcacctcaccccgtttacactgctgtctcctctgcatagatttggctgactgaggacgcgacagcccttctgcagaggccgggctggaggagaagatggcggccaagcagcccccgcctctgatgaagaagcacagccagacggacctcgtgagccgcctgaagacccgcaagatcctcggcgtgggcggggaggatgacgacggggaggtgcatcgctccaagatcagccaggtcttaggcaatgaaatcaagtttaccattcgggagcctttggggctcagggtctggcagttcgtctctgctgtgctcttctccggcattgccatcatggcgcttgccttccctgaccagctctatgatgcggtctttgatg

SEQ ID NO: 22365 - DNA, 602 bp, Homo sapiens
  misc_feature 1..602: note = ENST00000530035
  source 1..602: mol_type = unassigned DNA; mol_type = unassigned DNA
cgcgggccgccagactcggtaagccccggccgcgcagggcgccgcgcgcagtccagccggcccggccctgccctgccctgccctgtcctgccctgccctgccctgccctgccctgcactgcccggcccggcacgggcggcgcgatgtgaggcgtccgagcccggagcctccgcctggcatcagctccacgtagcccagcgccggcacgcgcgaggcccggcagctgtgattagagaagccagggccaccccggagccagcctctgaggcttcacctcaccccgtttacactgctgtctcctctgcatagatttggctgactgaggacgcgacagcccttctgcagaggccgggctggaggagaagatggcggccaagcagcccccgcctctgatgaagaagcacagccagacggacctcgtgagccgcctgaagacccgcaagatcctcggcgtgggcggggaggatgacgacggggaggtgcatcgctccaagatcagccaggtcttaggcaatgaaatcaagtttaccattcgggagcctttggggctcagggtctggcagttcgtctctgctgtgctcttctccggcattgccatcatg

SEQ ID NO: 22366 - DNA, 533 bp, Homo sapiens
  misc_feature 1..533: note = ENST00000527685
  source 1..533: mol_type = unassigned DNA; mol_type = unassigned DNA
agagcctcgcgggggagccgggagcctggtttccccgccaacccccatcccgcccgccccggcggccaccctgggggcgaggcagcccggcgcgtgggaggggacggcgcgccattggcttgtgcgcggaaccgagaggagggaccagcgcgggccgccagactcgggcagctgtgattagagaagccagggccaccccggagccagcctctgaggcttcacctcaccccgtttacactgctgtctcctctgcatagatttggctgactgaggacgcgacagcccttctgcagaggccgggctggaggagaagatggcggccaagcagcccccgcctctgatgaagaagcacagccagacggacctcgtgagccgcctgaagacccgcaagatcctcggcgtgggcggggaggatgacgacggggaggtgcatcgctccaagatcagccaggtcttaggcaatgaaatcaagtttaccattcgggagcctttggggctcagggtctggcagttcgtctctgctgtgctcttct

SEQ ID NO: 22367 - DNA, 571 bp, Homo sapiens
  misc_feature 1..571: note = ENST00000533937
  source 1..571: mol_type = unassigned DNA; mol_type = unassigned DNA
attgttcccggcaggaggagtgcgcggcgcaaacttgcgagttcccccagtctttgcccccgcagggccgcggacggaggtggtggcggagttcccgctgcccacaagtctggcccgaccttctggggtgggggcctgggggcaggggccctgggccggagaacccggggccgcctaacggctcggagctcaccgccgggggacaccggcgctgaggcctgggtctcagaaagtggggcagctgtgattagagaagccagggccaccccggagccagcctctgaggcttcacctcaccccgtttacactgctgtctcctctgcatagatttggctgactgaggacgcgacagcccttctgcagaggccgggctggaggagaagatggcggccaagcagcccccgcctctgatgaagaagcacagccagacggacctcgtgagccgcctgaagacccgcaagatcctcggcgtgggcggggaggatgacgacggggaggtgcatcgctccaagatcagccaggtcttaggcaatgaaatcaagtttaccattcgggagcctttggggctcag

SEQ ID NO: 22368 - DNA, 3567 bp, Homo sapiens
  misc_feature 1..3567: note = ENST00000616990
  source 1..3567: mol_type = unassigned DNA; mol_type = unassigned DNA
attacacacttgggtatcaccgccagccaaagcagtcccttccatttcaggcaccggcctgggcccgggagacaccgcaaggctatttaagatggtgtggtttgcccatctacgttgatcgtcccaagaaaggggcaccgtctgcagaacttgccaggaaagtcatcctgggcggcgcgggccacgccagggtctccccgcgcggcttcctcccccggcgccttctctcgggcgcgcgtgcgccccctgcaggcggcccccgggagagcctcgcgggggagccgggagcctggtttccccgccaacccccatcccgcccgccccggcggccaccctgggggcgaggcagcccggcgcgtgggaggggacggcgcgccattggcttgtgcgcggaaccgagaggagggaccagcgcgggccgccagactcgcccttctgcagaggccgggctggaggagaagatggcggccaagcagcccccgcctctgatgaagaagcacagccagacggacctcgtgagccgcctgaagacccgcaagatcctcggcgtgggcggggaggatgacgacggggaggtgcatcgctccaagatcagccaggtcttaggcaatgaaatcaagtttaccattcgggagcctttggggctcagggtctggcagttcgtctctgctgtgctcttctccggcattgccatcatggcgcttgccttccctgaccagctctatgatgcggtctttgatggagcccaggtgaccagcaagacccccatccgcctctacggcggtgccctcctcagcatctccctgatcatgtggaacgctctctacacggctgagaaggtcatcattcgatggaccctgctcaccgaagcttgctatttcggggtccagttcttggtggtcactgccacgctagctgagacgggcctcatgtccctggggatcctgctgctcctggtcagccgcctcctttttgtcgtcatcagcatttactactattaccaagtcggccgaagacccaagaaggcctagttgcccgctgggcctggggccctgcccatgcctgggccagagtggcgctggggcctcggcttccctttggctcctggaaggcaggagggtcccctgccctgccccagtcctgccccagggaggcagggggtggggggccttcctttcctcctgggcaccccgtgtgctgtgatctcctgggctttcaggcttgacatgctggtctggggagagacagggcctctgctgccctgttcttcaccctcacagtgatacctcctttccttgggtctcttggcctccagaccccctcaatagacactgactaaagtcaggctggagtcatgagggtagtgggctaagtcgagggtccagcctcttctgccaggaagcccttcttgcttttgagagaggctgtgaccaccccccatccttctccctacactcccagccaacctagtgcccaagcagctaaacttggcttccttctaatcctggaaaaccctgtacccctcctcctcaatctggccctctccacatgcacaccctgaaaacacacacagacacacaacacacacacatacacacccctgaacacacacacagacacacatacacccatgatgtgagcaaacacacacacgtgcgccttcatagcccagccaagggcatgcaggcagggtgtgctgcctgagatggcacctccctttcagccattcttcaagaatgggccacacacagctagaagtcctctcccagctagaagtcctgtccccactctcctggcctgacaagatgagctctcctgggaccttgctctagggcactctgcctctaccctaggacactggaatgccctgggagccccctccctgcaaccagcctgagttcagccccacggacaaagggacacacagcccccaatggagaccattgtaagtggtggggctgggagaggaggaacagaaggaaagccatagcgctctcttgccccttggcatgtaccccaaggcctgatggccactgggctcagcctgtcccccactcctgcctgcttcccggtgagctgccccccacacgtgcagcccgggctgcctccagggtctggctgagtgggatcaggtggccctccaactcagcacaggaaataagtagaaacatttcagcaggccacctcccctcatcttccccgccctgtccagcgccctggcaaaggctgacaactggctgtcttggggccgaacagcccctgccctgcctctgagggcccaccagcctgtgctgcatacccaccgcccagcttctccctgagggcccaccagcctgtgctgcatacccaccgcccagcttctccctgagggcccaccagcctgtgctgtacaccccgttagtccctgatcccaaccttctccctcctgccagcacaccgatgcacacaccggaagtggcgagcccaagccctggggacaggtgtagggagaaaagcagccccaggcctcagactcgcttcccatcctggcatagagtgggggatggctggagggtgtctataggtacagcccgctctggctgctgccaggtgggcccctgccaggggtcctcacccctgtccaccctgtgcctggctgtccctgcacccagatacagcaacatggcctgtacccagcagagtggtggcaccaccatggttacagcggatgccccgagactctgcttggtaaacgtggcagagcagaatgggaggctggaccctgaggaagggcccctctcctggcatctgtctcttgctacctaagcctgtgcctctccctaaagagctgcctccctgctgccgagccctggtctggccacgagccaccactgcctcccgctgctgcccacaggtggtgccgccaatgggcagtgccctcaggccgaagcctcaatcccccatctgagccaggcctaatcctctaatagtgatggttggtttgtcctcccataactgcaggtggattccacctggggaatgaggctgcgtgtcgggcgtctgctggccctgagacatccagtcttccacactcaactgtgggatgggagggtggcgtggccttaccccatgaggctgtccaggctctggcacacagctgtgctcacaaaatactgggtggcttggttagagctaattgtagtggagcctgcaggtgagggtgagggagggggctgcaggtcaggtaagatctggaagacagacgtacagcttggagggcagggggactctaaggcaaggagatttacagttgggaaggaggcagtggcagaggggtgagggacaggggcccttaagtccagcgaggaaagctcggtgtgggcccgctctacgctccgtttggggtgacctggaacgcctcttctcccagctccctccagccatcagcagcctcttgtcaagcttctgcctcgccccagtctatccccaaccccaaatcaagaccacctttcttcacggtcactatttattctttgttcctttttctttttgtaagaaacattcacaaaaaccagtgcaaaaccatca

SEQ ID NO: 22369 - DNA, 3683 bp, Homo sapiens
  misc_feature 1..3683: note = ENST00000308212
  source 1..3683: mol_type = unassigned DNA; mol_type = unassigned DNA
attacacacttgggtatcaccgccagccaaagcagtcccttccatttcaggcaccggcctgggcccgggagacaccgcaaggctatttaagatggtgtggtttgcccatctacgttgatcgtcccaagaaaggggcaccgtctgcagaacttgccaggaaagtcatcctgggcggcgcgggccacgccagggtctccccgcgcggcttcctcccccggcgccttctctcgggcgcgcgtgcgccccctgcaggcggcccccgggagagcctcgcgggggagccgggagcctggtttccccgccaacccccatcccgcccgccccggcggccaccctgggggcgaggcagcccggcgcgtgggaggggacggcgcgccattggcttgtgcgcggaaccgagaggagggaccagcgcgggccgccagactcgggcagctgtgattagagaagccagggccaccccggagccagcctctgaggcttcacctcaccccgtttacactgctgtctcctctgcatagatttggctgactgaggacgcgacagcccttctgcagaggccgggctggaggagaagatggcggccaagcagcccccgcctctgatgaagaagcacagccagacggacctcgtgagccgcctgaagacccgcaagatcctcggcgtgggcggggaggatgacgacggggaggtgcatcgctccaagatcagccaggtcttaggcaatgaaatcaagtttaccattcgggagcctttggggctcagggtctggcagttcgtctctgctgtgctcttctccggcattgccatcatggcgcttgccttccctgaccagctctatgatgcggtctttgatggagcccaggtgaccagcaagacccccatccgcctctacggcggtgccctcctcagcatctccctgatcatgtggaacgctctctacacggctgagaaggtcatcattcgatggaccctgctcaccgaagcttgctatttcggggtccagttcttggtggtcactgccacgctagctgagacgggcctcatgtccctggggatcctgctgctcctggtcagccgcctcctttttgtcgtcatcagcatttactactattaccaagtcggccgaagacccaagaaggcctagttgcccgctgggcctggggccctgcccatgcctgggccagagtggcgctggggcctcggcttccctttggctcctggaaggcaggagggtcccctgccctgccccagtcctgccccagggaggcagggggtggggggccttcctttcctcctgggcaccccgtgtgctgtgatctcctgggctttcaggcttgacatgctggtctggggagagacagggcctctgctgccctgttcttcaccctcacagtgatacctcctttccttgggtctcttggcctccagaccccctcaatagacactgactaaagtcaggctggagtcatgagggtagtgggctaagtcgagggtccagcctcttctgccaggaagcccttcttgcttttgagagaggctgtgaccaccccccatccttctccctacactcccagccaacctagtgcccaagcagctaaacttggcttccttctaatcctggaaaaccctgtacccctcctcctcaatctggccctctccacatgcacaccctgaaaacacacacagacacacaacacacacacatacacacccctgaacacacacacagacacacatacacccatgatgtgagcaaacacacacacgtgcgccttcatagcccagccaagggcatgcaggcagggtgtgctgcctgagatggcacctccctttcagccattcttcaagaatgggccacacacagctagaagtcctctcccagctagaagtcctgtccccactctcctggcctgacaagatgagctctcctgggaccttgctctagggcactctgcctctaccctaggacactggaatgccctgggagccccctccctgcaaccagcctgagttcagccccacggacaaagggacacacagcccccaatggagaccattgtaagtggtggggctgggagaggaggaacagaaggaaagccatagcgctctcttgccccttggcatgtaccccaaggcctgatggccactgggctcagcctgtcccccactcctgcctgcttcccggtgagctgccccccacacgtgcagcccgggctgcctccagggtctggctgagtgggatcaggtggccctccaactcagcacaggaaataagtagaaacatttcagcaggccacctcccctcatcttccccgccctgtccagcgccctggcaaaggctgacaactggctgtcttggggccgaacagcccctgccctgcctctgagggcccaccagcctgtgctgcatacccaccgcccagcttctccctgagggcccaccagcctgtgctgcatacccaccgcccagcttctccctgagggcccaccagcctgtgctgtacaccccgttagtccctgatcccaaccttctccctcctgccagcacaccgatgcacacaccggaagtggcgagcccaagccctggggacaggtgtagggagaaaagcagccccaggcctcagactcgcttcccatcctggcatagagtgggggatggctggagggtgtctataggtacagcccgctctggctgctgccaggtgggcccctgccaggggtcctcacccctgtccaccctgtgcctggctgtccctgcacccagatacagcaacatggcctgtacccagcagagtggtggcaccaccatggttacagcggatgccccgagactctgcttggtaaacgtggcagagcagaatgggaggctggaccctgaggaagggcccctctcctggcatctgtctcttgctacctaagcctgtgcctctccctaaagagctgcctccctgctgccgagccctggtctggccacgagccaccactgcctcccgctgctgcccacaggtggtgccgccaatgggcagtgccctcaggccgaagcctcaatcccccatctgagccaggcctaatcctctaatagtgatggttggtttgtcctcccataactgcaggtggattccacctggggaatgaggctgcgtgtcgggcgtctgctggccctgagacatccagtcttccacactcaactgtgggatgggagggtggcgtggccttaccccatgaggctgtccaggctctggcacacagctgtgctcacaaaatactgggtggcttggttagagctaattgtagtggagcctgcaggtgagggtgagggagggggctgcaggtcaggtaagatctggaagacagacgtacagcttggagggcagggggactctaaggcaaggagatttacagttgggaaggaggcagtggcagaggggtgagggacaggggcccttaagtccagcgaggaaagctcggtgtgggcccgctctacgctccgtttggggtgacctggaacgcctcttctcccagctccctccagccatcagcagcctcttgtcaagcttctgcctcgccccagtctatccccaaccccaaatcaagaccacctttcttcacggtcactatttattctttgttcctttttctttttgtaagaaacattcacaaaaaccagtgcaaaaccatca

SEQ ID NO: 22370 - DNA, 195 bp, Homo sapiens
  misc_feature 1..195: note = ENST00000627720
  source 1..195: mol_type = unassigned DNA; mol_type = unassigned DNA
atggcggccaagcagcccccgcctctgatgaagaagcacagccagacggacctcgtgagccgcctgaagacccgcaagatcctcggcgtgggcggggaggatgacgacggggaggtgcatcgctccaagggtctggcagttcgtctctgctgtgctcttctccggcattgccatcatggcgcttgccttccctga

SEQ ID NO: 22371 - DNA, 3675 bp, Homo sapiens
  misc_feature 1..3675: note = ENST00000264811
  source 1..3675: mol_type = unassigned DNA; mol_type = unassigned DNA
aattaacttctcttagtcttcaagcctagtacttgaatgtcaagtacctgcaagcctcaatgtccaagacttttaagagcggaaggtacgatgagttccatctttactagggtcacaaggaaggcatgggtatatggaaatttttattattattccatctgaatatcattttctagagaataggagcttttgttctgaagggctgccggcttccttctgggatctagcagccagggttagatcacaggtgtcactttcaggcgagtagttagcaacggtatcgctagcaactgagccgacccctgcagccagaggtttgcagtgggtagtgtgtattccagaaagggccctgacatgtgaaaggaaggaatgtgccctaatattctacagttgttttatcgttgctactgattaggtccatggagggaagcccatccctgagacgcatgacagtgatgcgggagaagggccggcgccaggctgtcaggggcccggccttcatgttcaatgaccgcggcaccagcctcaccgccgaggaggagcgcttcctcgacgccgccgagtacggcaacatcccagtggtgcgcaagatgctggaggagtccaagacgctgaacgtcaactgcgtggactacatgggccagaacgcgctgcagctggctgtgggcaacgagcacctggaggtgaccgagctgctgctcaagaaggagaacctggcgcgcattggcgacgccctgctgctcgccatcagcaagggctacgtgcgcatcgtagaggccatcctcaaccaccctggcttcgcggccagcaagcgtctcactctgagcccctgtgagcaggagctgcaggacgacgacttctacgcttacgacgaggacggcacgcgcttctcgccggacatcacccccatcatcctggcggcgcactgccagaaatacgaagtggtgcacatgctgctgatgaagggtgccaggatcgagcggccgcacgactatttctgcaagtgcggggactgcatggagaagcagaggcacgactccttcagccactcacgctcgaggatcaatgcctacaaggggctggccagcccggcttacctctcattgtccagcgaggacccggtgcttacggccctagagctcagcaacgagctggccaagctggccaacatagagaaggagttcaagaatgactatcggaagctctccatgcaatgcaaagactttgtagtgggtgtgctggatctctgccgagactcagaagaggtagaagccattctgaatggagatctggaatcagcagagcctctggaggtacacaggcacaaagcttcattaagtcgtgtcaaacttgccattaagtatgaagtcaaaaagtttgtggctcatcccaactgccagcagcagctcttgacgatctggtatgagaacctctcaggcctaagggagcagaccatagctatcaagtgtctcgttgtgctggtcgtggccctgggccttccattcctggccattggctactggatcgcaccttgcagcaggctggggaaaattctgcgaagcccttttatgaagtttgtagcacatgcagcttctttcatcatcttcctgggtctgcttgtgttcaatgcctcagacaggttcgaaggcatcaccacgctgcccaatatcacagttactgactatcccaaacagatcttcagggtgaaaaccacccagtttacatggactgaaatgctaattatggtctgggttcttggaatgatgtggtctgaatgtaaagagctctggctggaaggacctagggaatacattttgcagttgtggaatgtgcttgactttgggatgctgtccatcttcattgctgctttcacagccagattcctagctttccttcaggcaacgaaggcacaacagtatgtggacagttacgtccaagagagtgacctcagtgaagtgacactcccaccagagatacagtatttcacttatgctagagataaatggctcccttctgaccctcagattatatctgaaggcctttatgccatagctgttgtgctcagcttctctcggattgcgtacatcctccctgcaaatgagagctttggccccctgcagatctctcttggaaggactgtaaaggacatattcaagttcatggtcctctttattatggtgttttttgcctttatgattggcatgttcatactttattcttactaccttggggctaaagttaatgctgcttttaccactgtagaagaaagtttcaagactttattttggtcaatatttgggttgtctgaagtgacttccgttgtgctcaaatatgatcacaaattcatagaaaatattggatacgttctttatggaatatacaatgtaactatggtggtcgttttactcaacatgctaattgctatgattaatagctcatatcaagaaattgaggatgacagtgatgtagaatggaagtttgctcgttcaaaactttggttatcctattttgatgatggaaaaacattacctccacctttcagtctagttcctagtccaaaatcatttgtttatttcatcatgcgaattgttaactttcccaaatgcagaaggagaaggcttcagaaggatatagaaatgggaatgggtaactcaaagtccaggttaaacctcttcactcagtctaactcaagagtttttgaatcacacagttttaacagcattctcaatcagccaacacgttatcagcagataatgaaaagacttataaagcggtatgttttgaaagcacaagtagacaaagaaaatgatgaagttaatgaaggtgaattaaaagaaatcaagcaagatatctccagccttcgttatgaacttttggaagacaagagccaagcaactgaggaattagccattctaattcataaacttagtgagaaactgaatcccagcatgctgagatgtgaatgatgcagcaacctggatttggctttgactatagcacaaatgtgggcaataatatttctaagtatgaaatacttgaaaaactatgatgtaaatttttagtattaactacctttatcatgtgaacctttaaaagttagctcttaatggttttattgttttatcacatgaaaatgcattttatttgtctgctttgacattacagtggcataccattgtgttgaaaagcccaatattactatattattgaaacttttattcattttagagtaaactccacatctttgcactacctgtttgcctccaagagactatcagttccttggggacagggaccatgtcttattcatctttgtgtctccagcatctagtacagtgcctggtatatagtaggtgctcaataaatgttgaaaccaactgaactgccaacaaaataaaaataaaaagtcttcactatgtagcataccttcccttgtccaagttctgaagaggttttttttttttttttttaatagaaactgaagacattttacaaccagctatgacttggtaagacattcttagaattttaggtgtcactgataatcctagaaccactgagccccaagtgaagaatttaacaacaaaatgggttaatgaaaaatataattacattgtatatttaagtttcatagaattatttaaaacaacacattaaagatttttctaaaatata

SEQ ID NO: 22372 - DNA, 3548 bp, Homo sapiens
  misc_feature 1..3548: note = ENST00000379645
  source 1..3548: mol_type = unassigned DNA; mol_type = unassigned DNA
gggaagactgcactgccgcgaaggcggaggaggccggcagccggcacccccacactcggaccgcagccggcgcgatgtccaccaaggtcaggaagtgcaaagaacaagcaagggtgaccttcccggcgccggaggaggaggaagacgagggcgaggacgagggcgcggagccgcagcgccgccgccggggctggaggggcgtcaacggggggctggagccgcgctcggcgccctcgcagcgggagccgcacggctactgcccgccgcccttctcccacgggccggacctgtccatggagggaagcccatccctgagacgcatgacagtgatgcgggagaagggccggcgccaggctgtcaggggcccggccttcatgttcaatgaccgcggcaccagcctcaccgccgaggaggagcgcttcctcgacgccgccgagtacggcaacatcccagtggtgcgcaagatgctggaggagtccaagacgctgaacgtcaactgcgtggactacatgggccagaacgcgctgcagctggctgtgggcaacgagcacctggaggtgaccgagctgctgctcaagaaggagaacctggcgcgcattggcgacgccctgctgctcgccatcagcaagggctacgtgcgcatcgtagaggccatcctcaaccaccctggcttcgcggccagcaagcgtctcactctgagcccctgtgagcaggagctgcaggacgacgacttctacgcttacgacgaggacggcacgcgcttctcgccggacatcacccccatcatcctggcggcgcactgccagaaatacgaagtggtgcacatgctgctgatgaagggtgccaggatcgagcggccgcacgactatttctgcaagtgcggggactgcatggagaagcagaggcacgactccttcagccactcacgctcgaggatcaatgcctacaaggggctggccagcccggcttacctctcattgtccagcgaggacccggtgcttacggccctagagctcagcaacgagctggccaagctggccaacatagagaaggagttcaagaatgactatcggaagctctccatgcaatgcaaagactttgtagtgggtgtgctggatctctgccgagactcagaagaggtagaagccattctgaatggagatctggaatcagcagagcctctggaggtacacaggcacaaagcttcattaagtcgtgtcaaacttgccattaagtatgaagtcaaaaagtttgtggctcatcccaactgccagcagcagctcttgacgatctggtatgagaacctctcaggcctaagggagcagaccatagctatcaagtgtctcgttgtgctggtcgtggccctgggccttccattcctggccattggctactggatcgcaccttgcagcaggctggggaaaattctgcgaagcccttttatgaagtttgtagcacatgcagcttctttcatcatcttcctgggtctgcttgtgttcaatgcctcagacaggttcgaaggcatcaccacgctgcccaatatcacagttactgactatcccaaacagatcttcagggtgaaaaccacccagtttacatggactgaaatgctaattatggtctgggttcttggaatgatgtggtctgaatgtaaagagctctggctggaaggacctagggaatacattttgcagttgtggaatgtgcttgactttgggatgctgtccatcttcattgctgctttcacagccagattcctagctttccttcaggcaacgaaggcacaacagtatgtggacagttacgtccaagagagtgacctcagtgaagtgacactcccaccagagatacagtatttcacttatgctagagataaatggctcccttctgaccctcagattatatctgaaggcctttatgccatagctgttgtgctcagcttctctcggattgcgtacatcctccctgcaaatgagagctttggccccctgcagatctctcttggaaggactgtaaaggacatattcaagttcatggtcctctttattatggtgttttttgcctttatgattggcatgttcatactttattcttactaccttggggctaaagttaatgctgcttttaccactgtagaagaaagtttcaagactttattttggtcaatatttgggttgtctgaagtgacttccgttgtgctcaaatatgatcacaaattcatagaaaatattggatacgttctttatggaatatacaatgtaactatggtggtcgttttactcaacatgctaattgctatgattaatagctcatatcaagaaattgaggatgacagtgatgtagaatggaagtttgctcgttcaaaactttggttatcctattttgatgatggaaaaacattacctccacctttcagtctagttcctagtccaaaatcatttgtttatttcatcatgcgaattgttaactttcccaaatgcagaaggagaaggcttcagaaggatatagaaatgggaatgggtaactcaaagtccaggttaaacctcttcactcagtctaactcaagagtttttgaatcacacagttttaacagcattctcaatcagccaacacgttatcagcagataatgaaaagacttataaagcggtatgttttgaaagcacaagtagacaaagaaaatgatgaagttaatgaaggtgaattaaaagaaatcaagcaagatatctccagccttcgttatgaacttttggaagacaagagccaagcaactgaggaattagccattctaattcataaacttagtgagaaactgaatcccagcatgctgagatgtgaatgatgcagcaacctggatttggctttgactatagcacaaatgtgggcaataatatttctaagtatgaaatacttgaaaaactatgatgtaaatttttagtattaactacctttatcatgtgaacctttaaaagttagctcttaatggttttattgttttatcacatgaaaatgcattttatttgtctgctttgacattacagtggcataccattgtgttgaaaagcccaatattactatattattgaaacttttattcattttagagtaaactccacatctttgcactacctgtttgcctccaagagactatcagttccttggggacagggaccatgtcttattcatctttgtgtctccagcatctagtacagtgcctggtatatagtaggtgctcaataaatgttgaaaccaactgaactgccaacaaaataaaaataaaaagtcttcactatgtagcataccttcccttgtccaagttctgaagaggttttttttttttttttttaatagaaactgaagacattttacaaccagctatgacttggtaagacattcttagaattttaggtgtcactgataatcctagaaccactgagccccaagtgaagaatttaacaacaaaatgggttaatgaaaaatataattacattgtatatttaagtttcatagaattatttaaaacaacacattaaagatttttctaaaatat

SEQ ID NO: 22373 - DNA, 2700 bp, Homo sapiens
  misc_feature 1..2700: note = ENST00000506449
  source 1..2700: mol_type = unassigned DNA; mol_type = unassigned DNA
gggccctgacatgtgaaaggaaggaatgtgccctaatattctacagttgttttatcgttgctactgattaggtccatggagggaagcccatccctgagacgcatgacagtgatgcgggagaagggccggcgccaggctgtcaggggcccggccttcatgttcaatgaccgcggcaccagcctcaccgccgaggaggagcgcttcctcgacgccgccgagtacggcaacatcccagtggtgcgcaagatgctggaggagtccaagacgctgaacgtcaactgcgtggactacatgggccagaacgcgctgcagctggctgtgggcaacgagcacctggaggtgaccgagctgctgctcaagaaggagaacctggcgcgcattggcgacgccctgctgctcgccatcagcaagggctacgtgcgcatcgtagaggccatcctcaaccaccctggcttcgcggccagcaagcgtctcactctgagcccctgtgagcaggagctgcaggacgacgacttctacgcttacgacgaggacggcacgcgcttctcgccggacatcacccccatcatcctggcggcgcactgccagaaatacgaagtggtgcacatgctgctgatgaagggtgccaggatcgagcggccgcacgactatttctgcaagtgcggggactgcatggagaagcagaggcacgactccttcagccactcacgctcgaggatcaatgcctacaaggggctggccagcccggcttacctctcattgtccagcgaggacccggtgcttacggccctagagctcagcaacgagctggccaagctggccaacatagagaaggagttcaagatctcagagcaagttgaaaactccaaattccgtttagagacagtagaaaagcatttagaatgactatcggaagctctccatgcaatgcaaagactttgtagtgggtgtgctggatctctgccgagactcagaagaggtagaagccattctgaatggagatctggaatcagcagagcctctggaggtacacaggcacaaagcttcattaagtcgtgtcaaacttgccattaagtatgaagtcaaaaagtttgtggctcatcccaactgccagcagcagctcttgacgatctggtatgagaacctctcaggcctaagggagcagaccatagctatcaagtgtctcgttgtgctggtcgtggccctgggccttccattcctggccattggctactggatcgcaccttgcagcaggctggggaaaattctgcgaagcccttttatgaagtttgtagcacatgcagcttctttcatcatcttcctgggtctgcttgtgttcaatgcctcagacaggttcgaaggcatcaccacgctgcccaatatcacagttactgactatcccaaacagatcttcagggtgaaaaccacccagtttacatggactgaaatgctaattatggtctgggttcttggaatgatgtggtctgaatgtaaagagctctggctggaaggacctagggaatacattttgcagttgtggaatgtgcttgactttgggatgctgtccatcttcattgctgctttcacagccagattcctagctttccttcaggcaacgaaggcacaacagtatgtggacagttacgtccaagagagtgacctcagtgaagtgacactcccaccagagatacagtatttcacttatgctagagataaatggctcccttctgaccctcagattatatctgaaggcctttatgccatagctgttgtgctcagcttctctcggattgcgtacatcctccctgcaaatgagagctttggccccctgcagatctctcttggaaggactgtaaaggacatattcaagttcatggtcctctttattatggtgttttttgcctttatgattggcatgttcatactttattcttactaccttggggctaaagttaatgctgcttttaccactgtagaagaaagtttcaagactttattttggtcaatatttgggttgtctgaagtgacttccgttgtgctcaaatatgatcacaaattcatagaaaatattggatacgttctttatggaatatacaatgtaactatggtggtcgttttactcaacatgctaattgctatgattaatagctcatatcaagaaattgaggatgacagtgatgtagaatggaagtttgctcgttcaaaactttggttatcctattttgatgatggaaaaacattacctccacctttcagtctagttcctagtccaaaatcatttgtttatttcatcatgcgaattgttaactttcccaaatgcagaaggagaaggcttcagaaggatatagaaatgggaatgggtaactcaaagtccaggttaaacctcttcactcagtctaactcaagagtttttgaatcacacagttttaacagcattctcaatcagccaacacgttatcagcagataatgaaaagacttataaagcggtatgttttgaaagcacaagtagacaaagaaaatgatgaagttaatgaaggtgaattaaaagaaatcaagcaagatatctccagccttcgttatgaacttttggaagacaagagccaagcaactgaggaattagccattctaattcataaacttagtgagaaactgaatcccagcatgctgagatgtgaatgatgcagcaacctggatttggc

SEQ ID NO: 22374 - DNA, 2382 bp, Homo sapiens
  misc_feature 1..2382: note = ENST00000513531
  source 1..2382: mol_type = unassigned DNA; mol_type = unassigned DNA
atggagggaagcccatccctgagacgcatgacagtgatgcgggagaagggccggcgccaggctgtcaggggcccggccttcatgttcaatgaccgcggcaccagcctcaccgccgaggaggagcgcttcctcgacgccgccgagtacggcaacatcccagtggtgcgcaagatgctggaggagtccaagacgctgaacgtcaactgcgtggactacatgggccagaacgcgctgcagctggctgtgggcaacgagcacctggaggtgaccgagctgctgctcaagaaggagaacctggcgcgcattggcgacgccctgctgctcgccatcagcaagggctacgtgcgcatcgtagaggccatcctcaaccaccctggcttcgcggccagcaagcgtctcactctgagcccctgtgagcaggagctgcaggacgacgacttctacgcttacgacgaggacggcacgcgcttctcgccggacatcacccccatcatcctggcggcgcactgccagaaatacgaagtggtgcacatgctgctgatgaagggtgccaggatcgagcggccgcacgactatttctgcaagtgcggggactgcatggagaagcagaggcacgactccttcagccactcacgctcgaggatcaatgcctacaaggggctggccagcccggcttacctctcattgtccagcgaggacccggtgcttacggccctagagctcagcaacgagctggccaagctggccaacatagagaaggagttcaagaatgactatcggaagctctccatgcaatgcaaagactttgtagtgggtgtgctggatctctgccgagactcagaagaggtagaagccattctgaatggagatctggaatcagcagagcctctggaggtacacaggcacaaagcttcattaagtcgtgtcaaacttgccattaagtatgaagtcaaaaagctggggaaaattctgcgaagcccttttatgaagtttgtagcacatgcagcttctttcatcatcttcctgggtctgcttgtgttcaatgcctcagacaggttcgaaggcatcaccacgctgcccaatatcacagttactgactatcccaaacagatcttcagggtgaaaaccacccagtttacatggactgaaatgctaattatggtctgggttcttggaatgatgtggtctgaatgtaaagagctctggctggaaggacctagggaatacattttgcagttgtggaatgtgcttgactttgggatgctgtccatcttcattgctgctttcacagccagattcctagctttccttcaggcaacgaaggcacaacagtatgtggacagttacgtccaagagagtgacctcagtgaagtgacactcccaccagagatacagtatttcacttatgctagagataaatggctcccttctgaccctcagattatatctgaaggcctttatgccatagctgttgtgctcagcttctctcggattgcgtacatcctccctgcaaatgagagctttggccccctgcagatctctcttggaaggactgtaaaggacatattcaagttcatggtcctctttattatggtgttttttgcctttatgattggcatgttcatactttattcttactaccttggggctaaagttaatgctgcttttaccactgtagaagaaagtttcaagactttattttggtcaatatttgggttgtctgaagtgacttccgttgtgctcaaatatgatcacaaattcatagaaaatattggatacgttctttatggaatatacaatgtaactatggtggtcgttttactcaacatgctaattgctatgattaatagctcatatcaagaaattgaggatgacagtgatgtagaatggaagtttgctcgttcaaaactttggttatcctattttgatgatggaaaaacattacctccacctttcagtctagttcctagtccaaaatcatttgtttatttcatcatgcgaattgttaactttcccaaatgcagaaggagaaggcttcagaaggatatagaaatgggaatgggtaactcaaagtccaggttaaacctcttcactcagtctaactcaagagtttttgaatcacacagttttaacagcattctcaatcagccaacacgttatcagcagataatgaaaagacttataaagcggtatgttttgaaagcacaagtagacaaagaaaatgatgaagttaatgaaggtgaattaaaagaaatcaagcaagatatctccagccttcgttatgaacttttggaagacaagagccaagcaactgaggaattagccattctaattcataaacttagtgagaaactgaatcccagcatgctgagatgtgaatga

SEQ ID NO: 22375 - DNA, 619 bp, Homo sapiens
  misc_feature 1..619: note = ENST00000502968
  source 1..619: mol_type = unassigned DNA; mol_type = unassigned DNA
cgtctctctgtggttcagtcacatttggggtaaaactggaaccgaagccctatagggtcccctgagggagagagtgggcatcgggcagccggggaaccgctttagtgataactttgactgcggttcccaggcggtgcagggtcagcggctcgcgccccggcgcgcgggctctctttttctctttctttctttccctctctctctttctaaacgaaggagcggtcggcgcgctaatgcatgagaaagagcaacttttcttaatttccaatcttggagacagcttttaatcagtgcgagacgcagagaagataaaaagagggtgatcggtttcacagggtccatggagggaagcccatccctgagacgcatgacagtgatgcgggagaagggccggcgccaggctgtcaggggcccggccttcatgttcaatgaccgcggcaccagcctcaccgccgaggaggagcgcttcctcgacgccgccgagtacggcaacatcccagtggtgcgcaagatgctggaggagtccaagacgctgaacgtcaactgcgtggactacatgggccagaacgcgctgcagctggctgtgggcaacgagcacctggaggtgaccgagctgctg

SEQ ID NO: 22376 - DNA, 5839 bp, Homo sapiens
  misc_feature 1..5839: note = ENST00000262839
  source 1..5839: mol_type = unassigned DNA; mol_type = unassigned DNA
accccacatcacaaccacgacgggttgtccgcagctcgcagccaccccaaagggaggaataaagaacaggagcagagggaagccgggcgcagaaagaagggaaaaggaagagctcagggttggacatttttggagacaggggtggggaggataaagggagcgtgcctccttgattttcccctccccacccctctttgcttttctctccccttctctgtatagcatattccagaaacggcagcagaaggggacagaaacctctagtgtagaaaagggttttggaggggtagccagcgctcccgccagccgctacctaacagctggagcttgagtgtgcgtgtaagagtgtgaatgcggctctctctctttttttctctctctctcccctctctctccatcccttccttcctccctccttctccctctccttcacactacagtgtcagctacccctgtcagtttccccgtgtcagtttcttccctagctcttattgtgtgtgactggctgcgtgaagggagtgggtgcgcttgaaggggctcaggttgggttagagagctgggagaacagggtagggacattggtagagcaaagagtttcagggcactggcgaaggtgaaaggtgaggagggccgatctgttacaggcaagtttggcaataactgagcatccaaaggggaagccaaggtaggagccagtacttgcgctcgtctttacaccccgcccctttccctgtgctcatccgcccacccacccatcagcctagaggccccgggctgtcccagtcggctgctgtttcgcgccgcaaaagaggagtccggcaaggcgccgcaccacgcatcctggccggtggacatccagacgacacagattttatccgaaaaaaccacttggctcaggatttctgcattgctatgaaccatggcccaactgtactacaaaaaggtcaactactcaccgtacagagaccgcatccccctgcaaattgtgagggctgagacagagctctctgcagaggagaaggccttcctcaatgctgtggagaagggggactatgccactgtgaagcaggcccttcaggaggctgagatctactataatgttaacatcaactgcatggaccccttgggccggagtgccctgctcattgccattgagaacgagaacctggagatcatggagctactgctgaaccacagcgtgtatgtgggtgatgcattgctctatgccatacgcaaggaagtggtgggcgctgtggagcttctgctcagctacaggcggcccagcggagagaagcaggtccccactctgatgatggacacgcagttctctgaattcacaccggacatcactcccatcatgctggctgcccacaccaacaactacgaaatcatcaaattgcttgtccaaaaacgggtcactatcccacggccccaccagatccgctgcaactgtgtggagtgtgtgtctagttcagaggtagacagcctgcgccactctcgctcccgactgaacatctataaggctctggcaagcccctcactcattgccttatcaagtgaggaccccatcctaactgccttccgtctgggctgggagctcaaggagctcagcaaggtggagaatgagttcaaggccgagtatgaggagctctctcagcagtgcaagctctttgccaaagacctgctggaccaagctcggagctccagggaactggagatcatcctcaaccatcgagatgaccacagtgaagagcttgaccctcagaagtaccatgacctggccaagttgaaggtggcaatcaaataccaccagaaagagtttgttgctcagcccaactgccaacagttgcttgccaccctgtggtatgatggcttccctggatggcggcggaaacactgggtagtcaagcttctaacctgcatgaccattgggttcctgtttcccatgctgtctatagcctacctgatctcacccaggagcaaccttgggctgttcatcaagaaaccctttatcaagtttatctgccacacagcatcctatttgaccttcctctttatgcttctcctggcttctcagcacattgtcaggacagaccttcatgtacaggggcctcccccaactgtcgtggaatggatgatattgccttgggttctaggtttcatttggggtgagattaaggaaatgtgggatggtggatttactgaatacatccatgactggtggaacctgatggattttgcaatgaactccctctacctggcaactatttccctgaagattgtggcctatgtcaagtataatggttctcgtccaagggaggaatgggaaatgtggcacccgactctgattgcggaagcactcttcgcaatatccaacattttaagttcgttgcgtctcatatccctgttcacagccaactcccacttaggacctctgcagatctctttgggacgcatgctgcttgatatcctcaaattcctctttatctactgcctggtactactagcttttgccaatggactgaaccagctttacttctattatgaaaccagagctatcgatgagcctaacaactgcaaggggatccgatgtgagaaacagaacaatgccttctccacgctctttgagactcttcagtcactcttctggtctgtatttggccttttaaatctatatgtcaccaatgtgaaagccagacacgaattcaccgagtttgtaggagctaccatgtttggaacatacaatgtcatctccctggtagtgctgctgaacatgctgattgctatgatgaacaactcctatcagcttattgccgatcatgctgatatcgagtggaagtttgcaaggacgaagctctggatgagttactttgatgaaggtggcaccttgccacctcctttcaacatcatccccagccccaagtcatttctataccttggtaactggttcaacaacaccttctgccccaaaagagaccctgacggtagacggagaaggcgcaacttgagaagtttcacagaacgcaatgctgacagcctgatacaaaatcaacattatcaggaagttatcaggaatttagtcaaaagatatgtggctgctatgataagaaattccaaaacacatgagggacttacagaagaaaattttaaggaattaaagcaagacatctccagctttcggtatgaagtgcttgacctcttgggaaatagaaaacatccaaggagcttttccactagcagcactgaactgtctcagagagacgataataatgatggcagtggtggggctcgggccaaatccaagagtgtctcttttaatttaggctgcaagaaaaagacttgccatgggccacctctcatcagaaccatgccaaggtccagtggtgcccaaggaaagtcaaaagctgagtcatcaagcaaacgctccttcatgggtccttctctcaagaaactgggtctcctattctccaaatttaatggtcatatgtctgaacccagttcagagccaatgtacacaatttctgatggaattgttcagcagcactgtatgtggcaggacatcagatattctcagatggagaaagggaaagcagaggcctgttctcaaagtgaaattaacctcagtgaggtagaattaggtgaagtccagggcgctgctcagagcagtgaatgccctctagcctgttccagctctcttcactgtgcatccagcatctgctcctcaaattctaaacttttagactcctcagaggatgtatttgaaacttggggagaggcttgtgacttgctcatgcacaaatggggtgatggacaggaagaacaagttacaactcgcctctaagtcaagccctaatcatctgttctggaactcaacagaaatctgtaatttccttgctctcagaggtgacacagaatatgattccctcactgcccctgccccccagaaaggagagtgaaactcttatttgcaccatcttttatagccacattctccatttttgttcttgttttattattactttcattattatttgcctttttaatacctatacacactaagtccatcttacaaccgactgaaggggtgttgcacctaatcatcagaggtgcagttgggtgcttaacctttttgctttgcttttctcacccatgcttccttgaagccccaggtgccactttgctggtcttgttgccgcacagattcctgaccatcctcagaatctcatgccattttcccgcagagctgagggatgtggtcagcagtccccaccagctatcagataaggcaaactaccctgcccatctttgttgccattcagtgctacgcgctgcccatgctgggtcaatgaacagcatcaaagggaggctgaagagatttcaaagaattgtcagcttgtggtttctgggtataagtggcttgtttcgttcttaaatactacaacttcttattgtgggggctattgagttttcttgtttcttaaagatgtgttagtttcctaatgtgtgccaatgaaatatttaccccatagtatatgtcatatctaataagttaggcgaattatttttctgtttgtgtgtttcagttaacttactacatttgaaaatttgatagtatcaaaattagtatttagaatttgtgctattttttaaaaacatctactacactctaaccaatagtcactacatctcatacattggcaagataaatagttgtcatatttgttgggtcctattctactgttgatagttttaattatcattgctatcaaataatttctaagataaaagcctgaatttgaaatatttttatcagaaaaatggcatattgctgaagtgtcaaaatatgagaaaagagcatcttcattttaattaactgctttataaaaatggcaactttaggtatagataacctaattcaggttgcagttttaatattcattgggggcagtggaattgcatgtgtaaattatgttagatatatatcataacaaccctagtggattcatggaattataaacgtgatccaaattctactgtcttccaagaaagctacatttatacatccaaacaaattcttttccacagcttaagagtacctcatcagaatacagtggttcaagttaaaaaataaagtccataatgcatatggtcatcattctagacctgataaccactgagaacctgctgagcaaggacggcttttaccaacattagcacaaaggtttcctcagtttagactctaacatatgacctgaaacaactctaggtctgagtcctagagattacataaatagtgtgtagcccagaaaagtaaaataggtgtcacgctgttttttttaatgtcaacaccaataggaatccatttagattaatgtatgtaatttctgataaaagtaagagaaatgaggaactttcgaactgcaaatatgcctccaaactagcttttgataagtgtggtttctgttatttgaatggattcccatctttgtctctagcctggagaagagcaaaatggagggggaggggccagaaataggaggaggttttgaagaataaagcctcatatccaggaaaaagtgatcaagtgaaaaagctgcatcaagacccatttggcaagaggttgtccgaaaataattccttgatcatatctgaagtggttatttactcaaatcaatttctcccctgcttcgctaagactgtcataaaatggccttgacatttaatcacaggttactttccagaaaggtttctaaagttacagattcagcttttcaaattgtcaaattcactttgaataataatagaacctgggctacattcctaactcatattaacagca

SEQ ID NO: 22377 - DNA, 4612 bp, Homo sapiens
  misc_feature 1..4612: note = ENST00000344327
  source 1..4612: mol_type = unassigned DNA; mol_type = unassigned DNA
gggatcttgacggagagtgcgggggatgaaggcgggagctgagggctggagagtctctgttgacatagtaactcttcagctccgtctcccttgctctccgctcttacgcttcgctaccaccagcggccccgcctgtgccctctctgcccgggcgccccagacgcatcctcgcggggtctcctcggcctgacctgctcaggtcaagatcctctttgcacccccttaagtggtgacttttccccgggccagtgggcgagccacttgcggcgggcgtctgcaccccctgcttcaccgtcgtcccctgggcaccggtctgcccaggtccagttcggccgctgacgcgaaccctccgcaccgggtccccgctggaactgcccactcggctcccccgggagcggggcccaggccagtcgggcgttcccgccatgagccagagcccggcgttcgggccccggaggggcagttctccccggggcgctgccggagccgctgcgcggcgcaacgagagccaggactatctgctcatggactcggagctgggagaagacggctgcccgcaagccccgctgccttgctacggctactacccctgcttccggggatctgacaacagactggctcaccggcggcagacagttctccgtgagaaggggagaaggttagctaatcgaggaccagcatacatgtttagtgatcgctccacaagcctatctatagaggaggaacgctttttggatgcagctgaatatggtaacatcccagtggtgcggaagatgttagaagaatgccactcactcaacgttaactgtgtggattacatgggccagaatgccctacagttggcagtggccaatgagcatctggaaattacagaacttcttctcaagaaagaaaacctctctcgagttggggatgctttgcttctagctattagtaaaggttatgttcggattgtggaagcaattctcagtcatccggcttttgctgaaggcaagaggttagcaaccagccctagccagtctgaactccagcaagatgatttttatgcctatgatgaagatgggacacggttctcccatgatgtgactccaatcattctggctgcccactgccaggaatatgaaattgtgcataccctcctgcggaagggtgctaggattgaacggcctcatgattatttctgcaagtgcaatgactgcaaccagaaacagaagcatgactcgtttagccactccagatctaggattaatgcctataaaggcctggcaagtccggcttacctgtcattgtctagtgaagatccagtcatgacggctttagaacttagcaatgaactggcagttctggccaatattgagaaagagttcaagaatgactacaaaaaactgtcaatgcagtgcaaagactttgttgttggactccttgatctgtgcagaaacactgaagaagtcgaggccattctgaatggggatgttgaaacgctccagagtggtgatcacggtcgcccaaatctcagccgtttaaaacttgccattaaatatgaagtaaaaaaatttgtagctcatccaaactgccaacagcaacttctctccatttggtatgagaatctttctggtttacgacagcagacaatggcggtcaagttccttgtggtccttgctgttgccattggactgcccttcctggctctcatttactggtttgctccatgcagcaagatggggaagataatgcgtggaccattcatgaagtttgtagcacacgcagcctccttcaccatttttctgggactgctagtcatgaatgcagctgacagatttgaaggcacaaaactccttcctaatgaaaccagcacagataatgcaaaacagctgttcaggatgaaaacatcctgcttctcatggatggagatgctcattatatcctgggtaataggcatgatatgggctgaatgtaaagaaatctggactcagggccccaaggaatatttgtttgagttgtggaacatgcttgattttggtatgttagcaattttcgcagcatcattcattgcgagattcatggcattttggcatgcttccaaagcccagagcatcattgacgcaaatgatactttgaaggacttgacgaaagtaacattgggagacaatgtgaaatactacaatttggccaggataaagtgggacccctctgatcctcaaataatatctgaaggtctttatgcaattgctgtagttttaagtttctctaggatagcttatattttaccagcaaatgaaagctttggacctctgcagatatcacttggaagaacagtcaaagacatcttcaagttcatggtcatattcattatggtgtttgtggcctttatgattggaatgttcaatctctactcctactacattggtgcaaaacaaaatgaagccttcacaacagttgaagagagttttaagacactgttctgggctatatttggactttctgaagtgaaatcagtggtcatcaactataaccacaaattcattgaaaacattggttacgttctttatggagtctataatgttacgatggtcattgttttgctaaatatgttaattgccatgatcaacagttcattccaggaaattgaggatgacgctgatgtggagtggaaatttgcaagggccaaactctggttttcctactttgaggagggcagaacacttcctgtacccttcaatctggtgccgagtccaaagtccctgttttatctcttactgaagcttaaaaaatggatttctgagctgttccagggccataaaaaaggtttccaggaagatgcagagatgaacaagataaatgaagaaaagaaacttggaattttaggaagtcatgaagacctttcaaaattatcacttgacaaaaaacaggttgggcacaataaacaaccaagtataaggagctcagaagatttccatctaaatagtttcaataatcctccaagacaatatcagaaaataatgaaaaggctcattaaaagatatgtactgcaggcccagatagataaggagagtgatgaagtgaacgaaggggaactgaaggaaattaagcaggacatctcaagtctccgctatgaactccttgaagaaaaatctcagaatacagaagacctagcagaacttattagagaacttggagagaaattatccatggaaccaaatcaagaggaaaccaatagataatgcgaagacttccttagaaattcatatttatttgtccacttgaagccatattattttctgatttattttcttaagtgccaatgggcccaccttttaaacaagaaaacgttaaataacttgggccatcctatcatctggagccctagtatctaatttttttggtgattaaactccattgttcagggtaaaggctgtagataatgaggaaaattatgcccagttgtttggtgcttgttttataaactgctttcttggatataactaactcttgtgatgatgtcattgccatgtagtgtctgcctgaaaatgggtcccagcggacaggggctgacccacgttactccccatgcggtttttcctctgaagtttatttcaggttccttcttgcctgctctgtggatcccctgctggggactcccagctctgaaatttgggaaaaagtagcccatgggcctttagaatgctttaatcctttctttagaatgctgtttaaacaccatttaccctacttatccctcaatgcacatgattgataccgttcatacaaaatggtcttacatctatgtaaaattttctgattcatctatttgaaaacattacacttaacaatgaaaaaagtttttcctccactgaaccctggaaacatggtccagttttgtgtgtgtgcgtgtgtgtaaatgtgtacacacagacataaagtacttgccctagtttgtggctaatgtggacacacaaaagctctttatgttataaatttttattgtcactaaaaaattttactgtctaaataagtaccttttattggagaaaaatcaaaaccccaaacaaacactgtggttgtttggttccattatagcacaattttgtgccatttctgggagcatttacagatgaatccccacacttagccattgaatgtaaaggggaaaaataaggtgagaatttgtaaatacttatctgttattttcaatatgttctatccttctacccaaatatataaaacaggaatttgcattcatgtgcatttaccaagaggttgttgttgttacttactgatcatgtgaagtggtgtcttaaacaactaaaagcgatgaaggttcatatgtttactcaaagaccattggcattcagaggatgctggacattaactggaactgctacttccaattcaataatgggagatttcaaatgcaaatctttaacttcatcttaaagatgaaatggttgcagaaaatctgtttagctccaactttggcttaatttaaatcaaagaacatttatgtaaccagatcagaaaatacagctgaaaatttatattcagtgattttgtatttgtggatactacttatggaaaagttacttggtgatacataaagatcgattttcaaata

SEQ ID NO: 22378 - DNA, 2648 bp, Homo sapiens
  misc_feature 1..2648: note = ENST00000532133
  source 1..2648: mol_type = unassigned DNA; mol_type = unassigned DNA
gccatgagccagagcccggcgttcgggccccggaggggcagttctccccggggcgctgccggagccgctgcgcggcgcaacgagagccaggactatctgctcatggactcggagctgggagaagacggctgcccgcaagccccgctgccttgctacggctactacccctgcttccggggatctgacaacagactggctcaccggcggcagacagttctccgtgagaaggggagaaggttagctaatcgaggaccagcatacatgtttagtgatcgctccacaagcctatctatagaggaggaacgctttttggatgcagctgaatatggtaacatcccagtggtgcggaagatgttagaagaatgccactcactcaacgttaactgtgtggattacatgggccagaatgccctacagttggcagtggccaatgagcatctggaaattacagaacttcttctcaagaaagaaaacctctctcgagttggggatgctttgcttctagctattagtaaaggttatgttcggattgtggaagcaattctcagtcatccggcttttgctgaaggcaagaggttagcaaccagccctagccagtctgaactccagcaagatgatttttatgcctatgatgaagatgggacacggttctcccatgatgtgactccaatcattctggctgcccactgccaggaatatgaaattgtgcataccctcctgcggaagggtgctaggattgaacggcctcatgattatttctgcaagtgcaatgactgcaaccagaaacagaagcatgactcgtttagccactccagatctaggattaatgcctataaaggcctggcaagtccggcttacctgtcattgtctagtgaagatccagtcatgacggctttagaacttagcaatgaactggcagttctggccaatattgagaaagagttcaagaatgactacaaaaaactgtcaatgcagtgcaaagactttgttgttggactccttgatctgtgcagaaacactgaagaagtcgaggccattctgaatggggatgttgaaacgctccagagtggtgatcacggtcgcccaaatctcagccgtttaaaacttgccattaaatatgaagtaaaaaaatttgtagctcatccaaactgccaacagcaacttctctccatttggtatgagaatctttctggtttacgacagcagacaatggcggtcaagttccttgtggtccttgctgttgccattggactgcccttcctggctctcatttactggtttgctccatgcagcaagatggggaagataatgcgtggaccattcatgaagtttgtagcacacgcagcctccttcaccatttttctgggactgctagtcatgaatgcagctgacagatttgaaggcacaaaactccttcctaatgaaaccagcacagataatgcaaaacagctgttcaggatgaaaacatcctgcttctcatggatggagatgctcattatatcctgggtaatagccaggataaagtgggacccctctgatcctcaaataatatctgaaggtctttatgcaattgctgtagttttaagtttctctaggatagcttatattttaccagcaaatgaaagctttggacctctgcagatatcacttggaagaacagtcaaagacatcttcaagttcatggtcatattcattatggtgtttgtggcctttatgattggaatgttcaatctctactcctactacattggtgcaaaacaaaatgaagccttcacaacagttgaagagagttttaagacactgttctgggctatatttggactttctgaagtgaaatcagtggtcatcaactataaccacaaattcattgaaaacattggttacgttctttatggagtctataatgttacgatggtcattgttttgctaaatatgttaattgccatgatcaacagttcattccaggaaattgaggatgacgctgatgtggagtggaaatttgcaagggccaaactctggttttcctactttgaggagggcagaacacttcctgtacccttcaatctggtgccgagtccaaagtccctgttttatctcttactgaagcttaaaaaatggatttctgagctgttccagggccataaaaaaggtttccaggaagatgcagagatgaacaagataaatgaagaaaagaaacttggaattttaggaagtcatgaagacctttcaaaattatcacttgacaaaaaacaggttgggcacaataaacaaccaagtataaggagctcagaagatttccatctaaatagtttcaataatcctccaagacaatatcagaaaataatgaaaaggctcattaaaagatatgtactgcaggcccagatagataaggagagtgatgaagtgaacgaaggggaactgaaggaaattaagcaggacatctcaagtctccgctatgaactccttgaagaaaaatctcagaatacagaagacctagcagaacttattagagaacttggagagaaattatccatggaaccaaatcaagaggaaaccaatagataatgcgaagacttccttagaaattcatatttatttgtccacttgaagccatattattttctgatttattttcttaagtgccaatg

SEQ ID NO: 22379 - DNA, 2448 bp, Homo sapiens
  misc_feature 1..2448: note = ENST00000348423
  source 1..2448: mol_type = unassigned DNA; mol_type = unassigned DNA
atgagccagagcccggcgttcgggccccggaggggcagttctccccggggcgctgccggagccgctgcgcggcgcaacgagagccaggactatctgctcatggactcggagctgggagaagacggctgcccgcaagccccgctgccttgctacggctactacccctgcttccggggatctgacaacagactggctcaccggcggcagacagttctccgtgagaaggggagaaggttagctaatcgaggaccagcatacatgtttagtgatcgctccacaagcctatctatagaggaggaacgctttttggatgcagctgaatatggtaacatcccagtggtgcggaagatgttagaagaatgccactcactcaacgttaactgtgtggattacatgggccagaatgccctacagttggcagtggccaatgagcatctggaaattacagaacttcttctcaagaaagaaaacctctctcgagttggggatgctttgcttctagctattagtaaaggttatgttcggattgtggaagcaattctcagtcatccggcttttgctgaaggcaagaggttagcaaccagccctagccagtctgaactccagcaagatgatttttatgcctatgatgaagatgggacacggttctcccatgatgtgactccaatcattctggctgcccactgccaggaatatgaaattgtgcataccctcctgcggaagggtgctaggattgaacggcctcatgattatttctgcaagtgcaatgactgcaaccagaaacagaagcatgactcgtttagccactccagatctaggattaatgcctataaaggcctggcaagtccggcttacctgtcattgtctagtgaagatccagtcatgacggctttagaacttagcaatgaactggcagttctggccaatattgagaaagagttcaagatggggaagataatgcgtggaccattcatgaagtttgtagcacacgcagcctccttcaccatttttctgggactgctagtcatgaatgcagctgacagatttgaaggcacaaaactccttcctaatgaaaccagcacagataatgcaaaacagctgttcaggatgaaaacatcctgcttctcatggatggagatgctcattatatcctgggtaataggcatgatatgggctgaatgtaaagaaatctggactcagggccccaaggaatatttgtttgagttgtggaacatgcttgattttggtatgttagcaattttcgcagcatcattcattgcgagattcatggcattttggcatgcttccaaagcccagagcatcattgacgcaaatgatactttgaaggacttgacgaaagtaacattgggagacaatgtgaaatactacaatttggccaggataaagtgggacccctctgatcctcaaataatatctgaaggtctttatgcaattgctgtagttttaagtttctctaggatagcttatattttaccagcaaatgaaagctttggacctctgcagatatcacttggaagaacagtcaaagacatcttcaagttcatggtcatattcattatggtgtttgtggcctttatgattggaatgttcaatctctactcctactacattggtgcaaaacaaaatgaagccttcacaacagttgaagagagttttaagacactgttctgggctatatttggactttctgaagtgaaatcagtggtcatcaactataaccacaaattcattgaaaacattggttacgttctttatggagtctataatgttacgatggtcattgttttgctaaatatgttaattgccatgatcaacagttcattccaggaaattgaggatgacgctgatgtggagtggaaatttgcaagggccaaactctggttttcctactttgaggagggcagaacacttcctgtacccttcaatctggtgccgagtccaaagtccctgttttatctcttactgaagcttaaaaaatggatttctgagctgttccagggccataaaaaaggtttccaggaagatgcagagatgaacaagataaatgaagaaaagaaacttggaattttaggaagtcatgaagacctttcaaaattatcacttgacaaaaaacaggttgggcacaataaacaaccaagtataaggagctcagaagatttccatctaaatagtttcaataatcctccaagacaatatcagaaaataatgaaaaggctcattaaaagatatgtactgcaggcccagatagataaggagagtgatgaagtgaacgaaggggaactgaaggaaattaagcaggacatctcaagtctccgctatgaactccttgaagaaaaatctcagaatacagaagacctagcagaacttattagagaacttggagagaaattatccatggaaccaaatcaagaggaaaccaatagataa

SEQ ID NO: 22380 - DNA, 2631 bp, Homo sapiens
  misc_feature 1..2631: note = ENST00000360497
  source 1..2631: mol_type = unassigned DNA; mol_type = unassigned DNA
atgagccagagcccggcgttcgggccccggaggggcagttctccccggggcgctgccggagccgctgcgcggcgcaacgagagccaggactatctgctcatggactcggagctgggagaagacggctgcccgcaagccccgctgccttgctacggctactacccctgcttccggggatctgacaacagactggctcaccggcggcagacagttctccgtgagaaggggagaaggttagctaatcgaggaccagcatacatgtttagtgatcgctccacaagcctatctatagaggaggaacgctttttggatgcagctgaatatggtaacatcccagtggtgcggaagatgttagaagaatgccactcactcaacgttaactgtgtggattacatgggccagaatgccctacagttggcagtggccaatgagcatctggaaattacagaacttcttctcaagaaagaaaacctctctcgagttggggatgctttgcttctagctattagtaaaggttatgttcggattgtggaagcaattctcagtcatccggcttttgctgaaggcaagaggttagcaaccagccctagccagtctgaactccagcaagatgatttttatgcctatgatgaagatgggacacggttctcccatgatgtgactccaatcattctggctgcccactgccaggaatatgaaattgtgcataccctcctgcggaagggtgctaggattgaacggcctcatgattatttctgcaagtgcaatgactgcaaccagaaacagaagcatgactcgtttagccactccagatctaggattaatgcctataaaggcctggcaagtccggcttacctgtcattgtctagtgaagatccagtcatgacggctttagaacttagcaatgaactggcagttctggccaatattgagaaagagttcaagaatgactacaaaaaactgtcaatgcagtgcaaagactttgttgttggactccttgatctgtgcagaaacactgaagaagtcgaggccattctgaatggggatgttgaaacgctccagagtggtgatcacggtcgcccaaatctcagccgtttaaaacttgccattaaatatgaagtaaaaaaaatggggaagataatgcgtggaccattcatgaagtttgtagcacacgcagcctccttcaccatttttctgggactgctagtcatgaatgcagctgacagatttgaaggcacaaaactccttcctaatgaaaccagcacagataatgcaaaacagctgttcaggatgaaaacatcctgcttctcatggatggagatgctcattatatcctgggtaataggcatgatatgggctgaatgtaaagaaatctggactcagggccccaaggaatatttgtttgagttgtggaacatgcttgattttggtatgttagcaattttcgcagcatcattcattgcgagattcatggcattttggcatgcttccaaagcccagagcatcattgacgcaaatgatactttgaaggacttgacgaaagtaacattgggagacaatgtgaaatactacaatttggccaggataaagtgggacccctctgatcctcaaataatatctgaaggtctttatgcaattgctgtagttttaagtttctctaggatagcttatattttaccagcaaatgaaagctttggacctctgcagatatcacttggaagaacagtcaaagacatcttcaagttcatggtcatattcattatggtgtttgtggcctttatgattggaatgttcaatctctactcctactacattggtgcaaaacaaaatgaagccttcacaacagttgaagagagttttaagacactgttctgggctatatttggactttctgaagtgaaatcagtggtcatcaactataaccacaaattcattgaaaacattggttacgttctttatggagtctataatgttacgatggtcattgttttgctaaatatgttaattgccatgatcaacagttcattccaggaaattgaggatgacgctgatgtggagtggaaatttgcaagggccaaactctggttttcctactttgaggagggcagaacacttcctgtacccttcaatctggtgccgagtccaaagtccctgttttatctcttactgaagcttaaaaaatggatttctgagctgttccagggccataaaaaaggtttccaggaagatgcagagatgaacaagataaatgaagaaaagaaacttggaattttaggaagtcatgaagacctttcaaaattatcacttgacaaaaaacaggttgggcacaataaacaaccaagtataaggagctcagaagatttccatctaaatagtttcaataatcctccaagacaatatcagaaaataatgaaaaggctcattaaaagatatgtactgcaggcccagatagataaggagagtgatgaagtgaacgaaggggaactgaaggaaattaagcaggacatctcaagtctccgctatgaactccttgaagaaaaatctcagaatacagaagacctagcagaacttattagagaacttggagagaaattatccatggaaccaaatcaagaggaaaccaatagataa

SEQ ID NO: 22381 - DNA, 645 bp, Homo sapiens
  misc_feature 1..645: note = ENST00000532184
  source 1..645: mol_type = unassigned DNA; mol_type = unassigned DNA
ctttttttgaaactgaattctgctccaccacagtcttaccctggtgtttctgcaggatccacatcagaccctgcttcaggtgtggatgtcttagttaatcaggtggcactgttgatcccccatcaatggacttctgagatcaccaccattatttcctcaatttgtttgactctttctctaccatgcattcatctgtgagaaggttaacgcgtgattctcatgacaacgtgattggcagccacaaagtctaagagactcctcagacaacctctaacaaacagccattaacaaactgaacacacctaaaatgtcactgatttgtcttggaagacagaatactaagcaagataaatggcactatacatatagataatttgtgtatgtaagactattagttcattagataactaatctcactactttatttaaaagaaaatgtaagtaggaatccatttctaaatcttttcaaattacaggttgggcacaataaacaaccaagtataaggagctcagaagatttccatctaaatagtttcaataatcctccaagacaatatcagaaaataatgaaaaggctcattaaaagatatgtactgcaggcccagatagataaggagagtgatgaagtgaacgaaggtgagttga

SEQ ID NO: 22382 - DNA, 425 bp, Homo sapiens
  misc_feature 1..425: note = ENST00000527240
  source 1..425: mol_type = unassigned DNA; mol_type = unassigned DNA
agtcatgacggctttagaacttagcaatgaactggcagttctggccaatattgagaaagagttcaagaatgactacaaaaaactgtcaatgcagtgcaaagactttgttgttggactccttgatctgtgcagaaacactgaagaagtcgaggccattctgaatggggatgttgaaacgctccagagtggtgatcacggtcgcccaaatctcagccgtttaaaacttgccattaaatatgaagtaaaaaaagtaaggtcaggcgtgaagcccgtttacattattttggttcttgttggtgctaaataaggataaagggttgatattgttagattaagctgggattttcttttcttttctctttttttttttttgagatggagtctcgctctgtcgcccagtctggagtgcagtggtgcgatctcgg

SEQ ID NO: 22383 - DNA, 359 bp, Homo sapiens
  misc_feature 1..359: note = ENST00000526713
  source 1..359: mol_type = unassigned DNA; mol_type = unassigned DNA
cagatctgcactagtagtggcagttagtccggttcaattgctaaaaaagaccctcaggatccaattcctaaacctattaaatttcttgttatttagtgactttatcacagaggggcttaggaatatgttccaggttgtcaggaaaaaagagcataattttctttttctttcatttcgcagatggaggaacagattgcctggttggcttacaagacacctagcctgcaagtggcagagtcacgatttcaatgcagccctgtcggagccggggatctgacaacagactggctcaccggcggcagacagttctccgtgagaaggggagaaggttagctaatcgaggaccagcatacatgttt

SEQ ID NO: 22384 - DNA, 2424 bp, Homo sapiens
  misc_feature 1..2424: note = ENST00000502753
  source 1..2424: mol_type = unassigned DNA; mol_type = unassigned DNA
atgttgaggaacagcaccttcaaaaacatgcagcgccggcacacaacgctgagggagaagggccgtcgccaggccatccggggtcccgcctacatgttcaacgagaagggcaccagtctgacgcccgaggaggagcgcttcctggactcggctgagtatggcaacatcccggtggtccggaaaatgctggaggagtccaagacccttaacttcaactgtgtggactacatggggcagaacgctctgcagctggccgtgggcaacgagcacctagaggtcacggagctgctgctgaagaaggagaacctggcacgggtgggggacgcgctgctgctggccatcagcaagggctatgtgcgcatcgtggaggccatcctcaaccacccggccttcgcgcagggccagcgcctgacgctcagcccgctggaacaggagctgcgcgacgacgacttctatgcctacgacgaggacggcacgcgcttctcccacgacatcacgcccatcatcctggcggcgcactgccaggagtatgagatcgtgcacatcctgctgctcaagggcgcccgcatcgagcggccccacgactacttctgcaagtgcaatgagtgcaccgagaaacagcggaaagactccttcagccactcgcgctcgcgcatgaacgcctacaaaggactggcgagtgctgcctacttgtccctgtccagcgaagaccctgtcctcaccgccctggagctcagcaacgagttagccagactagccaacattgagactgaatttaagaacgattacaggaagttatctatgcaatgcaaggattttgtagtgggcgtgctggacctgtgccgagacacagaagaggtggaagcaattttaaacggtgatgtgaacttccaagtctggtccgaccaccaccgtccaagtctgagccggatcaaactcgccattaaatatgaagtcaagaagctaggacgaaccctgaggagccctttcatgaagtttgtagctcatgcagtttcttttacaatcttcttgggattattagttgtgaatgcatctgaccgatttgaaggtgttaaaaccctgccaaacgaaaccttcacagactacccaaaacaaatcttcagagtgaaaaccacacagttctcctggacagaaatgctcattatgaagtgggtcttaggaatgatttggtccgaatgcaaggaaatctgggaggaggggccacgggagtacgtgctgcacttgtggaacctgctagatttcgggatgctgtccatcttcgtggcctccttcacagcacgcttcatggccttcctgaaggccacggaggcacagctgtacgtggaccagcacgtgcaggacgacacgctgcacaatgtctcgcttccgccggaagtggcatacttcacctacgccagggacaagtggtggccttcagaccctcagatcatatcggaagggctctacgcgatagccgtcgtgctgagcttctctcgcattgcatacattctgccagccaacgagagttttgggcccctgcagatctcgctagggagaactgtgaaagatatcttcaagttcatggtcattttcatcatggtatttgtggccttcatgattgggatgttcaacctgtactcttactaccgaggtgccaaatacaacccagcgtttacaacggttgaagaaagttttaaaactttgttttggtccatattcggcttatctgaagtaatctcagtggtgctgaaatacgaccacaaattcatcgagaacattggctacgttctctacggcgtttataacgtcaccatggtggtagtgttgctcaacatgctaatagccatgataaacaactcctatcaggaaattgaggaggatgcagatgtggaatggaagttcgcccgagcaaaactctggctgtcttactttgatgaaggaagaactctacctgctccttttaatctagtgccaagtcctaaatcattttattatctcataatgagaatcaagatgtgcctcataaaactctgcaaatctaaggccaaaagctgtgaaaatgaccttgaaatgggcatgctgaattccaaattcaagaagactcgctaccaggctggcatgaggaattctgaaaatctgacagcaaataacactttgagcaagcccaccagataccagaaaatcatgaaacggctcataaaaagatacgtcctgaaagcccaggtggacagagaaaatgacgaagtcaatgaaggcgagctgaaggaaatcaagcaagatatctccagcctgcgctatgagcttcttgaggaaaaatctcaagctactggtgagctggcagacctgattcaacaactcagcgagaagtttggaaagaacttaaacaaagaccacctgagggtgaacaagggcaaagacatttag

SEQ ID NO: 22385 - DNA, 2406 bp, Homo sapiens
  misc_feature 1..2406: note = ENST00000378459
  source 1..2406: mol_type = unassigned DNA; mol_type = unassigned DNA
atgttgaggaacagcaccttcaaaaacatgcagcgccggcacacaacgctgagggagaagggccgtcgccaggccatccggggtcccgcctacatgttcaacgagaagggcaccagtctgacgcccgaggaggagcgcttcctggactcggctgagtatggcaacatcccggtggtccggaaaatgctggaggagtccaagacccttaacttcaactgtgtggactacatggggcagaacgctctgcagctggccgtgggcaacgagcacctagaggtcacggagctgctgctgaagaaggagaacctggcacgggtgggggacgcgctgctgctggccatcagcaagggctatgtgcgcatcgtggaggccatcctcaaccacccggccttcgcgcagggccagcgcctgacgctcagcccgctggaacaggagctgcgcgacgacgacttctatgcctacgacgaggacggcacgcgcttctcccacgacatcacgcccatcatcctggcggcgcactgccaggagtatgagatcgtgcacatcctgctgctcaagggcgcccgcatcgagcggccccacgactacttctgcaagtgcaatgagtgcaccgagaaacagcggaaagactccttcagccactcgcgctcgcgcatgaacgcctacaaaggactggcgagtgctgcctacttgtccctgtccagcgaagaccctgtcctcaccgccctggagctcagcaacgagttagccagactagccaacattgagactgaatttaagttcgttgctcatcctaactgtcagcagcaattgcttaccatgtggtatgaaaatctctcaggcttacgtcaacagtctatcgctgtgaaattcctggctgtctttggagtctccataggcctcccttttctcgccatagcctattggattgctccgtgcagcaagctaggacgaaccctgaggagccctttcatgaagtttgtagctcatgcagtttcttttacaatcttcttgggattattagttgtgaatgcatctgaccgatttgaaggtgttaaaaccctgccaaacgaaaccttcacagactacccaaaacaaatcttcagagtgaaaaccacacagttctcctggacagaaatgctcattatgaagtgggtcttaggaatgatttggtccgaatgcaaggaaatctgggaggaggggccacgggagtacgtgctgcacttgtggaacctgctagatttcgggatgctgtccatcttcgtggcctccttcacagcacgcttcatggccttcctgaaggccacggaggcacagctgtacgtggaccagcacgtgcaggacgacacgctgcacaatgtctcgcttccgccggaagtggcatacttcacctacgccagggacaagtggtggccttcagaccctcagatcatatcggaagggctctacgcgatagccgtcgtgctgagcttctctcgcattgcatacattctgccagccaacgagagttttgggcccctgcagatctcgctagggagaactgtgaaagatatcttcaagttcatggtcattttcatcatggtatttgtggccttcatgattgggatgttcaacctgtactcttactaccgaggtgccaaatacaacccagcgtttacaacggttgaagaaagttttaaaactttgttttggtccatattcggcttatctgaagtaatctcagtggtgctgaaatacgaccacaaattcatcgagaacattggctacgttctctacggcgtttataacgtcaccatggtggtagtgttgctcaacatgctaatagccatgataaacaactcctatcaggaaattgaggaggatgcagatgtggaatggaagttcgcccgagcaaaactctggctgtcttactttgatgaaggaagaactctacctgctccttttaatctagtgccaagtcctaaatcattttattatctcataatgagaatcaagatgtgcctcataaaactctgcaaatctaaggccaaaagctgtgaaaatgaccttgaaatgggcatgctgaattccaaattcaagaagactcgctaccaggctggcatgaggaattctgaaaatctgacagcaaataacactttgagcaagcccaccagataccagaaaatcatgaaacggctcataaaaagatacgtcctgaaagcccaggtggacagagaaaatgacgaagtcaatgaaggcgagctgaaggaaatcaagcaagatatctccagcctgcgctatgagcttcttgaggaaaaatctcaagctactggtgagctggcagacctgattcaacaactcagcgagaagtttggaaagaacttaaacaaagaccacctgagggtgaacaagggcaaagacatttag

SEQ ID NO: 22386 - DNA, 2241 bp, Homo sapiens
  misc_feature 1..2241: note = ENST00000352189
  source 1..2241: mol_type = unassigned DNA; mol_type = unassigned DNA
atgttgaggaacagcaccttcaaaaacatgcagcgccggcacacaacgctgagggagaagggccgtcgccaggccatccggggtcccgcctacatgttcaacgagaagggcaccagtctgacgcccgaggaggagcgcttcctggactcggctgagtatggcaacatcccggtggtccggaaaatgctggaggagtccaagacccttaacttcaactgtgtggactacatggggcagaacgctctgcagctggccgtgggcaacgagcacctagaggtcacggagctgctgctgaagaaggagaacctggcacgggtgggggacgcgctgctgctggccatcagcaagggctatgtgcgcatcgtggaggccatcctcaaccacccggccttcgcgcagggccagcgcctgacgctcagcccgctggaacaggagctgcgcgacgacgacttctatgcctacgacgaggacggcacgcgcttctcccacgacatcacgcccatcatcctggcggcgcactgccaggagtatgagatcgtgcacatcctgctgctcaagggcgcccgcatcgagcggccccacgactacttctgcaagtgcaatgagtgcaccgagaaacagcggaaagactccttcagccactcgcgctcgcgcatgaacgcctacaaaggactggcgagtgctgcctacttgtccctgtccagcgaagaccctgtcctcaccgccctggagctcagcaacgagttagccagactagccaacattgagactgaatttaagctaggacgaaccctgaggagccctttcatgaagtttgtagctcatgcagtttcttttacaatcttcttgggattattagttgtgaatgcatctgaccgatttgaaggtgttaaaaccctgccaaacgaaaccttcacagactacccaaaacaaatcttcagagtgaaaaccacacagttctcctggacagaaatgctcattatgaagtgggtcttaggaatgatttggtccgaatgcaaggaaatctgggaggaggggccacgggagtacgtgctgcacttgtggaacctgctagatttcgggatgctgtccatcttcgtggcctccttcacagcacgcttcatggccttcctgaaggccacggaggcacagctgtacgtggaccagcacgtgcaggacgacacgctgcacaatgtctcgcttccgccggaagtggcatacttcacctacgccagggacaagtggtggccttcagaccctcagatcatatcggaagggctctacgcgatagccgtcgtgctgagcttctctcgcattgcatacattctgccagccaacgagagttttgggcccctgcagatctcgctagggagaactgtgaaagatatcttcaagttcatggtcattttcatcatggtatttgtggccttcatgattgggatgttcaacctgtactcttactaccgaggtgccaaatacaacccagcgtttacaacggttgaagaaagttttaaaactttgttttggtccatattcggcttatctgaagtaatctcagtggtgctgaaatacgaccacaaattcatcgagaacattggctacgttctctacggcgtttataacgtcaccatggtggtagtgttgctcaacatgctaatagccatgataaacaactcctatcaggaaattgaggaggatgcagatgtggaatggaagttcgcccgagcaaaactctggctgtcttactttgatgaaggaagaactctacctgctccttttaatctagtgccaagtcctaaatcattttattatctcataatgagaatcaagatgtgcctcataaaactctgcaaatctaaggccaaaagctgtgaaaatgaccttgaaatgggcatgctgaattccaaattcaagaagactcgctaccaggctggcatgaggaattctgaaaatctgacagcaaataacactttgagcaagcccaccagataccagaaaatcatgaaacggctcataaaaagatacgtcctgaaagcccaggtggacagagaaaatgacgaagtcaatgaaggcgagctgaaggaaatcaagcaagatatctccagcctgcgctatgagcttcttgaggaaaaatctcaagctactggtgagctggcagacctgattcaacaactcagcgagaagtttggaaagaacttaaacaaagaccacctgagggtgaacaagggcaaagacatttag

SEQ ID NO: 22387 - DNA, 2024 bp, Homo sapiens
  misc_feature 1..2024: note = ENST00000514963
  source 1..2024: mol_type = unassigned DNA; mol_type = unassigned DNA
atgttgaggaacagcaccttcaaaaacatgcagcgccggcacacaacgctgagggagaagggccgtcgccaggccatccggggtcccgcctacatgttcaacgagaagggcaccagtctgacgcccgaggaggagcgcttcctggactcggctgagtatggcaacatcccggtggtccggaaaatgctggaggagtccaagacccttaacttcaactgtgtggactacatggggcagaacgctctgcagctggccgtgggcaacgagcacctagaggtcacggagctgctgctgaagaaggagaacctggcacgggtgggggacgcgctgctgctggccatcagcaagggctatgtgcgcatcgtggaggccatcctcaaccacccggccttcgcgcagggccagcgcctgacgctcagcccgctggaacaggagctgcgcgacgacgacttctatgcctacgacgaggacggcacgcgcttctcccacgacatcacgcccatcatcctggcggcgcactgccaggagtatgagatcgtgcacatcctgctgctcaagggcgcccgcatcgagcggccccacgactacttctgcaagtgcaatgagtgcaccgagaaacagcggaaagactccttcagccactcgcgctcgcgcatgaacgcctacaaaggactggcgagtgctgcctacttgtccctgtccagcgaagaccctgtcctcaccgccctggagctcagcaacgagttagccagactagccaacattgagactgaatttaaggaatgatttggtccgaatgcaaggaaatctgggaggaggggccacgggagtacgtgctgcacttgtggaacctgctagatttcgggatgctgtccatcttcgtggcctccttcacagcacgcttcatggccttcctgaaggccacggaggcacagctgtacgtggaccagcacgtgcaggacgacacgctgcacaatgtctcgcttccgccggaagtggcatacttcacctacgccagggacaagtggtggccttcagaccctcagatcatatcggaagggctctacgcgatagccgtcgtgctgagcttctctcgcattgcatacattctgccagccaacgagagttttgggcccctgcagatctcgctagggagaactgtgaaagatatcttcaagttcatggtcattttcatcatggtatttgtggccttcatgattgggatgttcaacctgtactcttactaccgaggtgccaaatacaacccagcgtttacaacggttgaagaaagttttaaaactttgttttggtccatattcggcttatctgaagtaatctcagtggtgctgaaatacgaccacaaattcatcgagaacattggctacgttctctacggcgtttataacgtcaccatggtggtagtgttgctcaacatgctaatagccatgataaacaactcctatcaggaaattgaggaggatgcagatgtggaatggaagttcgcccgagcaaaactctggctgtcttactttgatgaaggaagaactctacctgctccttttaatctagtgccaagtcctaaatcattttattatctcataatgagaatcaagatgtgcctcataaaactctgcaaatctaaggccaaaagctgtgaaaatgaccttgaaatgggcatgctgaattccaaattcaagaagactcgctaccaggctggcatgaggaattctgaaaatctgacagcaaataacactttgagcaagcccaccagataccagaaaatcatgaaacggctcataaaaagatacgtcctgaaagcccaggtggacagagaaaatgacgaagtcaatgaaggcgagctgaaggaaatcaagcaagatatctccagcctgcgctatgagcttcttgaggaaaaatctcaagctactggtgagctggcagacctgattcaacaactcagcgagaagtttggaaagaacttaaacaaagaccacctgagggtgaacaagggcaaagacatttag

SEQ ID NO: 22388 - DNA, 2987 bp, Homo sapiens
  misc_feature 1..2987: note = ENST00000513104
  source 1..2987: mol_type = unassigned DNA
acagatgcttctccgtcatgttctctgggaaatttccccccgattaggaaaaggacggtaacacggttctgcctcggaaggcgagtttttaccactgcaacacaaagaacagaggagcgcgctttcacatcgttgcaacttaactcacttgaccagctctatacttcagcaccacggagagcggtacatccttggctaccacccatggggagccagcttctggcgactcaacaccggattccggtcatctagaggaggaacaagcctgcgtattacaccctcaatgttgaggaacagcaccttcaaaaacatgcagcgccggcacacaacgctgagggagaagggccgtcgccaggccatccggggtcccgcctacatgttcaacgagaagggcaccagtctgacgcccgaggaggagcgcttcctggactcggctgagtatggcaacatcccggtggtccggaaaatgctggaggagtccaagacccttaacttcaactgtgtggactacatggggcagaacgctctgcagctggccgtgggcaacgagcacctagaggtcacggagctgctgctgaagaaggagaacctggcacgggtgggggacgcgctgctgctggccatcagcaagggctatgtgcgcatcgtggaggccatcctcaaccacccggccttcgcgcagggccagcgcctgacgctcagcccgctggaacaggagctgcgcgacgacgacttctatgcctacgacgaggacggcacgcgcttctcccacgacatcacgcccatcatcctggcggcgcactgccaggagtatgagatcgtgcacatcctgctgctcaagggcgcccgcatcgagcggccccacgactacttctgcaagtgcaatgagtgcaccgagaaacagcggaaagactccttcagccactcgcgctcgcgcatgaacgcctacaaaggactggcgagtgctgcctacttgtccctgtccagcgaagaccctgtcctcaccgccctggagctcagcaacgagttagccagactagccaacattgagactgaatttaagaacgattacaggaagttatctatgcaatgcaaggattttgtagtgggcgtgctggacctgtgccgagacacagaagaggtggaagcaattttaaacggtgatgtgaacttccaagtctggtccgaccaccaccgtccaagtctgagccggatcaaactcgccattaaatatgaagtcaagaagttcgttgctcatcctaactgtcagcagcaattgcttaccatgtggtatgaaaatctctcaggcttacgtcaacagtctatcgctgtgaaattcctggctgtctttggagtctccataggcctcccttttctcgccatagcctattggattgctccgtgcagcaagctaggacgaaccctgaggagccctttcatgaagtttgtagctcatgcagtttcttttacaatcttcttgggattattagttgtgaatgcatctgaccgatttgaaggtgttaaaaccctgccaaacgaaaccttcacagactacccaaaacaaatcttcagagtgaaaaccacacagttctcctggacagaaatgctcattatgaagtgggtcttaggaatgatttggtccgaatgcaaggaaatctgggaggaggggccacgggagtacgtgctgcacttgtggaacctgctagatttcgggatgctgtccatcttcgtggcctccttcacagcacgcttcatggccttcctgaaggccacggaggcacagctgtacgtggaccagcacgtgcaggacgacacgctgcacaatgtctcgcttccgccggaagtggcatacttcacctacgccagggacaagtggtggccttcagaccctcagatcatatcggaagggctctacgcgatagccgtcgtgctgagcttctctcgcattgcatacattctgccagccaacgagagttttgggcccctgcagatctcgctagggagaactgtgaaagatatcttcaagttcatggtcattttcatcatggtatttgtggccttcatgattgggatgttcaacctgtactcttactaccgaggtgccaaatacaacccagcgtttacaacggttgaagaaagttttaaaactttgttttggtccatattcggcttatctgaagtaatctcagtggtgctgaaatacgaccacaaattcatcgagaacattggctacgttctctacggcgtttataacgtcaccatggtggtagtgttgctcaacatgctaatagccatgataaacaactcctatcaggaaattgaggaggatgcagatgtggaatggaagttcgcccgagcaaaactctggctgtcttactttgatgaaggaagaactctacctgctccttttaatctagtgccaagtcctaaatcattttattatctcataatgagaatcaagatgtgcctcataaaactctgcaaatctaaggccaaaagctgtgaaaatgaccttgaaatgggcatgctgaattccaaattcaagaagactcgctaccaggctggcatgaggaattctgaaaatctgacagcaaataacactttgagcaagcccaccagataccagaaaatcatgaaacggctcataaaaagatacgtcctgaaagcccaggtggacagagaaaatgacgaagtcaatgaaggcgagctgaaggaaatcaagcaagatatctccagcctgcgctatgagcttcttgaggaaaaatctcaagctactggtgagctggcagacctgattcaacaactcagcgagaagtttggaaagaacttaaacaaagaccacctgagggtgaacaagggcaaagacatttagcagcccacatcggcgtctgtgacttctaccagcattccaaggccaggttggatgccctcgcccccatccttggtggggaggggtccccagcccactcctctaggacacgaagggg

SEQ ID NO: 22389 - DNA, 817 bp, Homo sapiens
  misc_feature 1..817: note = ENST00000509288
  source 1..817: mol_type = unassigned DNA; mol_type = unassigned DNA
attgtgcatggttttagtgagagcaaactccccttctctgtgccatctgtagaaaaactacaccaagtcctgcttagaagtctgctttccgaatgttggggctgtgtctctgctcctcaggttgggctccgttgttaaatcgtggcctttgagggtgtgttgttgtttcccttgttccacaggaggatgcagatgtggaatggaagttcgcccgagcaaaactctggctgtcttactttgatgaaggaagaactctacctgctccttttaatctagtgccaagtcctaaatcattttattatctcataatgagaatcaagatgtgcctcataaaactctgcaaatctaaggccaaaagctgtgaaaatgaccttgaaatgggcatgctgaattccaaattcaagaagactcgctaccaggctggcatgaggaattctgaaaatctgacagcaaataacactttgagcaagcccaccagataccagaaaatcatgaaacggctcataaaaagatacgtcctgaaagcccaggtggacagagaaaatgacgaagtcaatgaaggcgagctgaaggaaatcaagcaagatatctccagcctgcgctatgagcttcttgaggaaaaatctcaagctactggtgagctggcagacctgattcaacaactcagcgagaagtttggaaagaacttaaacaaagaccacctgagggtgaacaagggcaaagacatttagcagcccacatcggcgtctgtgacttctaccagcattccaaggccaggttggatgccctcgcccccatccttggtggggaggggtcc

SEQ ID NO: 22390 - DNA, 2605 bp, Homo sapiens
  misc_feature 1..2605: note = ENST00000503275
  source 1..2605: mol_type = unassigned DNA; mol_type = unassigned DNA
atgttgaggaacagcaccttcaaaaacatgcagcgccggcacacaacgctgagggagaagggccgtcgccaggccatccggggtcccgcctacatgttcaacgagaagggcaccagtctgacgcccgaggaggagcgcttcctggactcggctgagtatggcaacatcccggtggtccggaaaatgctggaggagtccaagacccttaacttcaactgtgtggactacatggggcagaacgctctgcagctggccgtgggcaacgagcacctagaggtcacggagctgctgctgaagaaggagaacctggcacgggtgggggacgcgctgctgctggccatcagcaagggctatgtgcgcatcgtggaggccatcctcaaccacccggccttcgcgcagggccagcgcctgacgctcagcccgctggaacaggagctgcgcgacgacgacttctatgcctacgacgaggacggcacgcgcttctcccacgacatcacgcccatcatcctggcggcgcactgccaggagtatgagatcgtgcacatcctgctgctcaagggcgcccgcatcgagcggccccacgactacttctgcaagtgcaatgagtgcaccgagaaacagcggaaagactccttcagccactcgcgctcgcgcatgaacgcctacaaaggactggcgagtgctgcctacttgtccctgtccagcgaagaccctgtcctcaccgccctggagctcagcaacgagttagccagactagccaacattgagactgaatttaagaacgattacaggaagttatctatgcaatgcaaggattttgtagtgggcgtgctggacctgtgccgagacacagaagaggtggaagcaattttaaacggtgatgtgaacttccaagtctggtccgaccaccaccgtccaagtctgagccggatcaaactcgccattaaatatgaagtcaagaagttcgttgctcatcctaactgtcagcagcaattgcttaccatgtggtatgaaaatctctcaggcttacgtcaacagtctatcgctgtgaaattcctggctgtctttggagtctccataggcctcccttttctcgccatagcctattggattgctccgtgcagcaaggtacagactgcttaagctaggacgaaccctgaggagccctttcatgaagtttgtagctcatgcagtttcttttacaatcttcttgggattattagttgtgaatgcatctgaccgatttgaaggtgttaaaaccctgccaaacgaaaccttcacagactacccaaaacaaatcttcagagtgaaaaccacacagttctcctggacagaaatgctcattatgaagtgggtcttaggaatgatttggtccgaatgcaaggaaatctgggaggaggggccacgggagtacgtgctgcacttgtggaacctgctagatttcgggatgctgtccatcttcgtggcctccttcacagcacgcttcatggccttcctgaaggccacggaggcacagctgtacgtggaccagcacgtgcaggacgacacgctgcacaatgtctcgcttccgccggaagtggcatacttcacctacgccagggacaagtggtggccttcagaccctcagatcatatcggaagggctctacgcgatagccgtcgtgctgagcttctctcgcattgcatacattctgccagccaacgagagttttgggcccctgcagatctcgctagggagaactgtgaaagatatcttcaagttcatggtcattttcatcatggtatttgtggccttcatgattgggatgttcaacctgtactcttactaccgaggtgccaaatacaacccagcgtttacaacggttgaagaaagttttaaaactttgttttggtccatattcggcttatctgaagtaatctcagtggtgctgaaatacgaccacaaattcatcgagaacattggctacgttctctacggcgtttataacgtcaccatggtggtagtgttgctcaacatgctaatagccatgataaacaactcctatcaggaaattgaggaggatgcagatgtggaatggaagttcgcccgagcaaaactctggctgtcttactttgatgaaggaagaactctacctgctccttttaatctagtgccaagtcctaaatcattttattatctcataatgagaatcaagatgtgcctcataaaactctgcaaatctaaggccaaaagctgtgaaaatgaccttgaaatgggcatgctgaattccaaattcaagaagactcgctaccaggctggcatgaggaattctgaaaatctgacagcaaataacactttgagcaagcccaccagataccagaaaatcatgaaacggctcataaaaagatacgtcctgaaagcccaggtggacagagaaaatgacgaagtcaatgaaggcgagctgaaggaaatcaagcaagatatctccagcctgcgctatgagcttcttgaggaaaaatctcaagctactggtgagctggcagacctgattcaacaactcagcgagaagtttggaaagaacttaaacaaagaccacctgagggtgaacaagggcaaagacatttag

SEQ ID NO: 22391 - DNA, 5989 bp, Homo sapiens
  misc_feature 1..5989: note = ENST00000300482
  source 1..5989: mol_type = unassigned DNA; mol_type = unassigned DNA
tgcaccgggcacgcggcgcacgctcgggcgagatgtggatggccccgcggggccagggcggcggtgctgcgcggggacgcgggtgacgccggggcgcgggcggctccgagcagcaaccaccccatgtgtctctagaaccccagtgtagcgagctggagagaggactgtcctgagggcagcaggcctggttgcagctggcgtgggggtctcagaatggagccctcagccctgaggaaagctggctcggagcaggaggagggctttgaggggctgcccagaagggtcactgacctggggatggtctccaatctccggcgcagcaacagcagcctcttcaagagctggaggctacagtgccccttcggcaacaatgacaagcaagaaagcctcagttcgtggattcctgaaaacatcaagaagaaagaatgcgtgtattttgtggaaagttccaaactgtctgatgctgggaaggtggtgtgtcagtgtggctacacgcatgagcagcacttggaggaggctaccaagccccacaccttccagggcacacagtgggacccaaagaaacatgtccaggagatgccaaccgatgcctttggcgacatcgtcttcacgggcctgagccagaaggtgaaaaagtacgtccgagtctcccaggacacgccctccagcgtgatctaccacctcatgacccagcactgggggctggacgtccccaatctcttgatctcggtgaccgggggggccaagaacttcaacatgaagccgcggctgaagagcattttccgcagaggcctggtcaaggtggctcagaccacaggggcctggatcatcacaggggggtcccacaccggcgtcatgaagcaggtaggcgaggcggtgcgggacttcagcctgagcagcagctacaaggaaggcgagctcatcaccatcggagtcgccacctggggcactgtccaccgccgcgagggcctgatccatcccacgggcagcttccccgccgagtacatactggatgaggatggccaagggaacctgacctgcctagacagcaaccactctcacttcatcctcgtggacgacgggacccacggccagtacggggtggagattcctctgaggaccaggctggagaagttcatatcggagcagaccaaggaaagaggaggtgtggccatcaagatccccatcgtgtgcgtggtgctggagggcggcccgggcacgttgcacaccatcgacaacgccaccaccaacggcaccccctgtgtggttgtggagggctcgggccgcgtggccgacgtcattgcccaggtggccaacctgcctgtctcggacatcactatctccctgatccagcagaaactgagcgtgttcttccaggagatgtttgagaccttcacggaaagcaggattgtcgagtggaccaaaaagatccaagatatcgtccggaggcggcagctgctgactgtcttccgggaaggcaaggatggtcagcaggacgtggatgtggccatcttgcaggccttgctgaaagcctcacggagccaagaccactttggccacgagaactgggaccaccagctgaaactggcagtggcatggaatcgcgtggacattgcccgcagtgagatcttcatggatgagtggcagtggaagccttcagatctgcaccccacgatgacagctgcactcatctccaacaagcctgagtttgtgaagctcttcctggagaacggggtgcagctgaaggagtttgtcacctgggacaccttgctctacctgtacgagaacctggacccctcctgcctgttccacagcaagctgcagaaggtgctggtggaggatcccgagcgcccggcttgcgcgcccgcggcgccccgcctgcagatgcaccacgtggcccaggtgctgcgggagctgctgggggacttcacgcagccgctttatccccggccccggcacaacgaccggctgcggctcctgctgcccgttccccacgtcaagctcaacgtgcagggagtgagcctccggtccctctacaagcgttcctcaggccatgtgaccttcaccatggaccccatccgtgaccttctcatttgggccattgtccagaaccgtcgggagctggcaggaatcatctgggctcagagccaggactgcatcgcagcggccttggcctgcagcaagatcctgaaggaactgtccaaggaggaggaggacacggacagctcggaggagatgctggcgctggcggaggagtatgagcacagagccatcggggtcttcaccgagtgctaccggaaggacgaagagagagcccagaaactgctcacccgcgtgtccgaggcctgggggaagaccacctgcctgcagctcgccctggaggccaaggacatgaagtttgtgtctcacgggggcatccaggccttcctgaccaaggtgtggtggggccagctctccgtggacaatgggctgtggcgtgtgaccctgtgcatgctggccttcccgctgctcctcaccggcctcatctccttcagggagaagaggctgcaggatgtgggcacccccgcggcccgcgcccgtgccttcttcaccgcacccgtggtggtcttccacctgaacatcctctcctacttcgccttcctctgcctgttcgcctacgtgctcatggtggacttccagcctgtgccctcctggtgcgagtgtgccatctacctctggctcttctccttggtgtgcgaggagatgcggcagctcttctatgaccctgacgagtgcgggctgatgaagaaggcagccttgtacttcagtgacttctggaataagctggacgtcggcgcaatcttgctcttcgtggcagggctgacctgcaggctcatcccggcgacgctgtaccccgggcgcgtcatcctctctctggacttcatcctgttctgcctccggctcatgcacatttttaccatcagtaagacgctggggcccaagatcatcattgtgaagcggatgatgaaggacgtcttcttcttcctcttcctgctggctgtgtgggtggtgtccttcggggtggccaagcaggccatcctcatccacaacgagcgccgggtggactggctgttccgaggggccgtctaccactcctacctcaccatcttcgggcagatcccgggctacatcgacggtgtgaacttcaacccggagcactgcagccccaatggcaccgacccctacaagcctaagtgccccgagagcgacgcgacgcagcagaggccggccttccctgagtggctgacggtcctcctactctgcctctacctgctcttcaccaacatcctgctgctcaacctcctcatcgccatgttcaactacaccttccagcaggtgcaggagcacacggaccagatttggaagttccagcgccatgacctgatcgaggagtaccacggccgccccgccgcgccgccccccttcatcctcctcagccacctgcagctcttcatcaagagggtggtcctgaagactccggccaagaggcacaagcagctcaagaacaagctggagaagaacgaggaggcggccctgctatcctgggagatctacctgaaggagaactacctccagaaccgacagttccagcaaaagcagcggcccgagcagaagatcgaggacatcagcaataaggttgacgccatggtggacctgctggacctggacccactgaagaggtcgggctccatggagcagaggttggcctccctggaggagcaggtggcccagacagcccaagccctgcactggatcgtgaggacgctgcgggccagcggcttcagctcggaggcggacgtccccactctggcctcccagaaggccgcggaggagccggatgctgagccgggaggcaggaagaagacggaggagccgggcgacagctaccacgtgaatgcccggcacctcctctaccccaactgccctgtcacgcgcttccccgtgcccaacgagaaggtgccctgggagacggagttcctgatctatgacccacccttttacacggcagagaggaaggacgcggccgccatggaccccatgggagacaccctggagccactgtccacgatccagtacaacgtggtggatggcctgagggaccgccggagcttccacgggccgtacacagtgcaggccgggttgcccctgaaccccatgggccgcacaggactgcgtgggcgcgggagcctcagctgcttcggacccaaccacacgctgtaccccatggtcacgcggtggaggcggaacgaggatggagccatctgcaggaagagcataaagaagatgctggaagtgctggtggtgaagctccctctctccgagcactgggccctgcctgggggctcccgggagccaggggagatgctacctcggaagctgaagcggatcctccggcaggagcactggccgtcttttgaaaacttgctgaagtgcggcatggaggtgtacaaaggctacatggatgacccgaggaacacggacaatgcctggatcgagacggtggccgtcagcgtccacttccaggaccagaatgacgtggagctgaacaggctgaactctaacctgcacgcctgcgactcgggggcctccatccgatggcaggtggtggacaggcgcatcccactctatgcgaaccacaagaccctcctccagaaggcagccgctgagttcggggctcactactgactgtgccctcaggctgggcggctccagtccatagacgttccccccagaaaccagggcttctctctcctgagcctggccaggactcaggctgttcctgggccctgcacatgatggggtttggtggacccagtgcccctcacggctgccgcaagtctgctgcagatgacctcatgaactggaaggggtcaaggtgacccgggaggagagctcaagacagggcacaggctactcagagctgaggggcccctgggacccttggccatcaggcgaggggctgggcctgtgcagctgggcccttggccagagtccactcccttcctggctgtgtcaccccgagcagctcatccaccatggaggtcattggcctgaggcaagttccccggagagtcggggtcccctgtggccccctcaggcctatgtctgtgaggaaggggccctgccactctccccaagagggcctccatgtttcgaggtgcctcaacatggagccttgcctggcctgggctaggggcactgtctgaactcctgactgtcaggataaactccgtgggggtacaggagcccagacaaagcccaggcctgtcaagagacgcagagggcccctgccagggttggccccagggaccctgggacgaggctgcagaagctctccctccctactccctgggagccacgtgctggccatgtggccagggacggcatgagcaggaggcggggacgtgggggccttctggtttggtgtcaacagctcacaggagcgtgaaccatgagggccctcaggaggggaacgtggtaaaacccaagacattaaatctgccatctcaggcctggctggctcttctgtgctttccacaaataaagttcctgacacgtccagggccaggggctgtgtgacggctgcctgaagttctcctcgatcccccggtgagcttcctgcagcctgtggatgtcctgcagcccctcagccctacccccaagtttctcctctgacccatcagctccctgtcttcattttcctaaacctgggctccagcatcgtccccaagcccaccaggccaggatgcaggcatccacatgccctcctccttggcttcccctgcgtggtggtgccaatgtgccctggcacccctgcagaggctccggatggagcctggggctgcctggccactgagcactggccgaggtgatgcccacccttccctggacaggcctctgtcttccacctgacccaaagctctctagccacccccttgtccccaggtat

SEQ ID NO: 22392 - DNA, 582 bp, Homo sapiens
  misc_feature 1..582: note = ENST00000431901
  source 1..582: mol_type = unassigned DNA; mol_type = unassigned DNA
gcgcgagcccgggtgcggggactgaggcggccgtcccgggagcttgtgaagcaaccaccccatgtgtctctagaaccccagtgtagcgagctggagagaggactgtcctgagggcagcaggcctggttgcagctggcgtgggggtctcagaatggagccctcagccctgaggaaagctggctcggagcaggaggagggctttgaggggctgcccagaagggtcactgacctggggatggtctccaatctccggcgcagcaacagcagcctcttcaagagctggaggctacagtgccccttcggcaacaatgacaagcaagaaagcctcagttcgtggattcctgaaaacatcaagaagaaagaatgcgtgtattttgtggaaagttccaaactgtctgatgctgggaaggtggtgtgtcagtgtggctacacgcatgagcagcacttggaggaggctaccaagccccacaccttccagggcacacagtgggacccaaagaaacatgtccaggagatgccaaccgatgcctttggcgacatcgtcttcacgggcctgagccagaaggtgaaaaagtacgtccg

SEQ ID NO: 22393 - DNA, 6221 bp, Homo sapiens
  misc_feature 1..6221: note = ENST00000397928
  source 1..6221: mol_type = unassigned DNA; mol_type = unassigned DNA
tgtgcagaattgtacagttgcgaaaccatgtcgctggcagctggtgctggcggtggagacttccctgtgcggtgctcagtgcagctgcacccgtgggggagggagctctttctctggccctgcagtcacctgaggttgttaccattatgaacggccgctgggacccccgcatgtgcatgtactcccccagagtgtccgggggccccagccaagggacacagctcaggcagctgggaacatgtgcaggctgatgaagagaaccggatgagggcttcacatgaggaagcatgtggccaggtcctctcagaacatcagcctcatcttcctgtctctgatctatttcagcaaccaccccatgtgtctctagaaccccagtgtagcgagctggagagaggactgtcctgagggcagcaggcctggttgcagctggcgtgggggtctcagaatggagccctcagccctgaggaaagctggctcggagcaggaggagggctttgaggggctgcccagaagggtcactgacctggggatggtctccaatctccggcgcagcaacagcagcctcttcaagagctggaggctacagtgccccttcggcaacaatgacaagcaagaaagcctcagttcgtggattcctgaaaacatcaagaagaaagaatgcgtgtattttgtggaaagttccaaactgtctgatgctgggaaggtggtgtgtcagtgtggctacacgcatgagcagcacttggaggaggctaccaagccccacaccttccagggcacacagtgggacccaaagaaacatgtccaggagatgccaaccgatgcctttggcgacatcgtcttcacgggcctgagccagaaggtgaaaaagtacgtccgagtctcccaggacacgccctccagcgtgatctaccacctcatgacccagcactgggggctggacgtccccaatctcttgatctcggtgaccgggggggccaagaacttcaacatgaagccgcggctgaagagcattttccgcagaggcctggtcaaggtggctcagaccacaggggcctggatcatcacaggggggtcccacaccggcgtcatgaagcaggtaggcgaggcggtgcgggacttcagcctgagcagcagctacaaggaaggcgagctcatcaccatcggagtcgccacctggggcactgtccaccgccgcgagggcctgatccatcccacgggcagcttccccgccgagtacatactggatgaggatggccaagggaacctgacctgcctagacagcaaccactctcacttcatcctcgtggacgacgggacccacggccagtacggggtggagattcctctgaggaccaggctggagaagttcatatcggagcagaccaaggaaagaggaggtgtggccatcaagatccccatcgtgtgcgtggtgctggagggcggcccgggcacgttgcacaccatcgacaacgccaccaccaacggcaccccctgtgtggttgtggagggctcgggccgcgtggccgacgtcattgcccaggtggccaacctgcctgtctcggacatcactatctccctgatccagcagaaactgagcgtgttcttccaggagatgtttgagaccttcacggaaagcaggattgtcgagtggaccaaaaagatccaagatatcgtccggaggcggcagctgctgactgtcttccgggaaggcaaggatggtcagcaggacgtggatgtggccatcttgcaggccttgctgaaagcctcacggagccaagaccactttggccacgagaactgggaccaccagctgaaactggcagtggcatggaatcgcgtggacattgcccgcagtgagatcttcatggatgagtggcagtggaagccttcagatctgcaccccacgatgacagctgcactcatctccaacaagcctgagtttgtgaagctcttcctggagaacggggtgcagctgaaggagtttgtcacctgggacaccttgctctacctgtacgagaacctggacccctcctgcctgttccacagcaagctgcagaaggtgctggtggaggatcccgagcgcccggcttgcgcgcccgcggcgccccgcctgcagatgcaccacgtggcccaggtgctgcgggagctgctgggggacttcacgcagccgctttatccccggccccggcacaacgaccggctgcggctcctgctgcccgttccccacgtcaagctcaacgtgcagggagtgagcctccggtccctctacaagcgttcctcaggccatgtgaccttcaccatggaccccatccgtgaccttctcatttgggccattgtccagaaccgtcgggagctggcaggaatcatctgggctcagagccaggactgcatcgcagcggccttggcctgcagcaagatcctgaaggaactgtccaaggaggaggaggacacggacagctcggaggagatgctggcgctggcggaggagtatgagcacagagccatcggggtcttcaccgagtgctaccggaaggacgaagagagagcccagaaactgctcacccgcgtgtccgaggcctgggggaagaccacctgcctgcagctcgccctggaggccaaggacatgaagtttgtgtctcacgggggcatccaggccttcctgaccaaggtgtggtggggccagctctccgtggacaatgggctgtggcgtgtgaccctgtgcatgctggccttcccgctgctcctcaccggcctcatctccttcagggagaagaggctgcaggatgtgggcacccccgcggcccgcgcccgtgccttcttcaccgcacccgtggtggtcttccacctgaacatcctctcctacttcgccttcctctgcctgttcgcctacgtgctcatggtggacttccagcctgtgccctcctggtgcgagtgtgccatctacctctggctcttctccttggtgtgcgaggagatgcggcagctcttctatgaccctgacgagtgcgggctgatgaagaaggcagccttgtacttcagtgacttctggaataagctggacgtcggcgcaatcttgctcttcgtggcagggctgacctgcaggctcatcccggcgacgctgtaccccgggcgcgtcatcctctctctggacttcatcctgttctgcctccggctcatgcacatttttaccatcagtaagacgctggggcccaagatcatcattgtgaagcggatgatgaaggacgtcttcttcttcctcttcctgctggctgtgtgggtggtgtccttcggggtggccaagcaggccatcctcatccacaacgagcgccgggtggactggctgttccgaggggccgtctaccactcctacctcaccatcttcgggcagatcccgggctacatcgacggtgtgaacttcaacccggagcactgcagccccaatggcaccgacccctacaagcctaagtgccccgagagcgacgcgacgcagcagaggccggccttccctgagtggctgacggtcctcctactctgcctctacctgctcttcaccaacatcctgctgctcaacctcctcatcgccatgttcaactacaccttccagcaggtgcaggagcacacggaccagatttggaagttccagcgccatgacctgatcgaggagtaccacggccgccccgccgcgccgccccccttcatcctcctcagccacctgcagctcttcatcaagagggtggtcctgaagactccggccaagaggcacaagcagctcaagaacaagctggagaagaacgaggaggcggccctgctatcctgggagatctacctgaaggagaactacctccagaaccgacagttccagcaaaagcagcggcccgagcagaagatcgaggacatcagcaataaggttgacgccatggtggacctgctggacctggacccactgaagaggtcgggctccatggagcagaggttggcctccctggaggagcaggtggcccagacagcccaagccctgcactggatcgtgaggacgctgcgggccagcggcttcagctcggaggcggacgtccccactctggcctcccagaaggccgcggaggagccggatgctgagccgggaggcaggaagaagacggaggagccgggcgacagctaccacgtgaatgcccggcacctcctctaccccaactgccctgtcacgcgcttccccgtgcccaacgagaaggtgccctgggagacggagttcctgatctatgacccacccttttacacggcagagaggaaggacgcggccgccatggaccccatgggagacaccctggagccactgtccacgatccagtacaacgtggtggatggcctgagggaccgccggagcttccacgggccgtacacagtgcaggccgggttgcccctgaaccccatgggccgcacaggactgcgtgggcgcgggagcctcagctgcttcggacccaaccacacgctgtaccccatggtcacgcggtggaggcggaacgaggatggagccatctgcaggaagagcataaagaagatgctggaagtgctggtggtgaagctccctctctccgagcactgggccctgcctgggggctcccgggagccaggggagatgctacctcggaagctgaagcggatcctccggcaggagcactggccgtcttttgaaaacttgctgaagtgcggcatggaggtgtacaaaggctacatggatgacccgaggaacacggacaatgcctggatcgagacggtggccgtcagcgtccacttccaggaccagaatgacgtggagctgaacaggctgaactctaacctgcacgcctgcgactcgggggcctccatccgatggcaggtggtggacaggcgcatcccactctatgcgaaccacaagaccctcctccagaaggcagccgctgagttcggggctcactactgactgtgccctcaggctgggcggctccagtccatagacgttccccccagaaaccagggcttctctctcctgagcctggccaggactcaggctgttcctgggccctgcacatgatggggtttggtggacccagtgcccctcacggctgccgcaagtctgctgcagatgacctcatgaactggaaggggtcaaggtgacccgggaggagagctcaagacagggcacaggctactcagagctgaggggcccctgggacccttggccatcaggcgaggggctgggcctgtgcagctgggcccttggccagagtccactcccttcctggctgtgtcaccccgagcagctcatccaccatggaggtcattggcctgaggcaagttccccggagagtcggggtcccctgtggccccctcaggcctatgtctgtgaggaaggggccctgccactctccccaagagggcctccatgtttcgaggtgcctcaacatggagccttgcctggcctgggctaggggcactgtctgaactcctgactgtcaggataaactccgtgggggtacaggagcccagacaaagcccaggcctgtcaagagacgcagagggcccctgccagggttggccccagggaccctgggacgaggctgcagaagctctccctccctactccctgggagccacgtgctggccatgtggccagggacggcatgagcaggaggcggggacgtgggggccttctggtttggtgtcaacagctcacaggagcgtgaaccatgagggccctcaggaggggaacgtggtaaaacccaagacattaaatctgccatctcaggcctggctggctcttctgtgctttccacaaataaagttcctgacacgtccagggccaggggctgtgtgacggctgcctgaagttctcctcgatcccccggtgagcttcctgcagcctgtggatgtcctgcagcccctcagccctacccccaagtttctcctctgacccatcagctccctgtcttcattttcctaaacctgggctccagcatcgtccccaagcccaccaggccaggatgcaggcatccacatgccctcctccttggcttcccctgcgtggtggtgccaatgtgccctggcacccctgcagaggctccggatggagcctggggctgcctggccactgagcactggccgaggtgatgcccacccttccctggacaggcctctgtcttccacctgacccaaagctctctagccacccccttgtccccaggtat

SEQ ID NO: 22394 - DNA, 5216 bp, Homo sapiens
  misc_feature 1..5216: note = ENST00000397932
  source 1..5216: mol_type = unassigned DNA; mol_type = unassigned DNA
tgggggtctcagaatggagccctcagccctgaggaaagctggctcggagcaggaggagggctttgaggggctgcccagaagggtcactgacctggggatggtctccaatctccggcgcagcaacagcagcctcttcaagagctggaggctacagtgccccttcggcaacaatgacaagcaagaaagcctcagttcgtggattcctgaaaacatcaagaagaaagaatgcgtgtattttgtggaaagttccaaactgtctgatgctgggaaggtggtgtgtcagtgtggctacacgcatgagcagcacttggaggaggctaccaagccccacaccttccagggcacacagtgggacccaaagaaacatgtccaggagatgccaaccgatgcctttggcgacatcgtcttcacgggcctgagccagaaggtgaaaaagtacgtccgagtctcccaggacacgccctccagcgtgatctaccacctcatgacccagcactgggggctggacgtccccaatctcttgatctcggtgaccgggggggccaagaacttcaacatgaagccgcggctgaagagcattttccgcagaggcctggtcaaggtggctcagaccacaggggcctggatcatcacaggggggtcccacaccggcgtcatgaagcaggtaggcgaggcggtgcgggacttcagcctgagcagcagctacaaggaaggcgagctcatcaccatcggagtcgccacctggggcactgtccaccgccgcgagggcctgatccatcccacgggcagcttccccgccgagtacatactggatgaggatggccaagggaacctgacctgcctagacagcaaccactctcacttcatcctcgtggacgacgggacccacggccagtacggggtggagattcctctgaggaccaggctggagaagttcatatcggagcagaccaaggaaagaggaggtgtggccatcaagatccccatcgtgtgcgtggtgctggagggcggcccgggcacgttgcacaccatcgacaacgccaccaccaacggcaccccctgtgtggttgtggagggctcgggccgcgtggccgacgtcattgcccaggtggccaacctgcctgtctcggacatcactatctccctgatccagcagaaactgagcgtgttcttccaggagatgtttgagaccttcacggaaagcaggattgtcgagtggaccaaaaagatccaagatatcgtccggaggcggcagctgctgactgtcttccgggaaggcaaggatggtcagcaggacgtggatgtggccatcttgcaggccttgctgaaagcctcacggagccaagaccactttggccacgagaactgggaccaccagctgaaactggcagtggcatggaatcgcgtggacattgcccgcagtgagatcttcatggatgagtggcagtggaagccttcagatctgcaccccacgatgacagctgcactcatctccaacaagcctgagtttgtgaagctcttcctggagaacggggtgcagctgaaggagtttgtcacctgggacaccttgctctacctgtacgagaacctggacccctcctgcctgttccacagcaagctgcagaaggtgctggtggaggatcccgagcgcccggcttgcgcgcccgcggcgccccgcctgcagatgcaccacgtggcccaggtgctgcgggagctgctgggggacttcacgcagccgctttatccccggccccggcacaacgaccggctgcggctcctgctgcccgttccccacgtcaagctcaacgtgcagggagtgagcctccggtccctctacaagcgttcctcaggccatgtgaccttcaccatggaccccatccgtgaccttctcatttgggccattgtccagaaccgtcgggagctggcaggaatcatctgggctcagagccaggactgcatcgcagcggccttggcctgcagcaagatcctgaaggaactgtccaaggaggaggaggacacggacagctcggaggagatgctggcgctggcggaggagtatgagcacagagccatcggggtcttcaccgagtgctaccggaaggacgaagagagagcccagaaactgctcacccgcgtgtccgaggcctgggggaagaccacctgcctgcagctcgccctggaggccaaggacatgaagtttgtgtctcacgggggcatccaggccttcctgaccaaggtgtggtggggccagctctccgtggacaatgggctgtggcgtgtgaccctgtgcatgctggccttcccgctgctcctcaccggcctcatctccttcagggagaagaggctgcaggatgtgggcacccccgcggcccgcgcccgtgccttcttcaccgcacccgtggtggtcttccacctgaacatcctctcctacttcgccttcctctgcctgttcgcctacgtgctcatggtggacttccagcctgtgccctcctggtgcgagtgtgccatctacctctggctcttctccttggtgtgcgaggagatgcggcagctcttctatgaccctgacgagtgcgggctgatgaagaaggcagccttgtacttcagtgacttctggaataagctggacgtcggcgcaatcttgctcttcgtggcagggctgacctgcaggctcatcccggcgacgctgtaccccgggcgcgtcatcctctctctggacttcatcctgttctgcctccggctcatgcacatttttaccatcagtaagacgctggggcccaagatcatcattgtgaagcggatgatgaaggacgtcttcttcttcctcttcctgctggctgtgtgggtggtgtccttcggggtggccaagcaggccatcctcatccacaacgagcgccgggtggactggctgttccgaggggccgtctaccactcctacctcaccatcttcgggcagatcccgggctacatcgacggtgtgaacttcaacccggagcactgcagccccaatggcaccgacccctacaagcctaagtgccccgagagcgacgcgacgcagcagaggccggccttccctgagtggctgacggtcctcctactctgcctctacctgctcttcaccaacatcctgctgctcaacctcctcatcgccatgttcaactacaccttccagcaggtgcaggagcacacggaccagatttggaagttccagcgccatgacctgatcgaggagtaccacggccgccccgccgcgccgccccccttcatcctcctcagccacctgcagctcttcatcaagagggtggtcctgaagactccggccaagaggcacaagcagctcaagaacaagctggagaagaacgaggaggcggccctgctatcctgggagatctacctgaaggagaactacctccagaaccgacagttccagcaaaagcagcggcccgagcagaagatcgaggacatcagcaataaggcagggctggagctttgggggtcaaggacaagctctgtctgcaaatctagacagttcctgcatctcacggtggtggaatcacgcgggtccgagaaggctccagtaaccaccctcgcatgtttgcaaggctgtctgggaaaacatggcagggttgacgccatggtggacctgctggacctggacccactgaagaggtcgggctccatggagcagaggttggcctccctggaggagcaggtggcccagacagcccaagccctgcactggatcgtgaggacgctgcgggccagcggcttcagctcggaggcggacgtccccactctggcctcccagaaggccgcggaggagccggatgctgagccgggaggcaggaagaagacggaggagccgggcgacagctaccacgtgaatgcccggcacctcctctaccccaactgccctgtcacgcgcttccccgtgcccaacgagaaggtgccctgggagacggagttcctgatctatgacccacccttttacacggcagagaggaaggacgcggccgccatggaccccatgggagacaccctggagccactgtccacgatccagtacaacgtggtggatggcctgagggaccgccggagcttccacgggccgtacacagtgcaggccgggttgcccctgaaccccatgggccgcacaggactgcgtgggcgcgggagcctcagctgcttcggacccaaccacacgctgtaccccatggtcacgcggtggaggcggaacgaggatggagccatctgcaggaagagcataaagaagatgctggaagtgctggtggtgaagctccctctctccgagcactgggccctgcctgggggctcccgggagccaggggagatgctacctcggaagctgaagcggatcctccggcaggagcactggccgtcttttgaaaacttgctgaagtgcggcatggaggtgtacaaaggctacatggatgacccgaggaacacggacaatgcctggatcgagacggtggccgtcagcgtccacttccaggaccagaatgacgtggagctgaacaggctgaactctaacctgcacgcctgcgactcgggggcctccatccgatggcaggtggtggacaggcgcatcccactctatgcgaaccacaagaccctcctccagaaggcagccgctgagttcggggctcactactgactgtgccctcaggctgggcggctccagtccatagacgttccccccagaaaccagggcttctctctcctgagcctggccaggactcaggctgttcctgggccctgcacatgatggggtttggtggacccagtgcccctcacggctgccgcaagtctgctgcagatgacctcatgaactggaaggggtcaaggtgacccgggaggagagctcaagacagggcacaggctactcagagctgaggggcccctgggacccttggccatcaggcgaggggctgggcctgtgcagctgggcccttggccagagtccactcccttcctggctgtgtcaccccgagcagctcatccaccatggaggtcattggcctgaggcaagttccccggagagtcggggtcccctgtggccccctcaggcctatgtctgtgaggaaggggccctgccactctccccaagagggcctccatgtttcgaggtgcctcaacatggagccttgcctggcctgggctaggggcactgtctgaactcctgactgtcaggataa

SEQ ID NO: 22395 - DNA, 5627 bp, Homo sapiens
  misc_feature 1..5627: note = ENST00000300481
  source 1..5627: mol_type = unassigned DNA; mol_type = unassigned DNA
tgggggtctcagaatggagccctcagccctgaggaaagctggctcggagcaggaggagggctttgaggggctgcccagaagggtcactgacctggggatggtctccaatctccggcgcagcaacagcagcctcttcaagagctggaggctacagtgccccttcggcaacaatgacaagcaagaaagcctcagttcgtggattcctgaaaacatcaagaagaaagaatgcgtgtattttgtggaaagttccaaactgtctgatgctgggaaggtggtgtgtcagtgtggctacacgcatgagcagcacttggaggaggctaccaagccccacaccttccagggcacacagtgggacccaaagaaacatgtccaggagatgccaaccgatgcctttggcgacatcgtcttcacgggcctgagccagaaggtgaaaaagtacgtccgagtctcccaggacacgccctccagcgtgatctaccacctcatgacccagcactgggggctggacgtccccaatctcttgatctcggtgaccgggggggccaagaacttcaacatgaagccgcggctgaagagcattttccgcagaggcctggtcaaggtggctcagaccacaggggcctggatcatcacaggggggtcccacaccggcgtcatgaagcaggtaggcgaggcggtgcgggacttcagcctgagcagcagctacaaggaaggcgagctcatcaccatcggagtcgccacctggggcactgtccaccgccgcgagggcctgatccatcccacgggcagcttccccgccgagtacatactggatgaggatggccaagggaacctgacctgcctagacagcaaccactctcacttcatcctcgtggacgacgggacccacggccagtacggggtggagattcctctgaggaccaggctggagaagttcatatcggagcagaccaaggaaagaggaggtgtggccatcaagatccccatcgtgtgcgtggtgctggagggcggcccgggcacgttgcacaccatcgacaacgccaccaccaacggcaccccctgtgtggttgtggagggctcgggccgcgtggccgacgtcattgcccaggtggccaacctgcctgtctcggacatcactatctccctgatccagcagaaactgagcgtgttcttccaggagatgtttgagaccttcacggaaagcaggattgtcgagtggaccaaaaagatccaagatatcgtccggaggcggcagctgctgactgtcttccgggaaggcaaggatggtcagcaggacgtggatgtggccatcttgcaggccttgctgaaagcctcacggagccaagaccactttggccacgagaactgggaccaccagctgaaactggcagtggcatggaatcgcgtggacattgcccgcagtgagatcttcatggatgagtggcagtggaagccttcagatctgcaccccacgatgacagctgcactcatctccaacaagcctgagtttgtgaagctcttcctggagaacggggtgcagctgaaggagtttgtcacctgggacaccttgctctacctgtacgagaacctggacccctcctgcctgttccacagcaagctgcagatgcaccacgtggcccaggtgctgcgggagctgctgggggacttcacgcagccgctttatccccggccccggcacaacgaccggctgcggctcctgctgcccgttccccacgtcaagctcaacgtgcagggagtgagcctccggtccctctacaagcgttcctcaggccatgtgaccttcaccatggaccccatccgtgaccttctcatttgggccattgtccagaaccgtcgggagctggcaggaatcatctgggctcagagccaggactgcatcgcagcggccttggcctgcagcaagatcctgaaggaactgtccaaggaggaggaggacacggacagctcggaggagatgctggcgctggcggaggagtatgagcacagagccatcggggtcttcaccgagtgctaccggaaggacgaagagagagcccagaaactgctcacccgcgtgtccgaggcctgggggaagaccacctgcctgcagctcgccctggaggccaaggacatgaagtttgtgtctcacgggggcatccaggccttcctgaccaaggtgtggtggggccagctctccgtggacaatgggctgtggcgtgtgaccctgtgcatgctggccttcccgctgctcctcaccggcctcatctccttcagggagaagaggctgcaggatgtgggcacccccgcggcccgcgcccgtgccttcttcaccgcacccgtggtggtcttccacctgaacatcctctcctacttcgccttcctctgcctgttcgcctacgtgctcatggtggacttccagcctgtgccctcctggtgcgagtgtgccatctacctctggctcttctccttggtgtgcgaggagatgcggcagctcttctatgaccctgacgagtgcgggctgatgaagaaggcagccttgtacttcagtgacttctggaataagctggacgtcggcgcaatcttgctcttcgtggcagggctgacctgcaggctcatcccggcgacgctgtaccccgggcgcgtcatcctctctctggacttcatcctgttctgcctccggctcatgcacatttttaccatcagtaagacgctggggcccaagatcatcattgtgaagcggatgatgaaggacgtcttcttcttcctcttcctgctggctgtgtgggtggtgtccttcggggtggccaagcaggccatcctcatccacaacgagcgccgggtggactggctgttccgaggggccgtctaccactcctacctcaccatcttcgggcagatcccgggctacatcgacggtgtgaacttcaacccggagcactgcagccccaatggcaccgacccctacaagcctaagtgccccgagagcgacgcgacgcagcagaggccggccttccctgagtggctgacggtcctcctactctgcctctacctgctcttcaccaacatcctgctgctcaacctcctcatcgccatgttcaactacaccttccagcaggtgcaggagcacacggaccagatttggaagttccagcgccatgacctgatcgaggagtaccacggccgccccgccgcgccgccccccttcatcctcctcagccacctgcagctcttcatcaagagggtggtcctgaagactccggccaagaggcacaagcagctcaagaacaagctggagaagaacgaggaggcggccctgctatcctgggagatctacctgaaggagaactacctccagaaccgacagttccagcaaaagcagcggcccgagcagaagatcgaggacatcagcaataaggttgacgccatggtggacctgctggacctggacccactgaagaggtcgggctccatggagcagaggttggcctccctggaggagcaggtggcccagacagcccaagccctgcactggatcgtgaggacgctgcgggccagcggcttcagctcggaggcggacgtccccactctggcctcccagaaggccgcggaggagccggatgctgagccgggaggcaggaagaagacggaggagccgggcgacagctaccacgtgaatgcccggcacctcctctaccccaactgccctgtcacgcgcttccccgtgcccaacgagaaggtgccctgggagacggagttcctgatctatgacccacccttttacacggcagagaggaaggacgcggccgccatggaccccatgggagagaaccccatgggccgcacaggactgcgtgggcgcgggagcctcagctgcttcggacccaaccacacgctgtaccccatggtcacgcggtggaggcggaacgaggatggagccatctgcaggaagagcataaagaagatgctggaagtgctggtggtgaagctccctctctccgagcactgggccctgcctgggggctcccgggagccaggggagatgctacctcggaagctgaagcggatcctccggcaggagcactggccgtcttttgaaaacttgctgaagtgcggcatggaggtgtacaaaggctacatggatgacccgaggaacacggacaatgcctggatcgagacggtggccgtcagcgtccacttccaggaccagaatgacgtggagctgaacaggctgaactctaacctgcacgcctgcgactcgggggcctccatccgatggcaggtggtggacaggcgcatcccactctatgcgaaccacaagaccctcctccagaaggcagccgctgagttcggggctcactactgactgtgccctcaggctgggcggctccagtccatagacgttccccccagaaaccagggcttctctctcctgagcctggccaggactcaggctgttcctgggccctgcacatgatggggtttggtggacccagtgcccctcacggctgccgcaagtctgctgcagatgacctcatgaactggaaggggtcaaggtgacccgggaggagagctcaagacagggcacaggctactcagagctgaggggcccctgggacccttggccatcaggcgaggggctgggcctgtgcagctgggcccttggccagagtccactcccttcctggctgtgtcaccccgagcagctcatccaccatggaggtcattggcctgaggcaagttccccggagagtcggggtcccctgtggccccctcaggcctatgtctgtgaggaaggggccctgccactctccccaagagggcctccatgtttcgaggtgcctcaacatggagccttgcctggcctgggctaggggcactgtctgaactcctgactgtcaggataaactccgtgggggtacaggagcccagacaaagcccaggcctgtcaagagacgcagagggcccctgccagggttggccccagggaccctgggacgaggctgcagaagctctccctccctactccctgggagccacgtgctggccatgtggccagggacggcatgagcaggaggcggggacgtgggggccttctggtttggtgtcaacagctcacaggagcgtgaaccatgagggccctcaggaggggaacgtggtaaaacccaagacattaaatctgccatctcaggcctggctggctcttctgtgctttccacaaataaagttcctgacacgtccagggccaggggctgtgtgacggctgcctgaagttctcctcgatcccccggtgagcttcctgcagcctgtggatgtcctgcagcccctcagccctacccccaagtttctcctctgacccatcagctccctgtcttcattttcctaaacctgggctccagcatcgtccccaagcccaccaggccaggatgcaggcatccacatgccctcctccttggcttcccctgcgtggtggtgccaatgtgccctggcacccctgcagaggctccggatggagcctggggctgcctggccactgagcactggccgaggtgatgcccacccttccctggacaggcctctgtcttccacctgacccaaagctctctagccacccccttgtccccaggtat

SEQ ID NO: 22396 - DNA, 5228 bp, Homo sapiens
  misc_feature 1..5228: note = ENST00000498430
  source 1..5228: mol_type = unassigned DNA; mol_type = unassigned DNA
gggtgtcaggtgcccctcagtgctgtggggcctgcccacccgtgctccttccccaggggcctggatcatcacaggggggtcccacaccggcgtcatgaagcaggtaggcgaggcggtgcgggacttcagcctgagcagcagctacaaggaaggcgagctcatcaccatcggagtcgccacctggggcactgtccaccgccgcgagggcctgatccatcccacgggcagcttccccgccgagtacatactggatgaggatggccaagggaacctgacctgcctagacagcaaccactctcacttcatcctcgtggacgacgggacccacggccagtacggggtggagattcctctgaggaccaggctggagaagttcatatcggagcagaccaaggaaagaggaggtgtggccatcaagatccccatcgtgtgcgtggtgctggagggcggcccgggcacgttgcacaccatcgacaacgccaccaccaacggcaccccctgtgtggttgtggagggctcgggccgcgtggccgacgtcattgcccaggtggccaacctgcctgtctcggacatcactatctccctgatccagcagaaactgagcgtgttcttccaggagatgtttgagaccttcacggaaagcaggattgtcgagtggaccaaaaagatccaagatatcgtccggaggcggcagctgctgactgtcttccgggaaggcaaggatggtcagcaggacgtggatgtggccatcttgcaggccttgctgaaagcctcacggagccaagaccactttggccacgagaactgggaccaccagctgaaactggcagtggcatggaatcgcgtggacattgcccgcagtgagatcttcatggatgagtggcagtggaagccttcagatctgcaccccacgatgacagctgcactcatctccaacaagcctgagtttgtgaagctcttcctggagaacggggtgcagctgaaggagtttgtcacctgggacaccttgctctacctgtacgagaacctggacccctcctgcctgttccacagcaagctgcagaaggtgctggtggaggatcccgagcgcccggcttgcgcgcccgcggcgccccgcctgcagatgcaccacgtggcccaggtgctgcgggagctgctgggggacttcacgcagccgctttatccccggccccggcacaacgaccggctgcggctcctgctgcccgttccccacgtcaagctcaacgtgcagggagtgagcctccggtccctctacaagcgttcctcaggccatgtgaccttcaccatggaccccatccgtgaccttctcatttgggccattgtccagaaccgtcgggagctggcaggaatcatctgggctcagagccaggactgcatcgcagcggccttggcctgcagcaagatcctgaaggaactgtccaaggaggaggaggacacggacagctcggaggagatgctggcgctggcggaggagtatgagcacagagccatcggggtcttcaccgagtgctaccggaaggacgaagagagagcccagaaactgctcacccgcgtgtccgaggcctgggggaagaccacctgcctgcagctcgccctggaggccaaggacatgaagtttgtgtctcacgggggcatccaggccttcctgaccaaggtgtggtggggccagctctccgtggacaatgggctgtggcgtgtgaccctgtgcatgctggccttcccgctgctcctcaccggcctcatctccttcagggagaagaggctgcaggatgtgggcacccccgcggcccgcgcccgtgccttcttcaccgcacccgtggtggtcttccacctgaacatcctctcctacttcgccttcctctgcctgttcgcctacgtgctcatggtggacttccagcctgtgccctcctggtgcgagtgtgccatctacctctggctcttctccttggtgtgcgaggagatgcggcagctcttctatgaccctgacgagtgcgggctgatgaagaaggcagccttgtacttcagtgacttctggaataagctggacgtcggcgcaatcttgctcttcgtggcagggctgacctgcaggctcatcccggcgacgctgtaccccgggcgcgtcatcctctctctggacttcatcctgttctgcctccggctcatgcacatttttaccatcagtaagacgctggggcccaagatcatcattgtgaagcggatgatgaaggacgtcttcttcttcctcttcctgctggctgtgtgggtggtgtccttcggggtggccaagcaggccatcctcatccacaacgagcgccgggtggactggctgttccgaggggccgtctaccactcctacctcaccatcttcgggcagatcccgggctacatcgacggtgtgaacttcaacccggagcactgcagccccaatggcaccgacccctacaagcctaagtgccccgagagcgacgcgacgcagcagaggccggccttccctgagtggctgacggtcctcctactctgcctctacctgctcttcaccaacatcctgctgctcaacctcctcatcgccatgttcaactacaccttccagcaggtgcaggagcacacggaccagatttggaagttccagcgccatgacctgatcgaggagtaccacggccgccccgccgcgccgccccccttcatcctcctcagccacctgcagctcttcatcaagagggtggtcctgaagactccggccaagaggcacaagcagctcaagaacaagctggagaagaacgaggaggcggccctgctatcctgggagatctacctgaaggagaactacctccagaaccgacagttccagcaaaagcagcggcccgagcagaagatcgaggacatcagcaataaggttgacgccatggtggacctgctggacctggacccactgaagaggtcgggctccatggagcagaggttggcctccctggaggagcaggtggcccagacagcccaagccctgcactggatcgtgaggacgctgcgggccagcggcttcagctcggaggcggacgtccccactctggcctcccagaaggccgcggaggagccggatgctgagccgggaggcaggaagaagacggaggagccgggcgacagctaccacgtgaatgcccggcacctcctctaccccaactgccctgtcacgcgcttccccgtgcccaacgagaaggtgccctgggagacggagttcctgatctatgacccacccttttacacggcagagaggaaggacgcggccgccatggaccccatgggagacaccctggagccactgtccacgatccagtacaacgtggtggatggcctgagggaccgccggagcttccacgggccgtacacagtgcaggccgggttgcccctgaaccccatgggccgcacaggactgcgtgggcgcgggagcctcagctgcttcggacccaaccacacgctgtaccccatggtcacgcggtggaggcggaacgaggatggagccatctgcaggaagagcataaagaagatgctggaagtgctggtggtgaagctccctctctccgagcactgggccctgcctgggggctcccgggagccaggggagatgctacctcggaagctgaagcggatcctccggcaggagcactggccgtcttttgaaaacttgctgaagtgcggcatggaggtgtacaaaggctacatggatgacccgaggaacacggacaatgcctggatcgagacggtggccgtcagcgtccacttccaggaccagaatgacgtggagctgaacaggctgaactctaacctgcacgcctgcgactcgggggcctccatccgatggcaggtggtggacaggcgcatcccactctatgcgaaccacaagaccctcctccagaaggcagccgctgagttcggggctcactactgactgtgccctcaggctgggcggctccagtccatagacgttccccccagaaaccagggcttctctctcctgagcctggccaggactcaggctgttcctgggccctgcacatgatggggtttggtggacccagtgcccctcacggctgccgcaagtctgctgcagatgacctcatgaactggaaggggtcaaggtgacccgggaggagagctcaagacagggcacaggctactcagagctgaggggcccctgggacccttggccatcaggcgaggggctgggcctgtgcagctgggcccttggccagagtccactcccttcctggctgtgtcaccccgagcagctcatccaccatggaggtcattggcctgaggcaagttccccggagagtcggggtcccctgtggccccctcaggcctatgtctgtgaggaaggggccctgccactctccccaagagggcctccatgtttcgaggtgcctcaacatggagccttgcctggcctgggctaggggcactgtctgaactcctgactgtcaggataaactccgtgggggtacaggagcccagacaaagcccaggcctgtcaagagacgcagagggcccctgccagggttggccccagggaccctgggacgaggctgcagaagctctccctccctactccctgggagccacgtgctggccatgtggccagggacggcatgagcaggaggcggggacgtgggggccttctggtttggtgtcaacagctcacaggagcgtgaaccatgagggccctcaggaggggaacgtggtaaaacccaagacattaaatctgccatctcaggcctggctggctcttctgtgctttccacaaataaagttcctgacacgtccagggccaggggctgtgtgacggctgcctgaagttctcctcgatcccccggtgagcttcctgcagcctgtggatgtcctgcagcccctcagccctacccccaagtttctcctctgacccatcagctccctgtcttcattttcctaaacctgggctccagcatcgtccccaagcccaccaggccaggatgcaggcatccacatgccctcctccttggcttcccctgcgtggtggtgccaatgtgccctggcacccctgcagaggctccggatggagcctggggctgcctggccactgagcactggccgaggtgatgcccacccttccctggacaggcctctgtcttccacctgacccaaagctctctagccacccccttgtccccaggtat

SEQ ID NO: 22397 - DNA, 904 bp, Homo sapiens
  misc_feature 1..904: note = ENST00000490982
  source 1..904: mol_type = unassigned DNA; mol_type = unassigned DNA
aggtggaggagcccagatgttttggcggaaggaccacagaggaagtccttgtcctgcgggcgggcacctgagcccgggctccgccttgcgtcacgtcttcctgactgtccccagcctcccagaaggccgcggaggagccggatgctgagccgggaggcaggaagaagacggaggagccgggcgacagctaccacgtgaatgcccggcacctcctctaccccaactgccctgtcacgcgcttccccgtgcccaacgagaaggtgccctgggagagaggaaggacgcggccgccatggaccccatgggagagaaccccatgggccgcacaggactgcgtgggcgcgggagcctcagctgcttcggacccaaccacacgctgtaccccatggtcacgcggtggaggcggaacgaggatggagccatctgcaggaagagcataaagaagatgctggaagtgctggtggtgaagctccctctctccgagcactgggccctgcctgggggctcccgggagccaggggagatgctacctcggaagctgaagcggatcctccggcaggagcactggccgtcttttgaaaacttgctgaagtgcggcatggaggtgtacaaaggctacatggatgacccgaggaacacggacaatgcctggatcgagacggtggccgtcagcgtccacttccaggaccagaatgacgtggagctgaacaggctgaactctaacctgcacgcctgcgactcgggggcctccatccgatggcaggtggtggacaggcgcatcccactctatgcgaaccacaagaccctcctccagaaggcagccgctgagttcggggctcactactgactgtgccctcaggctgggcggctccagtccatagacgttccccccagaaaccagggc

SEQ ID NO: 22398 - DNA, 1669 bp, Homo sapiens
  misc_feature 1..1669: note = ENST00000621064
  source 1..1669: mol_type = unassigned DNA; mol_type = unassigned DNA
agccctgcactggatcgtgaggacgctgcgggccagcggcttcagctcggaggcggacgtccccactctggcctcccagaaggccgcggaggagccggatgctgagccgggagcaggaagaagacggaggagccgggcgacagtaccacgtgaatgcccggcacctcctctaccccaactgccctgtcacgcgcttccccgtgcccaacgagaaggtgccctgggagacggagttcctgatctatgacccacccttttacacggcagagaggaaggacgcggccgccatggaccccatgggagagaaccccatgggccgcacaggactgcgtgggcgcgggagcctcagctgcttcggacccaaccacacgctgtaccccatggtcacgcggtggaggcggaacgaggatggagccatctgcaggaagagcataaagaagatgctggaagtgctggtggtgaagctccctctctccgagcactgggccctgcctgggggctcccgggagccaggggagatgctacctcggaagctgaagcggatcctccggcaggagcactggccgtcttttgaaaacttgctgaagtgcggcatggaggtgtacaaaggctacatggatgacccgaggaacacggacaatgcctggatcgagacggtggccgtcagcgtccacttccaggaccagaatgacgtggagctgaacaggctgaactctaacctgcacgcctgcgactcgggggcctccatccgatggcaggtggtggacaggcgcatcccactctatgcgaaccacaagaccctcctccagaaggcagccgctgagttcggggctcactactgactgtgccctcaggctgggcggctccagtccatagacgttccccccagaaaccagggcttctctctcctgagcctggccaggactcaggctgttcctgggccctgcacatgatggggtttggtggacccagtgcccctcacggctgccgcaagtctgctgcagatgacctcatgaactggaaggggtcaaggtgacccgggaggagagctcaagacagggcacaggctactcagagctgaggggcccctgggacccttggccatcaggcgaggggctgggcctgtgcagctgggcccttggccagagtccactcccttcctggctgtgtcaccccgagcagctcatccaccatggaggtcattggcctgaggcaagttccccggagagtcggggtcccctgtggccccctcaggcctatgtctgtgaggaaggggccctgccactctccccaagagggcctccatgtttcgaggtgcctcaacatggagccttgcctggcctgggctaggggcactgtctgaactcctgactgtcaggataaactccgtgggggtacaggagcccagacaaagcccaggcctgtcaagagacgcagagggcccctgccagggttggccccagggaccctgggacgaggctgcagaagctctccctccctactccctgggagccacgtgctggccatgtggccagggacggcatgagcaggaggcggggacgtgggggccttctggtttggtgtcaacagctcacaggagcgtgaaccatgagggccctcaggaggggaacgtggtaaaacccaagacattaaatctgccatctcaggc

SEQ ID NO: 22399 - DNA, 5050 bp, Homo sapiens
  misc_feature 1..5050: note = ENST00000381913
  source 1..5050: mol_type = unassigned DNA; mol_type = unassigned DNA
agggggacatcgcagccctgctcatcgccgccggcgccgacgtcaacgcgcacgccaagggggccttcttcaaccccaagtaccaacacgaaggcttctacttcggtgagacgcccctggccctggcagcatgcaccaaccagcccgagattgtgcagctgctgatggagcacgagcagacggacatcacctcgcgggactcacgaggcaacaacatccttcacgccctggtgaccgtggccgaggacttcaagacgcagaatgactttgtgaagcgcatgtacgacatgatcctactgcggagtggcaactgggagctggagaccactcgcaacaacgatggcctcacgccgctgcagctggccgccaagatgggcaaggcggagatcctgaagtacatcctcagtcgtgagatcaaggagaagcggctccggagcctgtccaggaagttcaccgactgggcgtacggacccgtgtcatcctccctctacgacctcaccaacgtggacaccaccacggacaactcagtgctggaaatcactgtctacaacaccaacatcgacaaccggcatgagatgctgaccctggagccgctgcacacgctgctgcatatgaagtggaagaagtttgccaagcacatgttctttctgtccttctgcttttatttcttctacaacatcaccctgaccctcgtctcgtactaccgcccccgggaggaggaggccatcccgcaccccttggccctgacgcacaagatggggtggctgcagctcctagggaggatgtttgtgctcatctgggccatgtgcatctctgtgaaagagggcattgccatcttcctgctgagaccctcggatctgcagtccatcctctcggatgcctggttccactttgtcttagtacctcgcctgcctcgtgctggccatggccctgggctgggcgaacatgctctactatacgcggggtttccagtccatgggcatgtacagcgtcatgatccagaaggtcattttgcatgatgttctgaagttcttgtttgtatatatcgtgtttttgcttggatttggagtagccttggcctcgctgatcgagaagtgtcccaaagacaacaaggactgcagctcctacggcagcttcagcgacgcagtgctggaactcttcaagctcaccataggcctgggtgacctgaacatccagcagaactccaagtatcccattctctttctgttcctgctcatcacctatgtcatcctcacctttgttctcctcctcaacatgctcattgctctgatgggcgagactgtggagaacgtctccaaggagagcgaacgcatctggcgcctgcagagagccaggaccatcttggagtttgagaaaatgttaccagaatggctgaggagcagattccggatgggagagctgtgcaaagtggccgaggatgatttccgactgtgtttgcggatcaatgaggtgaagtggactgaatggaagacgcacgtctccttccttaacgaagacccggggcctgtaagacgaacagatttcaacaaaatccaagattcttccaggaacaacagcaaaaccactctcaatgcatttgaagaagtcgaggaattcccggaaacctcggtgtagaagcggaacccagagctggtgtgcgcgtgcgctgtctggcgctgcaggcggagtcaccgactctgtgcagagaggctttgagggatggtggagtccggctctgctggcctagaagcagagtgcaccctcgtgctcagtgctcagtgggtgtctgaactgaggggcagttgtcaatttgtctgagtgggaaacatcctggattttgttacttggcaaacagctggtgtaaacctacagccagcagcagtctggagcctgggagcctcctgaagtcccgggtgaagcctctggttttaccaattgcaggtcggcttggctgggagagatggatggcgggaaaggggcagcagtcttgaggagcagggagaggagtctttcctcctgccagcttcccccgtcagccccaaccccagcccacacattgtaccatctcttctgctgtgactgggttgcctgaatttgtgggagacccgtgatcccatcccagagtgtgcgggggacggaggtaagctggatatcctgggggaggaggggaatgcgctctggaaacacccttccggaacccttcggggaaaaggagaccatccttggagtgaacgtcccctgacaccccaaggttcaaactgtctcaagctgagagatgtttttagtagcagaattaacacagggttttaacttgcaatacggaaaagacatttcagttgagaatgaaaattactacaatgaagtttgtgattttaaaagtggagacagactgggggctttggggctggatgtaagtattatatatttggcctcagggtgcccagagcaagacaaaaagcttttcttcacacacacaaaagtctgcatgagacactccgggcaagtcctgctgggccgccgcgatctgggtgaaaggtcctggctcttttcctcgtcctgacctcacagtagcgcgtgcctgtgtgctgggatcgtggctttcgctgaagcagaaatagcagctgctcgatcgatatcatcttggaactcagcagttagtcgcatacctcagtatgtctcagtgggggaatttaacaaaatgcctcaactgctttggtacgaagtattttttttttaattttaactgtgaattttgaagctgaaggggaagcttgtgagagaaaagcatttgccaagactttgagcttatttttaggtcctcgtcctctgatgttctctttctgaaatgacacggagtcagtctggggggcagaggtgaagtggagacggaaggattttccaggtgactggggccgaaaccaccagaaaatccactctgccgccgttatctggtgaaaggattcatgtaaaaatgttcgaggtggaattataaaaatagtaaccataaatgttaatcttaaatggcagaaatagaaatttggccttcagataacatggcgatagataagttcatctggcttgaggcaaactgaagagtcggggcctagcagtgcactctgggccagtttctctgccctgggccactctgtgtgccagactagctggacagatagagactttgtgcccctgatggggccgattggggagaggtgggctggggtgtgtgaggcttcacaatccacagcagcccctgccctcccagctgacccagggagtaatcgcgtgctctaagccacagtggtcggggctgggcatgggcctctggagaagagaagatttgaggagaactgtcctagaggcaggaggagcagatgtgtttcagaatgggcagaattaggaaattgagaaagattttggctcaacagaatccagcaactgctccagatgttggagatgtttaagcagaagctggttgcgcacttaatgaggaatgttgttgaaaatggtcattggaagaagtttaaggtcccttttagcctggagattgtacaaatcagcattccacatctggagttagctacccgcattaagcctgaacagacatcttggtctgaaaggaagtggtttggattcatgatgccaagctccacactatggagctgggaattccagaattgctttgactcagatattaatggagaaagtcatatccattaatggataaagccgtatctgttatggataaagccgtatccagagttgctttgactcggatgttaatggataaagccaattattgatttctatttgcctaacctgccagcttttgtccaagtggggaatggagagccatagggatgtttgtcatctcacatgttttggtgatctgctgtctgtgggtctggatggaatttgttggcaagaccattttctgtattggatattcttcccaacagtgtccaccccaaaaggctttcagccaaaacgtctgagcctaggtaggtttaccaagggaagccataagtcaagaagcatcagagtgaaaaggagcacttccttcattttacgcccagaggctaatgctccgagaggaatgtgtacttgggcaaagtcatgcaggaaggtcatatcagagctgtggaggctggagtgtcctgattcttggaccacagatgtctccctgagccattatttatttatttttaaaaagcacagttattccatcattttgagtctttgtatttcgcttatattggggggcaggactattttctcaggtgtctcatttggcagtcaacattgtcccctatgttccctatgactagttgaaaattcaagtgtgcccacaggggtgcacaaaaccacacccatgcacacacacaccctcagcccccacacacaccccgttgaacccgtgggtctatcaggacatcctaaaactccgtgattgacatttcagtaatttcaggggaaggtgttttccagggatggggtctcccaggttcagatagtgcctttggctgcaaatgctcctttagctaaacttttcctcaggaagaattcattattctagacattatgtgatatatctgttaggaataaaaggtgcttaaccttcctccctgggatgtgggagaaggtgctggaggttgtactgtgaagtcttcaggctcttagaaggctccagcctgagagagccctttattattgacattcctgtccttcctcaaggcctggtgacctgtgacctttcgctctgggcagggcccaggtagatgggccgtcatccgggcctgtaagccgtacttgatttctgcattgatttacatattttttactgtgatcttggttccaaacacagaatcgtcaccccattctcccttgaatgtgccggatccttgtaaattctcatttacctacttgttcttagtgtgtatgtgtgtgcgaaactctatgttcaagaaagaaatcatacaaagagtaagaacatgtttgtgccattgaagaaatggttttttgatttctaataaatatttgttttgcctcgtta

SEQ ID NO: 22400 - DNA, 1621 bp, Homo sapiens
  misc_feature 1..1621: note = ENST00000577016
  source 1..1621: mol_type = unassigned DNA; mol_type = unassigned DNA
atgagatgctgaccctggagccgctgcacacgctgctgcatatgaagtggaagaagtttgccaagcacatgttctttctgtccttctgcttttatttcttctacaacatcaccctgaccctcgtctcgtactaccgcccccgggaggaggaggccatcccgcaccccttggccctgacgcacaagatggggtggctgcagctcctagggaggatgtttgtgctcatctgggccatgtgcatctctgtgaaagagggcattgccatcttcctgctgagaccctcggatctgcagtccatcctctcggatgcctggttccactttgtcttccttggcctcgctgatcgagaagtgtcccaaagacaacaaggactgcagctcctacggcagcttcagcgacgcagtgctggaactcttcaagctcaccataggcctgggtgacctgaacatccagcagaactccaagtatcccattctctttctgttcctgctcatcacctatgtcatcctcacctttgttctcctcctcaacatgctcattgctctgatgggcgagactgtggagaacgtctccaaggagagcgaacgcatctggcgcctgcagagagccaggaccatcttggagtttgagaaaatgttaccagaatggctgaggagcagattccggatgggagagctgtgcaaagtggccgaggatgatttccgactgtgtttgcggatcaatgaggtgaagtggactgaatggaagacgcacgtctccttccttaacgaagacccggggcctgtaagacgaacagcagatttcaacaaaatccaagattcttccaggaacaacagcaaaaccactctcaatgcatttgaagaagtcgaggaattcccggaaacctcggtgtagaagcggaacccagagctggtgtgcgcgtgcgctgtctggcgctgcaggcggagtcaccgactctgtgcagagaggctttgagggatggtggagtccggctctgctggcctagaagcagagtgcaccctcgtgctcagtgctcagtgggtgtctgaactgaggggcagttgtcaatttgtctgagtgggaaacatcctggattttgttacttggcaaacagctggtgtaaacctacagccagcagcagtctggagcctgggagcctcctgaagtcccgggtgaagcctctggttttaccaattgcaggtcggcttggctgggagagatggatggcgggaaaggggcagcagtcttgaggagcagggagaggagtctttcctcctgccagcttcccccgtcagccccaaccccagcccacacattgtaccatctcttctgctgtgactgggttgcctgaatttgtgggagacccgtgatcccatcccagagtgtgcgggggacggaggtaagctggatatcctgggggaggaggggaatgcgctctggaaacacccttccggaacccttcggggaaaaggagaccatccttggagtgaacgtcccctgacaccccaaggttcaaactgtctcaagctgagagatgtttttagtagcagaattaacacagggttttaacttgcaatacggaaaagacatttcagttgagaatgaaaattactacaatgaa

SEQ ID NO: 22401 - DNA, 3235 bp, Homo sapiens
  misc_feature 1..3235: note = ENST00000301365
  source 1..3235: mol_type = unassigned DNA; mol_type = unassigned DNA
tccagccatccctctgcctgcaatgagagcttcccgccgcctcagccacagtcccacccgggggccttgggccccagacatgcggtgatctcagggcaagggttgccacgaccacccagaacctcaccagccatgaaagcccaccccaaggagatggtgcctctcatgggcaagagagttgctgcccccagtgggaaccctgccatcctgccagagaagaggccggcggagatcacccccacaaagaagagtgcacacttcttcctggagatagaagggtttgaacccaaccccacagttgccaagacctctcctcctgtcttctccaagcccatggattccaacatccggcagtgcatctctggtaactgtgatgacatggactccccccagtctcctcaggatgatgtgacagagaccccatccaatcccaacagccccagtgcacagctggccaaggaagagcagaggaggaaaaagaggcggctgaagaagcgcatctttgcagccgtgtctgagggctgcgtggaggagttggtagagttgctggtggagctgcaggagctttgcaggcggcgccatgatgaggatgtgcctgacttcctcatgcacaagctgacggcctccgacacggggaagacctgcctgatgaaggccttgttaaacatcaaccccaacaccaaggagatagtgcggatcctgcttgcctttgctgaagagaacgacatcctgggcaggttcatcaacgccgagtacacagaggaggcctatgaagggcagacggcgctgaacatcgccatcgagcggcggcagggggacatcgcagccctgctcatcgccgccggcgccgacgtcaacgcgcacgccaagggggccttcttcaaccccaagtaccaacacgaaggcttctacttcggtgagacgcccctggccctggcagcatgcaccaaccagcccgagattgtgcagctgctgatggagcacgagcagacggacatcacctcgcgggactcacgaggcaacaacatccttcacgccctggtgaccgtggccgaggacttcaagacgcagaatgactttgtgaagcgcatgtacgacatgatcctactgcggagtggcaactgggagctggagaccactcgcaacaacgatggcctcacgccgctgcagctggccgccaagatgggcaaggcggagatcctgaagtacatcctcagtcgtgagatcaaggagaagcggctccggagcctgtccaggaagttcaccgactgggcgtacggacccgtgtcatcctccctctacgacctcaccaacgtggacaccaccacggacaactcagtgctggaaatcactgtctacaacaccaacatcgacaaccggcatgagatgctgaccctggagccgctgcacacgctgctgcatatgaagtggaagaagtttgccaagcacatgttctttctgtccttctgcttttatttcttctacaacatcaccctgaccctcgtctcgtactaccgcccccgggaggaggaggccatcccgcaccccttggccctgacgcacaagatggggtggctgcagctcctagggaggatgtttgtgctcatctgggccatgtgcatctctgtgaaagagggcattgccatcttcctgctgagaccctcggatctgcagtccatcctctcggatgcctggttccactttgtcttttttatccaagctgtgcttgtgatactgtctgtcttcttgtacttgtttgcctacaaagagtacctcgcctgcctcgtgctggccatggccctgggctgggcgaacatgctctactatacgcggggtttccagtccatgggcatgtacagcgtcatgatccagaaggtcattttgcatgatgttctgaagttcttgtttgtatatatcgtgtttttgcttggatttggagtagccttggcctcgctgatcgagaagtgtcccaaagacaacaaggactgcagctcctacggcagcttcagcgacgcagtgctggaactcttcaagctcaccataggcctgggtgacctgaacatccagcagaactccaagtatcccattctctttctgttcctgctcatcacctatgtcatcctcacctttgttctcctcctcaacatgctcattgctctgatgggcgagactgtggagaacgtctccaaggagagcgaacgcatctggcgcctgcagagagccaggaccatcttggagtttgagaaaatgttaccagaatggctgaggagcagattccggatgggagagctgtgcaaagtggccgaggatgatttccgactgtgtttgcggatcaatgaggtgaagtggactgaatggaagacgcacgtctccttccttaacgaagacccggggcctgtaagacgaacagcagatttcaacaaaatccaagattcttccaggaacaacagcaaaaccactctcaatgcatttgaagaagtcgaggaattcccggaaacctcggtgtagaagcggaacccagagctggtgtgcgcgtgcgctgtctggcgctgcaggcggagtcaccgactctgtgcagagaggctttgagggatggtggagtccggctctgctggcctagaagcagagtgcaccctcgtgctcagtgctcagtgggtgtctgaactgaggggcagttgtcaatttgtctgagtgggaaacatcctggattttgttacttggcaaacagctggtgtaaacctacagccagcagcagtctggagcctgggagcctcctgaagtcccgggtgaagcctctggttttaccaattgcaggtcggcttggctgggagagatggatggcgggaaaggggcagcagtcttgaggagcagggagaggagtctttcctcctgccagcttcccccgtcagccccaaccccagcccacacattgtaccatctcttctgctgtgactgggttgcctgaatttgtgggagacccgtgatcccatcccagagtgtgcgggggacggaggtaagctggatatcctgggggaggaggggaatgcgctctggaaacacccttccggaacccttcggggaaaaggagaccatccttggagtgaacgtcccctgacaccccaaggttcaaactgtctcaagctgagagatgtttttagtagcagaattaacacagggttttaacttgcaatacggaaaagacatttcagttgagaatgaaaattactacaatgaa

SEQ ID NO: 22402 - DNA, 2726 bp, Homo sapiens
  misc_feature 1..2726: note = ENST00000571139
  source 1..2726: mol_type = unassigned DNA; mol_type = unassigned DNA
gcctcagccacagtcccacccgggggccttgggccccagacatgcggtgatctcagggcaagggttgccacgaccacccagaacctcaccagccatgaaagcccaccccaaggagatggtgcctctcatgggcaagagagttgctgcccccagtgggaaccctgccatcctgccagagaagaggccggcggagatcacccccacaaagaagagtagacacagggttttgccgcattggcctcaaactcctgacctcaactgatctgcccactttgacctcccagagggctgggattacaggcatgagccaccacacctggcctagcccagctttgaatctggactttgctacctatctgctgcgtgaccttggtgcacacttcttcctggagatagaagggtttgaacccaaccccacagttgccaagacctctcctcctgtcttctccaagcccatggattccaacatccggcagtgcatctctggtaactgtgatgacatggactccccccagtctcctcaggatgatgtgacagagaccccatccaatcccaacagccccagtgcacagctggccaaggaagagcagaggaggaaaaagaggcggctgaagaagcgcatctttgcagccgtgtctgagggctgcgtggaggagttggtagagttgctggtggagctgcaggagctttgcaggcggcgccatgatgaggatgtgcctgacttcctcatgcacaagctgacggcctccgacacggggaagacctgcctgatgaaggccttgttaaacatcaaccccaacaccaaggagatagtgcggatcctgcttgcctttgctgaagagaacgacatcctgggcaggttcatcaacgccgagtacacagaggaggcctatgaagggcagacggcgctgaacatcgccatcgagcggcggcagggggacatcgcagccctgctcatcgccgccggcgccgacgtcaacgcgcacgccaagggggccttcttcaaccccaagtaccaacacgaaggcttctacttcggtgagacgcccctggccctggcagcatgcaccaaccagcccgagattgtgcagctgctgatggagcacgagcagacggacatcacctcgcgggactcacgaggcaacaacatccttcacgccctggtgaccgtggccgaggacttcaagacgcagaatgactttgtgaagcgcatgtacgacatgatcctactgcggagtggcaactgggagctggagaccactcgcaacaacgatggcctcacgccgctgcagctggccgccaagatgggcaaggcggagatcctgaagtacatcctcagtcgtgagatcaaggagaagcggctccggagcctgtccaggaagttcaccgactgggcgtacggacccgtgtcatcctccctctacgacctcaccaacgtggacaccaccacggacaactcagtgctggaaatcactgtctacaacaccaacatcgacaaccggcatgagatgctgaccctggagccgctgcacacgctgctgcatatgaagtggaagaagtttgccaagcacatgttctttctgtccttctgcttttatttcttctacaacatcaccctgaccctcgtctcgtactaccgcccccgggaggaggaggccatcccgcaccccttggccctgacgcacaagatggggtggctgcagctcctagggaggatgtttgtgctcatctgggccatgtgcatctctgtgaaagagggcattgccatcttcctgctgagaccctcggatctgcagtccatcctctcggatgcctggttccactttgtcttttttatccaagctgtgcttgtgatactgtctgtcttcttgtacttgtttgcctacaaagagtacctcgcctgcctcgtgctggccatggccctgggctgggcgaacatgctctactatacgcggggtttccagtccatgggcatgtacagcgtcatgatccagaaggtcattttgcatgatgttctgaagttcttgtttgtatatatcgtgtttttgcttggatttggagtagccttggcctcgctgatcgagaagtgtcccaaagacaacaaggactgcagctcctacggcagcttcagcgacgcagtgctggaactcttcaagctcaccataggcctgggtgacctgaacatccagcagaactccaagtatcccattctctttctgttcctgctcatcacctatgtcatcctcacctttgttctcctcctcaacatgctcattgctctgatgggcgagactgtggagaacgtctccaaggagagcgaacgcatctggcgcctgcagagagccaggaccatcttggagtttgagaaaatgttaccagaatggctgaggagcagattccggatgggagagctgtgcaaagtggccgaggatgatttccgactgtgtttgcggatcaatgaggtgaagtggactgaatggaagacgcacgtctccttccttaacgaagacccggggcctgtaagacgaacagcagatttcaacaaaatccaagattcttccaggaacaacagcaaaaccactctcaatgcatttgaagaagtcgaggaattcccggaaacctcggtgtagaagcggaacccagagctggtgtgcgcgtgcgctgtctggcgctgcaggcggagtcaccgactctgtgcagagaggctttgagggatggtggagtcc

SEQ ID NO: 22403 - DNA, 2744 bp, Homo sapiens
  misc_feature 1..2744: note = ENST00000573539
  source 1..2744: mol_type = unassigned DNA; mol_type = unassigned DNA
gcctcagccacagtcccacccgggggccttgggccccagacatgcggtgatctcagggcaagggttgccacgaccacccagaacctcaccagccatgaaagcccaccccaaggagatggtgcctctcatgggcaagagagttgctgcccccagtgggaaccctgccatcctgccagagaagaggccggcggagatcacccccacaaagaagagtagacacagggttttgccgcattggcctcaaactcctgacctcaactgatctgcccactttgacctcccagagggctgggattacaggcatgagccaccacacctggcctagcccagctttgaatctggactttgctacctatctgctgcgtgaccttggtgcacacttcttcctggagatagaagggtttgaacccaaccccacagttgccaagacctctcctcctgtcttctccaagcccatggattccaacatccggcagtgcatctctggtaactgtgatgacatggactccccccagtctcctcaggatgatgtgacagagaccccatccaatcccaacagccccagtgcacagctggccaaggaagagcagaggaggaaaaagaggcggctgaagaagcgcatctttgcagccgtgtctgagggctgcgtggaggagttggtagagttgctggtggagctgcaggagctttgcaggcggcgccatgatgaggatgtgcctgacttcctcatgcacaagctgacggcctccgacacggggaagacctgcctgatgaaggccttgttaaacatcaaccccaacaccaaggagatagtgcggatcctgcttgcctttgctgaagagaacgacatcctgggcaggttcatcaacgccgagtacacagaggaggcctatgaaggttctcactctgttgggcaggctggagtgcagtggcgcgaccacgactcgctgcagccttgacctccctgggctcagggcagacggcgctgaacatcgccatcgagcggcggcagggggacatcgcagccctgctcatcgccgccggcgccgacgtcaacgcgcacgccaagggggccttcttcaaccccaagtaccaacacgaaggcttctacttcggtgagacgcccctggccctggcagcatgcaccaaccagcccgagattgtgcagctgctgatggagcacgagcagacggacatcacctcgcgggactcacgaggcaacaacatccttcacgccctggtgaccgtggccgaggacttcaagacgcagaatgactttgtgaagcgcatgtacgacatgatcctactgcggagtggcaactgggagctggagaccactcgcaacaacgatggcctcacgccgctgcagctggccgccaagatgggcaaggcggagatcctgaagtacatcctcagtcgtgagatcaaggagaagcggctccggagcctgtccaggaagttcaccgactgggcgtacggacccgtgtcatcctccctctacgacctcaccaacgtggacaccaccacggacaactcagtgctggaaatcactgtctacaacaccaacatcgacaaccggcatgagatgctgaccctggagccgctgcacacgctgctgcatatgaagtggaagaagtttgccaagcacatgttctttctgtccttctgcttttatttcttctacaacatcaccctgaccctcgtctcgtactaccgcccccgggaggaggaggccatcccgcaccccttggccctgacgcacaagatggggtggctgcagctcctagggaggatgtttgtgctcatctgggccatgtgcatctctgtgaaagagggcattgccatcttcctgctgagaccctcggatctgcagtccatcctctcggatgcctggttccactttgtcttagtacctcgcctgcctcgtgctggccatggccctgggctgggcgaacatgctctactatacgcggggtttccagtccatgggcatgtacagcgtcatgatccagaaggtcattttgcatgatgttctgaagttcttgtttgtatatatcgtgtttttgcttggatttggagtagccttggcctcgctgatcgagaagtgtcccaaagacaacaaggactgcagctcctacggcagcttcagcgacgcagtgctggaactcttcaagctcaccataggcctgggtgacctgaacatccagcagaactccaagtatcccattctctttctgttcctgctcatcacctatgtcatcctcacctttgttctcctcctcaacatgctcattgctctgatgggcgagactgtggagaacgtctccaaggagagcgaacgcatctggcgcctgcagagagccaggaccatcttggagtttgagaaaatgttaccagaatggctgaggagcagattccggatgggagagctgtgcaaagtggccgaggatgatttccgactgtgtttgcggatcaatgaggtgaagtggactgaatggaagacgcacgtctccttccttaacgaagacccggggcctgtaagacgaacagcagatttcaacaaaatccaagattcttccaggaacaacagcaaaaccactctcaatgcatttgaagaagtcgaggaattcccggaaacctcggtgtagaagcggaacccagagctggtgtgcgcgtgcgctgtctggcgctgcaggcggagtcaccgactctgtgcagagaggctttgagggatggtggagtcc

SEQ ID NO: 22404 - DNA, 2766 bp, Homo sapiens
  misc_feature 1..2766: note = ENST00000576742
  source 1..2766: mol_type = unassigned DNA; mol_type = unassigned DNA
ccacaacttcgatcttggcacctgcggcctcccctgccttttctccggtggggatgaggctgctgtgtgggtgtgggggtgactcacacgggccacgtgggtgggcgggtgctgcagctgtggctggtgggcgtggcctgcctggcgccgagggcaggtggctcagccagttctgcctctgacgcctcattccagccatccctctgcctgcaatgagagcttcccgccgcctcagccacagtcccacccgggggccttgggccccagacatgcggtgatctcagggcaagggttgccacgaccacccagaacctcaccagccatgaaagcccaccccaaggagatggtgcctctcatgggcaagagagttgctgcccccagtgggaaccctgccatcctgccagagaagaggccggcggagatcacccccacaaagaagagtgcacacttcttcctggagatagaagggtttgaacccaaccccacagttgccaagacctctcctcctgtcttctccaagcccatggattccaacatccggcagtgcatctctggtaactgtgatgacatggactccccccagtctcctcaggatgatgtgacagagaccccatccaatcccaacagccccagtgcacagctggccaaggaagagcagaggaggaaaaagaggcggctgaagaagcgcatctttgcagccgtgtctgagggctgcgtggaggagttggtagagttgctggtggagctgcaggagctttgcaggcggcgccatgatgaggatgtgcctgacttcctcatgcacaagctgacggcctccgacacggggaagacctgcctgatgaaggccttgttaaacatcaaccccaacaccaaggagatagtgcggatcctgcttgcctttgctgaagagaacgacatcctgggcaggttcatcaacgccgagtacacagaggaggcctatgaagggcagacggcgctgaacatcgccatcgagcggcggcagggggacatcgcagccctgctcatcgccgccggcgccgacgtcaacgcgcacgccaagggggccttcttcaaccccaagtaccaacacgaaggcttctacttcggtgagacgcccctggccctggcagcatgcaccaaccagcccgagattgtgcagctgctgatggagcacgagcagacggacatcacctcgcgggactcacgaggcaacaacatccttcacgccctggtgaccgtggccgaggacttcaagacgcagaatgactttgtgaagcgcatgtacgacatgatcctactgcggagtggcaactgggagctggagaccactcgcaacaacgatggcctcacgccgctgcagctggccgccaagatgggcaaggcggagatcctgaagtacatcctcagtcgtgagatcaaggagaagcggctccggagcctgtccaggaagttcaccgactgggcgtacggacccgtgtcatcctccctctacgacctcaccaacgtggacaccaccacggacaactcagtgctggaaatcactgtctacaacaccaacatcgacaaccggcatgagatgctgaccctggagccgctgcacacgctgctgcatatgaagtggaagaagtttgccaagcacatgttctttctgtccttctgcttttatttcttctacaacatcaccctgaccctcgtctcgtactaccgcccccgggaggaggaggccatcccgcaccccttggccctgacgcacaagatggggtggctgcagctcctagggaggatgtttgtgctcatctgggccatgtgcatctctgtgaaagagggcattgccatcttcctgctgagaccctcggatctgcagtccatcctctcggatgcctggttccactttgtcttttttatccaagctgtgcttgtgatactgtctgtcttcttgtacttgtttgcctacaaagagtacctcgcctgcctcgtgctggccatggccctgggctgggcgaacatgctctactatacgcggggtttccagtccatgggcatgtacagcgtcatgatccagaaggtcattttgcatgatgttctgaagttcttgtttgtatatatcgtgtttttgcttggatttggagtagccttggcctcgctgatcgagaagtgtcccaaagacaacaaggactgcagctcctacggcagcttcagcgacgcagtgctggaactcttcaagctcaccataggcctgggtgacctgaacatccagcagaactccaagtatcccattctctttctgttcctgctcatcacctatgtcatcctcacctttgttctcctcctcaacatgctcattgctctgatgggcgagactgtggagaacgtctccaaggagagcgaacgcatctggcgcctgcagagagccaggaccatcttggagtttgagaaaatgttaccagaatggctgaggagcagattccggatgggagagctgtgcaaagtggccgaggatgatttccgactgtgtttgcggatcaatgaggtgaagtggactgaatggaagacgcacgtctccttccttaacgaagacccggggcctgtaagacgaacagatttcaacaaaatccaagattcttccaggaacaacagcaaaaccactctcaatgcatttgaagaagtcgaggaattcccggaaacctcggtgtagaagcggaacccagagctggtgtgcgcgtgcgctgtctggcgctgcaggcggagtcaccgactctgtgcaga

SEQ ID NO: 22405 - DNA, 2937 bp, Homo sapiens
  misc_feature 1..2937: note = ENST00000572519
  source 1..2937: mol_type = unassigned DNA; mol_type = unassigned DNA
tccagccatccctctgcctgcaatgagagcttcccgccgcctcagccacagtcccacccgggggccttgggccccagacatgcggtgatctcagggcaagggttgccacgaccacccagaacctcaccagccatgaaagcccaccccaaggagatggtgcctctcatgggcaagagagttgctgcccccagtgggaaccctgccatcctgccagagaagaggccggcggagatcacccccacaaagaagagtgcacacttcttcctggagatagaagggtttgaacccaaccccacagttgccaagacctctcctcctgtcttctccaagcccatggattccaacatccggcagtgcatctctggtaactgtgatgacatggactccccccagtctcctcaggatgatgtgacagagaccccatccaatcccaacagccccagtgcacagctggccaaggaagagcagaggaggaaaaagaggcggctgaagaagcgcatctttgcagccgtgtctgagggctgcgtggaggagttggtagagttgctggtggagctgcaggagctttgcaggcggcgccatgatgaggatgtgcctgacttcctcatgcacaagctgacggcctccgacacggggaagacctgcctgatgaaggccttgttaaacatcaaccccaacaccaaggagatagtgcggatcctgcttgcctttgctgaagagaacgacatcctgggcaggttcatcaacgccgagtacacagaggaggcctatgaagggcagacggcgctgaacatcgccatcgagcggcggcagggggacatcgcagccctgctcatcgccgccggcgccgacgtcaacgcgcacgccaagggggccttcttcaaccccaagtaccaacacgaaggcttctacttcggtgagacgcccctggccctggcagcatgcaccaaccagcccgagattgtgcagctgctgatggagcacgagcagacggacatcacctcgcgggactcacgaggcaacaacatccttcacgccctggtgaccgtggccgaggacttcaagacgcagaatgactttgtgaagcgcatgtacgacatgatcctactgcggagtggcaactgggagctggagaccactcgcaacaacgatggcctcacgccgctgcagctggccgccaagatgggcaaggcggagatcctgaagtacatcctcagtcgtgagatcaaggagaagcggctccggagcctgtccaggaagttcaccgactgggcgtacggacccgtgtcatcctccctctacgacctcaccaacgtggacaccaccacggacaactcagtgctggaaatcactgtctacaacaccaacatcgacaaccggcatgagatgctgaccctggagccgctgcacacgctgctgcatatgaagtggaagaagtttgccaagcacatgttctttctgtccttctgcttttatttcttctacaacatcaccctgaccctcgtctcgtactaccgcccccgggaggaggaggccatcccgcaccccttggccctgacgcacaagatggggtggctgcagctcctagggaggatgtttgtgctcatctgggccatgtgcatctctgtgaaagagggcattgccatcttcctgctgagaccctcggatctgcagtccatcctctcggatgcctggttccactttgtcttttttatccaagctgtgcttgtgatactgtctgtcttcttgtacttgtttgcctacaaagagtacctcgcctgcctcgtgctggccatggccctgggctgggcgaacatgctctactatacgcggggtttccagtccatgggcatgtacagcgtcatgatccagaaggtcattttgcatgatgttctgaagttcttgtttgtatatatcgtgtttttgcttggatttggagtagccttggcctcgctgatcgagaagtgtcccaaagacaacaaggactgcagctcctacggcagcttcagcgacgcagtgctggaactcttcaagctcaccataggcctgggtgacctgaacatccagcagaactccaagtatcccattctctttctgttcctgctcatcacctatgtcatcctcacctttgttctcctcctcaacatgctcattgctctgatgggcgagactgtggagaacgtctccaaggagagcgaacgcatctggcgcctgcagagagccaggaccatcttggagtttgagaaaatgttaccagaatggctgaggagcagattccggatgggagagctgtgcaaagtggccgaggatgatttccgactgtgtttgcggatcaatgaggtgaagtggactgaatggaagacgcacgtctccttccttaacgaagacccggggcctgtaagacgaacaggtactgtcgctgtgaggtgacatggtgtccgctcctgtctcagaccatgtaaccttgggcagatcaagtctaagggtcctgactttccccatctgtcaaatgggagggttgaatggaaatgcttcttaggtctcttccagctctgacttttagaaccctagttggcacaacttttaaaatggcgtagccctaagccatagaaacacatcatgcaggccgggcgcggtggctcgtgcctgtaatcccagcactttgggaggacgagtcgggtgaatcacctgaggtcaggagtttgagaccagcctggccaacatggtgacaccttgtctctactaaagatacaaaaattagccgaacgtggtggcaggtgcctataatcccagctactcgagaggctgagtcaggagaattgcttgaacctgggaggtggaggttgcagtgagctgagatcacaccactgcactgcagcctgggtgacaagagggaaactccatctcaaaaaagaaaaaaaagaaaaagaaaaaaga

SEQ ID NO: 22406 - DNA, 547 bp, Homo sapiens
  misc_feature 1..547: note = ENST00000571005
  source 1..547: mol_type = unassigned DNA; mol_type = unassigned DNA
gttggccttaagcccctgttctgcagctgatggttgttcctcctcctgtcccagatcctgaagtacatcctcagtcgtgagatcaaggagaagcggctccggagcctgtccaggaagttcaccgactgggcgtacggacccgtgtcatcctccctctacgacctcaccaacgtggacaccaccacggacaactcagtgctggaaatcactgtctacaacaccaacatcgacaaccggcatgagatgctgaccctggagccgctgcacacgctgctgcatatgaagtggaagaagtttgccaagcacatgttctttctgtccttctgcttttatttcttctacaacatcaccctgaccctcgtctcgtactaccgcccccgggaggaggaggccatcccgcaccccttggccctgacgcacaagatggggtggctgcagctcctagggaggatgtttgtgctcatctgggccatgtgcatctctgtgaaagagggcattgccatcttcctgctgagaccctcggatctgcagtccatcctctcggatg

SEQ ID NO: 22407 - DNA, 675 bp, Homo sapiens
  misc_feature 1..675: note = ENST00000575865
  source 1..675: mol_type = unassigned DNA; mol_type = unassigned DNA
catcctccctctacgacctcaccaacgtggacaccaccacggacaactcagtgctggaaatcactgtctacaacaccaacatcgacaaccggcatgagatgctgaccctggagccgctgcacacgctgctgcatatgaagtggaagaagtttgccaagcacatgttctttctgtccttctgcttttatttcttctacaacatcaccctgaccctcgtctcgtactaccgcccccgggaggaggaggccatcccgcaccccttggccctgacgcacaagatggggtggctgcagctcctagggaggatgtttgtgctcatctgggccatgtgcatctctgtgaaagaggtaagtgggccacccggcccttccagaccgccccgcgaggcaggcaggtgacagcctccatccctctctgctctgccattactgctggggggttctggggaggcgtttccttcccaagccttacctttctgagttataacatgggaaaaaatggataaggctggcctatcctacctacttcatccatctacttctctatccatctgcccaactatccgccatttatctaccttcccagccactcagtgtcccttgtcctcttccacccccatccacccatccgatcacctgccctctttcatggacccagccactcattcatccattc

SEQ ID NO: 22408 - DNA, 2773 bp, Homo sapiens
  misc_feature 1..2773: note = ENST00000574773
  source 1..2773: mol_type = unassigned DNA; mol_type = unassigned DNA
ttccagccatccctctgcctgcaatgagagcttcccgccgcctcagccacagtcccacccgggggccttgggccccagacatgcggtgatctcagggcaagggttgccacgaccacccagaacctcaccagccatgaaagcccaccccaaggagatggtgcctctcatgggcaagagagttgctgcccccagtgggaaccctgccatcctgccagagaagaggccggcggagatcacccccacaaagaagaggtgggtttggagagctcgggacacggactgcggcactgtgaggggcacgagtgggggcctggcacccccccagggagcccttgccttggggagacctgagactctcagtctcgcccggggtggcccggtgcccggcgaggtatgactaggggatggtgcggtggggagcacagcacactcagggggctgagctggggtagtcagtgtgactggcacaattagggaagcctccttggagggatcgggggtgctgaggcaggagcagtcaggagggctcctgagggaggtgagggatggctggagccacccttgagacgaggagcaaaatgctggctggaagttccaggtgacccggagcctctgttgggcacgttttccacacacacacccatggctttccatccactctgcacccagccgggttattcaagctcttgaactccacctttggaatggggacaccggcaatggcaccaactataggatgatggttaattgggatcaagtcaacaaagtgctcagtgcagcgcctggcacgcggtcagcgctcagcatgtgttggcattgagagtgtttctgtgaccttcaccatcatcattgtcctcatcactccacggagcccctgggaactgggcagggctgggatgatcagctttacttcttcgctggggacgtggaggagacctggagcagagaaaggacctctctagggtcacccatcccgcccctccgctgcctccattatagattctgcacccccagctcattgggtgcctctcacgctgtcccccagcccacttcacctgtgcgtcccttgaacccggggtggccctgcctcctctgcctgtatcccaggccccctttgggccagggctgagcttggtgcttcccctctgttagttggagctataatcattgaggtgtcctgtgtaccagccccagggttgggctcaggataaggagtttgggacatggagagaaaaatgcccacgtctgctcacagtctggtgaaaggggagtcgaggagagagtgggaagtgaccacagagaggtgaactagccccgtggggcctgaagagtggcaggttattctgatcctgtaggcagtctcaggggacttcctggaggaggtggtgctagagaggatgtggagaggaaggaaaaagtgcatctgggcagagggacatgagagccatggctcagagtggggccactgaggtgaggagtctggtgtagctgaagtaccggccagtagaggagtctttggggaggcgagtcccactggagctgagtcctgggggtcagtcaaggaacttggataatcctcagggcagtggggagccatggagggattttttgtgggagggagggcatggtgagatgtgccttctggagaggtgactctgggggatctgcgtggatgacggattagaggagaggctgacagcagggagaccatgaggaggcctttgggaagcccaggtgataggtggtgatgtctgagcctgggtggtcacggataaagaggagggggcagcacagacaggtgccagtatcatggggtctgcaggaccagccacgggaggtaaaggagaaggaggagtcccggtgggagggcctggagggatggcggggccatctgacatggcgcatcagaggagaagatccaggtcaggaggaatgagccaaattcagttgtgaaatgttgggtgggaggtgcctgagagacacccaggtggaggctccatcttggaaggcaaaagggaaaactggtggagaaggagccagacaggtgtcgtgtggggtcatgggggcagcctgggtctgggtgggcttgtccaggaaagggcagagacatccctgagctaagctggcaaggaccacctccctggctctcctgccccttcccatccgctctcacttgtccaggggaggtttggacctccggaaaaaaatgaggatagagttttgggaaaatcccacgtcctttcctcagcaggaaccgtcaggctgccttctctgagcccatcccccccattcacagatttagctccaggctcagctctgcaaagcctcctccgcccagccaagggctgagcttggcatgtctcctaaattgctgtccacttctctgccccaaaggccctctgaggaccctcatgtgaaggtttgggcacccccctcagagctgagtcggggacttgggcccagagagaaacagaaaagaataaattaaaaggccgggcgcggtggctcacgcctgtaatcccagcactttgggaggccgaggcgggtggatcatttgaggtcaggagtttgagaccagcctggccaacgtggtgaaatcctgtctctactaaaaatacaaaaattagccgggtgtggtggcgtgtgcctatagtcccagttacttgggaggctgaggcaggagaattgcttgaacccaggaggtggaggttgcagtgagccaagattgtgccactgcactccagcctgggcgacagagcaaaactcttgtctc

SEQ ID NO: 22409 - DNA, 5742 bp, Homo sapiens
  misc_feature 1..5742: note = ENST00000616411
  source 1..5742: mol_type = unassigned DNA; mol_type = unassigned DNA
atgagccaccacacctggcctagcccagctttgaatctggactttgctacctatctgctgcgtgaccttggtgcacacttcttcctggagatagaagggtttgaacccaaccccacagttgccaagacctctcctcctgtcttctccaagcccatggattccaacatccggcagtgcatctctggtaactgtgatgacatggactccccccagtctcctcaggatgatgtgacagagaccccatccaatcccaacagccccagtgcacagctggccaaggaagagcagaggaggaaaaagaggcggctgaagaagcgcatctttgcagccgtgtctgagggctgcgtggaggagttggtagagttgctggtggagctgcaggagctttgcaggcggcgccatgatgaggatgtgcctgacttcctcatgcacaagctgacggcctccgacacggggaagacctgcctgatgaaggccttgttaaacatcaaccccaacaccaaggagatagtgcggatcctgcttgcctttgctgaagagaacgacatcctgggcaggttcatcaacgccgagtacacagaggaggcctatgaagggcagacggcgctgaacatcgccatcgagcggcggcagggggacatcgcagccctgctcatcgccgccggcgccgacgtcaacgcgcacgccaagggggccttcttcaaccccaagtaccaacacgaaggcttctacttcggtgagacgcccctggccctggcagcatgcaccaaccagcccgagattgtgcagctgctgatggagcacgagcagacggacatcacctcgcgggactcacgaggcaacaacatccttcacgccctggtgaccgtggccgaggacttcaagacgcagaatgactttgtgaagcgcatgtacgacatgatcctactgcggagtggcaactgggagctggagaccactcgcaacaacgatggcctcacgccgctgcagctggccgccaagatgggcaaggcggagatcctgaagtacatcctcagtcgtgagatcaaggagaagcggctccggagcctgtccaggaagttcaccgactgggcgtacggacccgtgtcatcctccctctacgacctcaccaacgtggacaccaccacggacaactcagtgctggaaatcactgtctacaacaccaacatcgacaaccggcatgagatgctgaccctggagccgctgcacacgctgctgcatatgaagtggaagaagtttgccaagcacatgttctttctgtccttctgcttttatttcttctacaacatcaccctgaccctcgtctcgtactaccgcccccgggaggaggaggccatcccgcaccccttggccctgacgcacaagatggggtggctgcagctcctagggaggatgtttgtgctcatctgggccatgtgcatctctgtgaaagagggcattgccatcttcctgctgagaccctcggatctgcagtccatcctctcggatgcctggttccactttgtcttttttatccaagctgtgcttgtgatactgtctgtcttcttgtacttgtttgcctacaaagagtacctcgcctgcctcgtgctggccatggccctgggctgggcgaacatgctctactatacgcggggtttccagtccatgggcatgtacagcgtcatgatccagaaggtcattttgcatgatgttctgaagttcttgtttgtatatatcgtgtttttgcttggatttggagtagccttggcctcgctgatcgagaagtgtcccaaagacaacaaggactgcagctcctacggcagcttcagcgacgcagtgctggaactcttcaagctcaccataggcctgggtgacctgaacatccagcagaactccaagtatcccattctctttctgttcctgctcatcacctatgtcatcctcacctttgttctcctcctcaacatgctcattgctctgatgggcgagactgtggagaacgtctccaaggagagcgaacgcatctggcgcctgcagagagccaggaccatcttggagtttgagaaaatgttaccagaatggctgaggagcagattccggatgggagagctgtgcaaagtggccgaggatgatttccgactgtgtttgcggatcaatgaggtgaagtggactgaatggaagacgcacgtctccttccttaacgaagacccggggcctgtaagacgaacagcagatttcaacaaaatccaagattcttccaggaacaacagcaaaaccactctcaatgcatttgaagaagtcgaggaattcccggaaacctcggtgtagaagcggaacccagagctggtgtgcgcgtgcgctgtctggcgctgcaggcggagtcaccgactctgtgcagagaggctttgagggatggtggagtccggctctgctggcctagaagcagagtgcaccctcgtgctcagtgctcagtgggtgtctgaactgaggggcagttgtcaatttgtctgagtgggaaacatcctggattttgttacttggcaaacagctggtgtaaacctacagccagcagcagtctggagcctgggagcctcctgaagtcccgggtgaagcctctggttttaccaattgcaggtcggcttggctgggagagatggatggcgggaaaggggcagcagtcttgaggagcagggagaggagtctttcctcctgccagcttcccccgtcagccccaaccccagcccacacattgtaccatctcttctgctgtgactgggttgcctgaatttgtgggagacccgtgatcccatcccagagtgtgcgggggacggaggtaagctggatatcctgggggaggaggggaatgcgctctggaaacacccttccggaacccttcggggaaaaggagaccatccttggagtgaacgtcccctgacaccccaaggttcaaactgtctcaagctgagagatgtttttagtagcagaattaacacagggttttaacttgcaatacggaaaagacatttcagttgagaatgaaaattactacaatgaagtttgtgattttaaaagtggagacagactgggggctttggggctggatgtaagtattatatatttggcctcagggtgcccagagcaagacaaaaagcttttcttcacacacacaaaagtctgcatgagacactccgggcaagtcctgctgggccgccgcgatctgggtgaaaggtcctggctcttttcctcgtcctgacctcacagtagcgcgtgcctgtgtgctgggatcgtggctttcgctgaagcagaaatagcagctgctcgatcgatatcatcttggaactcagcagttagtcgcatacctcagtatgtctcagtgggggaatttaacaaaatgcctcaactgctttggtacgaagtattttttttttaattttaactgtgaattttgaagctgaaggggaagcttgtgagagaaaagcatttgccaagactttgagcttatttttaggtcctcgtcctctgatgttctctttctgaaatgacacggagtcagtctggggggcagaggtgaagtggagacggaaggattttccaggtgactggggccgaaaccaccagaaaatccactctgccgccgttatctggtgaaaggattcatgtaaaaatgttcgaggtggaattataaaaatagtaaccataaatgttaatcttaaatggcagaaatagaaatttggccttcagataacatggcgatagataagttcatctggcttgaggcaaactgaagagtcggggcctagcagtgcactctgggccagtttctctgccctgggccactctgtgtgccagactagctggacagatagagactttgtgcccctgatggggccgattggggagaggtgggctggggtgtgtgaggcttcacaatccacagcagcccctgccctcccagctgacccagggagtaatcgcgtgctctaagccacagtggtcggggctgggcatgggcctctggagaagagaagatttgaggagaactgtcctagaggcaggaggagcagatgtgtttcagaatgggcagaattaggaaattgagaaagattttggctcaacagaatccagcaactgctccagatgttggagatgtttaagcagaagctggttgcgcacttaatgaggaatgttgttgaaaatggtcattggaagaagtttaaggtcccttttagcctggagattgtacaaatcagcattccacatctggagttagctacccgcattaagcctgaacagacatcttggtctgaaaggaagtggtttggattcatgatgccaagctccacactatggagctgggaattccagaattgctttgactcagatattaatggagaaagtcatatccattaatggataaagccgtatctgttatggataaagccgtatccagagttgctttgactcggatgttaatggataaagccaattattgatttctatttgcctaacctgccagcttttgtccaagtggggaatggagagccatagggatgtttgtcatctcacatgttttggtgatctgctgtctgtgggtctggatggaatttgttggcaagaccattttctgtattggatattcttcccaacagtgtccaccccaaaaggctttcagccaaaacgtctgagcctaggtaggtttaccaagggaagccataagtcaagaagcatcagagtgaaaaggagcacttccttcattttacgcccagaggctaatgctccgagaggaatgtgtacttgggcaaagtcatgcaggaaggtcatatcagagctgtggaggctggagtgtcctgattcttggaccacagatgtctccctgagccattatttatttatttttaaaaagcacagttattccatcattttgagtctttgtatttcgcttatattggggggcaggactattttctcaggtgtctcatttggcagtcaacattgtcccctatgttccctatgactagttgaaaattcaagtgtgcccacaggggtgcacaaaaccacacccatgcacacacacaccctcagcccccacacacaccccgttgaacccgtgggtctatcaggacatcctaaaactccgtgattgacatttcagtaatttcaggggaaggtgttttccagggatggggtctcccaggttcagatagtgcctttggctgcaaatgctcctttagctaaacttttcctcaggaagaattcattattctagacattatgtgatatatctgttaggaataaaaggtgcttaaccttcctccctgggatgtgggagaaggtgctggaggttgtactgtgaagtcttcaggctcttagaaggctccagcctgagagagccctttattattgacattcctgtccttcctcaaggcctggtgacctgtgacctttcgctctgggcagggcccaggtagatgggccgtcatccgggcctgtaagccgtacttgatttctgcattgatttacatattttttactgtgatcttggttccaaacacagaatcgtcaccccattctcccttgaatgtgccggatccttgtaaattctcatttacctacttgttcttagtgtgtatgtgtgtgcgaaactctatgttcaagaaagaaatcatacaaagagtaagaacatgtttgtgccattgaagaaatggttttttgatttctaataaatatttgttttgcctcgtt

SEQ ID NO: 22410 - DNA, 2928 bp, Homo sapiens
  misc_feature 1..2928: note = ENST00000359396
  source 1..2928: mol_type = unassigned DNA; mol_type = unassigned DNA
agacaggccagccctgcagagtcctggctggctctgccaagtgtaacaaactcacagccctctccaaactggctggggctgctgggagactcccaaggaactcgtcaggaaggcaggagacaggagacgggacctctacagggagacggtgggccggcccttgggggggctgatgtggccccaaggctgagtcccgtcagggtctggcctcggcctcaggcccccaaggagccggccctacaccccatgggtttgtcactgcccaaggagaaagggctaattctctgcctatggagcaagttctgcagatggttccagagacgggagtcctgggcccagagccgagatgagcagaacctgctgcagcagaagaggatctgggagtctcctctccttctagctgccaaagataatgatgtccaggccctgaacaagttgctcaagtatgaggattgcaaggtgcaccagagaggagccatgggggaaacagcgctacacatagcagccctctatgacaacctggaggccgccatggtgctgatggaggctgccccggagctggtctttgagcccatgacatctgagctctatgagggtcagactgcactgcacatcgctgttgtgaaccagaacatgaacctggtgcgagccctgcttgcccgcagggccagtgtctctgccagagccacaggcactgccttccgccgtagtccctgcaacctcatctactttggggagcaccctttgtcctttgctgcctgtgtgaacagtgaggagatcgtgcggctgctcattgagcatggagctgacatccgggcccaggactccctgggaaacacagtgttacacatcctcatcctccagcccaacaaaacctttgcctgccagatgtacaacctgttgctgtcctacgacagacatggggaccacctgcagcccctggacctcgtgcccaatcaccagggtctcacccctttcaagctggctggagtggagggtaacactgtgatgtttcagcacctgatgcagaagcggaagcacacccagtggacgtatggaccactgacctcgactctctatgacctcacagagatcgactcctcaggggatgagcagtccctgctggaacttatcatcaccaccaagaagcgggaggctcgccagatcctggaccagacgccggtgaaggagctggtgagcctcaagtggaagcggtacgggcggccgtacttctgcatgctgggtgccatatatctgctgtacatcatctgcttcaccatgtgctgcatctaccgccccctcaagcccaggaccaataaccgcacgagcccccgggacaacaccctcttacagcagaagctacttcaggaagcctacatgacccctaaggacgatatccggctggtcggggagctggtgactgtcattggggctatcatcatcctgctggtagaggttccagacatcttcagaatgggggtcactcgcttctttggacagaccatccttgggggcccattccatgtcctcatcatcacctatgccttcatggtgctggtgaccatggtgatgcggctcatcagtgccagcggggaggtggtacccatgtcctttgcactcgtgctgggctggtgcaacgtcatgtacttcgcccgaggattccagatgctaggccccttcaccatcatgattcagaagatgatttttggcgacctgatgcgattctgctggctgatggctgtggtcatcctgggctttgcttcagccttctatatcatcttccagacagaggaccccgaggagctaggccacttctacgactaccccatggccctgttcagcaccttcgagctgttccttaccatcatcgatggcccagccaactacaacgtggacctgcccttcatgtacagcatcacctatgctgcctttgccatcatcgccacactgctcatgctcaacctcctcattgccatgatgggcgacactcactggcgagtggcccatgagcgggatgagctgtggagggcccagattgtggccaccacagtgatgctggagcggaagctgcctcgctgcctgtggcctcgctccgggatctgcggacgggagtatggcctgggagaccgctggttcctgcgggtggaagacaggcaagatctcaaccggcagcggatccaacgctacgcacaggccttccacacccggggctctgaggatttggacaaagactcagtggaaaaactagagctgggctgtcccttcagcccccacctgtcccttcctatgccctcagtgtctcgaagtacctcccgcagcagtgccaattgggaaaggcttcggcaagggaccctgaggagagacctgcgtgggataatcaacaggggtctggaggacggggagagctgggaatatcagatctgactgcgtgttctcacttcgcttcctggaacttgctctcattttcctgggtgcatcaaacaaaacaaaaaccaaacacccagaggtctcatctcccaggccccaggggagaaagaggagtagcatgaacgccaaggaatgtacgttgagaatcactgctccaggcctgcattactccttcagctctggggcagaggaagcccagcccaagcacggggctggcagggcgtgaggaactctcctgtggcctgctcatcacccttccgacaggagcactgcatgtcagagcactttaaaaacaggccagcctgcttgggcgctcggtctccaccccagggtcataagtggggagagagcccttcccagggcacccaggcaggtgcagggaagtgcagagcttgtggaaagcgtgtgagtgagggagacaggaacggctctgggggtgggaagtggggctaggtcttgccaactccatcttcaataaagtcgttttcggatccctgccca

SEQ ID NO: 22411 - DNA, 2406 bp, Homo sapiens
  misc_feature 1..2406: note = ENST00000485138
  source 1..2406: mol_type = unassigned DNA; mol_type = unassigned DNA
ctttgcctgccagatgtacaacctgttgctgtcctacgacagacatggggaccacctgcagcccctggacctcgtgcccaatcaccagggtctcacccctttcaagctggctggagtggagggtaacactgtgatgtttcagcacctgatgcagaagcggaagcacacccagtggacgtatggaccactgacctcgactctctatgacctcacagagatcgactcctcaggggatgagcagtccctgctggaacttatcatcaccaccaagaagcgggaggctcgccagatcctggaccagacgccggtgaaggagctggtgagcctcaagtggaagcggtacgggcggccgtacttctgcatgctgggtgccatatatctgctgtacatcatctgcttcaccatgtgctgcatctaccgccccctcaagcccaggaccaataaccgcacgagcccccgggacaacaccctcttacagcagaagctacttcaggaagcctacatgacccctaaggacgatatccggctggtcggggagctggtgactgtcattggggctatcatcatcctgctggtagaggttccagacatcttcagaatgggggtcactcgcttctttggacagaccatccttgggggcccattccatgtcctcatcatcacctatgccttcatggtgctggtgaccatggtgatgcggctcatcagtgccagcggggaggtggtacccatgtcctttgcactcgtgctgggctggtgcaacgtcatgtacttcgcccgaggattccagatgctaggccccttcaccatcatgattcagaagatgatttttggcgacctgatgcgattctgctggctgatggctgtggtcatcctgggctttgcttcaggtaatcatctgtccaggaccaggggccatggcagggaagagatgaggaagtctagggggcactggctctggctaaacttggggaggaggagtaatgcagagatcagaggagacctatggtatcagaggatgggacgtcctccagaggtgagaaaaatcgggagtgttagggagaggtggctcttaggatcaagatgaggctcatacaaaactagggaccgtaaaaacccaaagtttggagcactgcagagctggtgatattgagatgaagggaccaggatggacatgcacgcagagcccggggtgggctggtcgtctgcatggttgccatggtaaccctcacccccttgggtggagcagccttctatatcatcttccagacagaggaccccgaggagctaggccacttctacgactaccccatggccctgttcagcaccttcgagctgttccttaccatcatcgatggcccagccaactacaacgtggacctgcccttcatgtacagcatcacctatgctgcctttgccatcatcgccacactgctcatgctcaacctcctcattgccatgatgggcgacactcactggcgagtggcccatgagcgggatgagctgtggagggcccagattgtggccaccacagtgatgctggagcggaagctgcctcgctgcctgtggcctcgctccgggatctgcggacgggagtatggcctgggagaccgctggttcctgcgggtggaagacaggcaagatctcaaccggcagcggatccaacgctacgcacaggccttccacacccggggctctgaggatttggacaaagactcagtggaaaaactagagctgggctgtcccttcagcccccacctgtcccttcctatgccctcagtgtctcgaagtacctcccgcagcagtgccaattgggaaaggcttcggcaagggaccctgaggagagacctgcgtgggataatcaacaggggtctggaggacggggagagctgggaatatcagatctgactgcgtgttctcacttcgcttcctggaacttgctctcattttcctgggtgcatcaaacaaaacaaaaaccaaacacccagaggtctcatctcccaggccccaggggagaaagaggagtagcatgaacgccaaggaatgtacgttgagaatcactgctccaggcctgcattactccttcagctctggggcagaggaagcccagcccaagcacggggctggcagggcgtgaggaactctcctgtggcctgctcatcacccttccgacaggagcactgcatgtcagagcactttaaaaacaggccagcctgcttgggcgctcggtctccaccccagggtcataagtggggagagagcccttcccagggcacccaggcaggtgcagggaagtgcagagcttgtggaaagcgtgtgagtgagggagacaggaacggctctgggggtgggaagtggggctaggtcttgccaactccatcttcaataaagtcgttttcggatccc

SEQ ID NO: 22412 - DNA, 10433 bp, Homo sapiens
  misc_feature 1..10433: note = ENST00000615386
  source 1..10433: mol_type = unassigned DNA; mol_type = unassigned DNA
ggtaaggcccccttggtctgctcccttccccacctccccaggcctgcacctctacccctcacccctccctcacctcccgtctttgtttggcacctttggctggacagatggtgctcccaggcccggactggctccttgggagcattctgtcttaagagcctcagcctgtagggctggtgaaagaggatggggttgagatgggcacaggtgttcactatcttaagatctaattcgattctgcaagcctcttgtgagtacttctctaagggccaggcgtcttgctggggcttgtaaggatagagcatcacagcccctccacccaagaggggacggcaggtgaggacaatgccttctgtatctccactgcttgcctctagaacagtctctctggcaggaacacatagtatacatatgttcgcatggaggaatgagtgaacgattgaatgaatgaagcagagagaaccgcggacaccaggaaccagaaaataagacaaaatgtgaaaaaagtgaccattcctatgtatctgtctcatcagacactgaccaaggccttactatttgcccagcactggggggatatgaagacctacaacgctcaaacccaaccttgaggtgtatttctctctcagtgcgggtggggactgaggggaagcgggtcaaaataacagatgttccgaggacctgtgctcttccgcattcaggtggtggaaatcgagactctagcgtttaagccctaaggacattcactggtggcttccagcccctgaaaacttcctaaacccgtgtcctgctttcttcaccatgacagcttggagtacagagcaggagaggagcagggaatcggaactcagggctatccctgcatgtggtctcttcttcaaggtctctaatagagttctctacccagttggtggcatgctagaaggaagtcctgcctgttggggctttccctgggtcacgaaggaggcagatgtctggtcatagaggaaagcctgaagtctttgtgccttagggtttttctctgaccccaagagtaggagcctgctttagcctgaccggggaggctgcctggaggcccctgtgttttcttttgctgaaggattctgggttggggatggtctctttctgtgaattatggcttcccatctctccagccgcccacctctcccccaaggcctgggagagtggggactggagcacatgtttggctgatgacatcttggggcaacagaatggcattgttgttagagagtaggtcgtcctcactggcttcactcatcctcttcccactcttaggaccccagggccaggggatccaggcacagagtgcaaaaaggcctgggggattggaaggggtggtggagattccctgtgtgcgatatcaggggagagcagaggggaggccctgcgctgagtggctgagaataggctgcttccgcatgtcctgtctgccctcacttttcctcagatcatatgggggctgcctctgcagactttggctagaaaggcttgatgtcacccttgggagggatcccccctccctgccctgatctccttactggcctccgcactttcttggccttcttcttgctggatatcaggtgtccagagcaatgactcttctttgggtgggcacttcccagaaggatgctgaaattgcctgcaaggggagtttcctaatctgtgccgtcaaccaaagagaaggcatgggggcattgagataaacatgggatgactaagtaaataggaacaatatggacaagtgaggggtgagctaatggaagaaaggagcacacaatgattgagaacccagtgctgtactaggtactaccacctgccttatctccgtcatcccggtaacaataatggaaggtgggtcctgttatccccctatgaatggggcaggcccagaaccctagagcaagtaaatggtgaagttgaatttgttccaaaggggactcacagggagaactgtggggtgggattgcgtgggattccatgcggtacaggatggtctagtgagaaaggaaggctttgagtctctccaggatgatcgggaacccaaactcctctttttacagtggacgtttcttggtgcttagcacgcagcccgctctgcttaaatctacattgctgggatccaagtcgagctctcaactttctcccgtgtcctccaggtcatctcccccttgggcttgggttttctcacttcctgatatttaatgcattacacatttattgaacataaggcactccacctttctgcagaaaatgaatatgacactgttcctgctctcagggagttctcattcctatgaccaaagtttactgaaggcacatacggggctaaagatgggcttagtagacatcactagaagggtgtaaatgagtgttctggaagcatagagggggaagtgtgagatctgatttcggctgctgtggggtgtcctgggcagcttcatagaggctgcttaacctgaaccccactccagcccatgtgctggcactttgtcatctaaggagcaatttggagggaaggtgatgcttgttggagctttttttagggttaaatacctgtatgaaatgtgtgaattgagtgtctgaaaagtcatccctgggtttctctggtatattgtgcacgcttgccttggtaaatacttacacacatgcctacttgtaaatgcgcaaatagacatgtgcacaaaaggagctgtggcacttaggatggcagccgattccaaatctctaaacaaccactttggctttctcatccccattgccaggaacatgagctggagggaggtggcccacaagtgcccaatgtatgcctccgccccacacattaccgctctttccttcatctgtggtcactgctcaggcttgccccccaacctccaagaaaaatcaggaggagccataaaactagaagaaccacataatttagtggtcagagcctggggctggattcttggccaagcatcctgcctttaactccgtgtgatcttctggcaatgatttggttatgccgcttcagtttccttttctgaagcatgggagaactattcagctggtgttagaaggttgtaaagagcaaaagtgataatgagtgagatgctgcgggaatgagaggggccatgaacttcccctgcacagcactgtatccacccaggaatgcaagaagccacgcactccgagcaaccctgttatgtaccagccccagccctgcccagagggtacactcactggtgggaaaggtatttgtggagagaccagtgggacccatgcctgtcttctctaactcctcttccagccctgattaaaactgagaatcgtgaccaagaaatgaccagtggggcatgcgtcgtggctctgtctctgacttgcttcctccatctgtttcatgagcagatttgactcagtttctgaggggctttctagctctaaaaatcttatttgaacttttctcaagagtcttgtgatcctgccttgtttctcagcacctaaaaaccaaattggacccatgcacacagtgcacacatctacaaggatggaggagcagatgagggtgtggggcggaggagacggagagaggaagtcaggaatccttccctggtggcccagaggcagccctgagaaggaggtcattgatctgtttgctcaagaaataatgtgctagattttgtgccaggaaccccttagttgggttttcaccaggctaatgttgaactagaccgttcaattttattataattaattgcctagtaaaagaaaacattctagaacctgaaaatacctttcatattgttacagtttcagatttgctctataatctcttttgactacttcatcagtgggagcttaaaaggcttcatctgacttttttttgtttctcccttagttgagtatttagtgatccataagaaaacatttttatgtataggatatttctgattccttttcgagtgaagaatcctcattctaaaacggattatgaatcattgtacctctgaatcaggggttctccaccttggactattgacattttggacaggataattctttgcagtgagggctgtcatgtgcagggtgcttagccgtgtccctgcctttgacccccgtgttgtgatctaaactcctgtgataagttgctattgaaaaatctatttgtcccccaagcacaggaatctttgagtaggtcagctctgtgcacctccttcagggacccaaggagagtcaggtgttttggggtcagccttactcccaagcaggtgagctagggctttctgtgctgtccccttgtgggcatatgaggttattgcaagtaatggctgggccggataccttcaaaacccgtccacaggctgggcccccctttttgctggagtctggagttcacagtcggaggaggctagttctctacaaaccttgctgggttgggtcataagctggctcttcacgcagggtgtggtctggctaggttgccagataaaatgcaggacactcagttcaatttaaatttgagataacgaataggctgctagtataagtgtatccccaatattgcacgtgacatacttatactaaaaaaaaattgtgcatctgacattcaaatctaactgagcatcctgtatttttatttggtaactctagcaactctgggtctgacagtagctttttgttttccccaggccactagagtgtcagaattcatagggaatggaggtttatgggggacactttcagcttcagagacgtgtagggaccaaaggggaatctttgagcctgccactgactataccaccactaacatctaggatacagcgagtagaactctggacttggaaaaggtgctctctcggacccatttctagatttgccatcaatctttcacacatttggtcaaaatgggacacaaacgtggaagcatattggaggagggcagggaagagttagtggctggtctcttccctcgagtacccttagcatagaggaagggacacagatacatagcaattacagcacccagtgaaagatgctgaaataaaagtaaggccacaggagagagtgaagaacttctgagtgtctgtgtgtgtgtatgtggtgctagcgattgttttcccctcagtctagggtatctagagaggagggctttgtgcaaatggttgatgtggtggtggtgatggagggaatgtggaaaacttgttttgaagctgtgtttgcataccaagtgtactatttttcacttatatgcttgctgaaagttggcttagcgggcagctgatgaaaataataataacagttaattcaaaccaccttttggcattgctgctgattcattcactctacagatggtgtcagtgagcatctacaccatcctaggtgtatttctaggcataggcagtgcagaagacacaatgaacaattggcgggctgggggagttggattctagaaggaaagagcttcatgggcacagacatagggagaatggtgtgctctgcagtgctgagacaggatgagaccaaaatgccaggtctaaggagtgggtgggacgtgcagagggtggaaaagtagttgcacaaagaccttaaagagcttctgtgttccttatccttagcattttgctaatctgggctagagaatgaagacttgaattaatgagggttagcaggagcaaggaggtagggactgaatgaagagagagctttccatgctgaactgacaggacctggtggcagctgctgtgcatgggggcaaggcagaggagatgagtgagctgatgtctcctctctgattgccctcccacctccagctctggagtcaatttcttgccactgccagcgctttagaatgtgagctcctgtctatgtctttttgtatgtcacataattgtcaaactatggataaatagagttatttcatttactcccatagaaagaccaaatggctccaggccaagagaaaattgaatcaaagggacccatgtgtcttagttggggtaagttctaattttaaaagagatttttagcacacagtaggtataagaataaagagatgatctggggattcagagaagataattttgcctaaaacaagcgagaagtggataataaggagagactaatctgactcagcaaaataaacggatccatgaatcccaaattgggtaaatccaggaagggtccgaagacagaatgggaacattcagatgcacatgaaattcgatgaatgaatcctctagattggattctcttttttctctgcatctgtcattgttggccatagtttgtgtcttaggggccaatagccgaaacaaagtagtatctaaagccctctagacagctggtctgaaaatgatggagaacactgtttcgcaaactttaatgtgagctgtttggaaactgagacccctgagcttgtctctgatttatcgccaccggtttttgcatgcaaggaccacttaagcaatgcttctccaactttcatatgcccaggaatcagctggaaatcttcttaaactgcagatttggattcactaggtggaagggtccgccagagcatttccatttcttataagggctcatgtgctgctgctgatccaggggtccactttaagaaggaaggctgttgagatgatgtgagaagaaagacgagaggcagaaaggaagagacagagataatgaatgaatgaatgaatgaatgaatgaatgaacacctatgaggaaggaaggcctggagccaggcttgttcttatggtccactgttcttttgtgttaagccctgaagatgctattgttgggagggaagcgccaggatcaaagggttctgctgagaaggttgagtaggcagaggatggtgcaacaggagaaatcctgctagcctgtgcatatgactccctccacaaatatgagacaggaattccttgcacccctcggtccatgcaaaacaaggcttatcctggagggcaatctcagggcacctggtgagggtcaaacaggaccactccaggggtaaactggttagcaggtaagcacatgtctacatagaactcctcccctccgtacctgaaatgcactgataatacattcacacatgatacattctggtcccaggacccggtaggggggaaggaaaccagtcacggacaatctcaaaacgcatgctaaatgggcaaaaagttgattgtatttactgactgtaaagagaaaagacatcaatggccccacctgccttgattgaagaccctgaggttcctgctgctgaggcacacacatctgtgtataataatggagtcaagccagggcctctccctccacaactaggtatgctcactgtttccagctttcctattccatcccttcataggatctgggagtctcctctccttctagctgccaaagataatgatgtccaggccctgaacaagttgctcaagtatgaggattgcaaggtgcaccagagaggtaagaagcacaaatgcagcatgatctcctaggtgagccccacacatggggcctcccaggagtgcccaggacctcgtgctgttggcctctgaatctatcgtctccaatccgctgtcccacagaagccatataacccacctctctgtaaatgccaggagccatgggggaaacagcgctacacatagcagccctctatgacaacctggaggccgccatggtgctgatggaggctgccccggagctggtctttgagcccatgacatctgagctctatgagggtgagggcccacgggtctggggtgaagagcaggagtgactggttgggtatttcaagtcagtctctgtgatggataatttgggaaagacacaggggatctgagcctcctactctttttttctcttctctgtctcccttccgtgtcagtcctgactgcccatcactagaacgcctgccccctgaaatgccaggggcctagagaagaggaagagatgggcagcagctggatcccctgggaatcctgaacacccgagagctccctgttctccatcccaggctacccctgagggaaagagactggggtgcatatgggagggaccccctgcaggatcctggggacagacccgtgactgacagctgtctctgggccaggtcagactgcactgcacatcgctgttgtgaaccagaacatgaacctggtgcgagccctgcttgcccgcagggccagtgtctctgccagagccacaggcactgccttccgccgtagtccctgcaacctcatctactttggggagcaccctttgtcctttgctgcctgtgtgaacagtgaggagatcgtgcggctgctcattgagcatggagctgacatccgggcccaggactccctgggaaacacagtgttacacatcctcatcctccagcccaacaaaacctttgcctgccagatgtacaacctgttgctgtcctacgacagacatggggaccacctgcagcccctggacctcgtgcccaatcaccagggtctcacccctttcaagctggctggagtggagggtaacactgtgatgtttcagcacctgatgcagaagcggaagcacacccagtggacgtatggaccactgacctcgactctctatgacctcacagagatcgactcctcaggggatgagcagtccctgctggaacttatcatcaccaccaagaagcgggaggctcgccagatcctggaccagacgccggtgaaggagctggtgagcctcaagtggaagcggtacgggcggccgtacttctgcatgctgggtgccatatatctgctgtacatcatctgcttcaccatgtgctgcatctaccgccccctcaagcccaggaccaataaccgcacgagcccccgggacaacaccctcttacagcagaagctacttcaggaagcctacatgacccctaaggacgatatccggctggtcggggagctggtgactgtcattggggctatcatcatcctgctggtagaggttccagacatcttcagaatgggggtcactcgcttctttggacagaccatccttgggggcccattccatgtcctcatcatcacctatgccttcatggtgctggtgaccatggtgatgcggctcatcagtgccagcggggaggtggtacccatgtcctttgcactcgtgctgggctggtgcaacgtcatgtacttcgcccgaggattccagatgctaggccccttcaccatcatgattcagaagatgatttttggcgacctgatgcgattctgctggctgatggctgtggtcatcctgggctttgcttcagccttctatatcatcttccagacagaggaccccgaggagctaggccacttctacgactaccccatggccctgttcagcaccttcgagctgttccttaccatcatcgatggcccagccaactacaacgtggacctgcccttcatgtacagcatcacctatgctgcctttgccatcatcgccacactgctcatgctcaacctcctcattgccatgatgggcgacactcactggcgagtggcccatgagcgggatgagctgtggagggcccagattgtggccaccacagtgatgctggagcggaagctgcctcgctgcctgtggcctcgctccgggatctgcggacgggagtatggcctgggagaccgctggttcctgcgggtggaagacaggcaagatctcaaccggcagcggatccaacgctacgcacaggccttccacacccggggctctgaggatttggacaaagactcagtggaaaaactagagctgggctgtcccttcagcccccacctgtcccttcctatgccctcagtgtctcgaagtacctcccgcagcagtgccaattgggaaaggcttcggcaagggaccctgaggagagacctgcgtgggataatcaacaggggtctggaggacggggagagctgggaatatcagatctgactgcgtgttctcacttcgcttcctggaacttgctctcattttcctgggtgcatcaaacaaaacaaaaaccaaacacccagaggtctcatctcccaggccccaggggagaaagaggagtagcatgaacgccaaggaatgtacgttgagaatcactgctccaggcctgcattactccttcagctctggggcagaggaagcccagcccaagcacggggctggcagggcgtgaggaactctcctgtggcctgctcatcacccttccgacaggagcactgcatgtcagagcactttaaaaacaggccagcctgcttgggcgctcggtctccaccccagggtcataagtggggagagagcccttcccagggcacccaggcaggtgcagggaagtgcagagcttgtggaaagcgtgtgagtgagggagacaggaacggctctgggggtgggaagtggggctaggtcttgccaactccatcttcaataaagtcgttttcgga

SEQ ID NO: 22413 - DNA, 1806 bp, Homo sapiens
  misc_feature 1..1806: note = ENST00000619250
  source 1..1806: mol_type = unassigned DNA; mol_type = unassigned DNA
ccctttcaagctggctggagtggagggtaacactgtggtgagagacggtccccatccctgaggtgtctttctaatgaccctcaacctatcccgctggccctgggagaaacagaggtgaacgcgatccctgatgcttagatcccattctcaactcagaaatttttcaacccctcccactgtggttacctgttccctttcttgcccactccttttcccctgaggcattgggggttacagagtctagatcccatgctaggattgtctgtaatgccccagcccaccttccctttcagcccccagagcagggccctccagcctctcgtctctcctttccaaactctggagggagtcatgggagaggatgaggaacctatgaatgtcactgtgaatgtgggttcttctgccctctaaaggctgtcatcaaaatgaaagggcagccaccttctccaggggtgccgtcctcctgcacatgcatcctatccacactctgtgaccgtcccctttgcttactgctcctgagtcatcttcactttcccttagatgtttcagcacctgatgcagaagcggaagcacacccagtggacgtatggaccactgacctcgactctctatgacctcacagagatcgactcctcaggggatgagcagtccctgctggaacttatcatcaccaccaagaagcgggaggctcgccagatcctggaccagacgccggtgaaggagctggtgagcctcaagtggaagcggtacgggcggccgtacttctgcatgctgggtgccatatatctgctgtacatcatctgcttcaccatgtgctgcatctaccgccccctcaagcccaggaccaataaccgcacgagcccccgggacaacaccctcttacagcagaagctacttcaggaagcctacatgacccctaaggacgatatccggctggtcggggagctggtgactgtcattggggctatcatcatcctgctggtagaggttccagacatcttcagaatgggggtcactcgcttctttggacagaccatccttgggggcccattccatgtcctcatgtgagtttccttcctctcactcccatcccttccctcaacagggctccagttccactccttggattcctgacctctcaagaaccttagctccagagccccctctctagtgctgtgtgtatgaccctgggcattgagtgtggggaggctgaatctgcatgtgtgggtactttcccagctacattcttgctgtcaggtccccaggatcatcccagccctcccctcatcaccctcctccctgctcccccagcatcacctatgccttcatggtgctggtgaccatggtgatgcggctcatcagtgccagcggggaggtggtacccatgtcctttgcactcgtgctgggctggtgcaacgtcatgtacttcgcccgaggattccagatgctaggccccttcaccatcatgattcagaagatgatttttggcgacctgatgcgattctgctggctgatggctgtggtcatcctgggctttgcttcaggtaatcatctgtccaggaccaggggccatggcagggaagagatgaggaagtctagggggcactggctctggctaaacttggggaggaggagtaatgcagagatcagaggagacctatggtatcagaggatgggacgtcctccagaggtgagaaaaatcgggagtgttagggagaggtggctcttaggatcaagatgaggctcatacaaaactagggaccgtaaaaacccaaagtttggagcactgcagagctggtgatattg

SEQ ID NO: 22414 - DNA, 532 bp, Homo sapiens
  misc_feature 1..532: note = ENST00000436401
  source 1..532: mol_type = unassigned DNA; mol_type = unassigned DNA
agagtcctggctggctctgccaagtgtaacaaactcacagccctctccaaactggctggggctgctgggagactcccaaggaactcgtcaggaaggcaggaccaataaccgcacgagcccccgggacaacaccctcttacagcagaagctacttcaggaagcctacatgacccctaaggacgatatccggctggtcggggagctggtgactgtcattggggctatcatcatcctgctggtagaggttccagacatcttcagaatgggggtcactcgcttctttggacagaccatccttgggggcccattccatgtcctcatcatcacctatgccttcatggtgctggtgaccatggtgatgcggctcatcagtgccagcggggaggtggtacccatgtcctttgcactcgtgctgggctggtgcaacgtcatgtacttcgcccgaggattccagatgctaggccccttcaccatcatgattcagaagatgatttttggcgacctgatgcgattctgctggctgatggctgtg

SEQ ID NO: 22415 - DNA, 540 bp, Homo sapiens
  misc_feature 1..540: note = ENST00000474388
  source 1..540: mol_type = unassigned DNA; mol_type = unassigned DNA
gtgaacagtgaggagatcgtgcggctgctcattgagcatggagctgacatccgggcccaggactccctgggaaacacagtgttacacatcctcatcctccagcccaacaaaacctttgcctgccagatgtacaacctgttgctgtcctacgacagacatggggaccacctgcagcccctggacctcgtgcccaatcaccagggtctcacccctttcaagctggctggagtggagggtaacactgtggtgagagacggtccccatccctgaggtgtctttctaatgaccctcaacctatcccgctggccctgggagaaacagaggtgaacgcgatccctgatgcttagatcccattctcaactcagaaatttttcaacccctcccactgtggttacctgttccctttcttgcccactccttttcccctgaggcattgggggttacagagtctagatcccatgctaggattgtctgtaatgccccagcccaccttccctttcagcccccagagcagggccctccagcctctcgtctctcctt

SEQ ID NO: 22416 - DNA, 673 bp, Homo sapiens
  misc_feature 1..673: note = ENST00000489123
  source 1..673: mol_type = unassigned DNA; mol_type = unassigned DNA
atgaggattgcaaggtgcaccagagaggagccatgggggaaacagcgctacacatagcagccctctatgacaacctggaggccgccatggtgctgatggaggctgccccggagctggtctttgagcccatgacatctgagctctatgagggtgagggcccacgggtctggggtgaagagcaggagtgactggttgggtatttcaagtcagtctctgtgatggataatttgggaaagacacaggggatctgagcctcctactctttttttctcttctctgtctcccttccgtgtcagtcctgactgcccatcactagaacgcctgccccctgaaatgccaggggcctagagaagaggaagagatgggcagcagctggatcccctgggaatcctgaacacccgagagctccctgttctccatcccaggctacccctgagggaaagagactggggtgcatatgggagggaccccctgcaggatcctggggacagacccgtgactgacagctgtctctgggccaggtcagactgcactgcacatcgctgttgtgaaccagaacatgaacctggtgcgagccctgcttgcccgcagggccagtgtctctgccagagccacaggcactgccttccgccgtagtccctgcaacctcatctactttggggagcaccctttg

SEQ ID NO: 22417 - DNA, 247 bp, Homo sapiens
  misc_feature 1..247: note = ENST00000431833
  source 1..247: mol_type = unassigned DNA; mol_type = unassigned DNA
aggccctgaacaagttgctcaagtatgaggattgcaaggtgcaccagagagaagccatataacccacctctctgtaaatgccaggagccatgggggaaacagcgctacacatagcagccctctatgacaacctggaggccgccatggtgctgatggaggctgccccggagctggtctttgagcccatgacatctgagctctatgagggtcagactgcactgcacatcgctgttgtgaaccagaacat

SEQ ID NO: 22418 - DNA, 2298 bp, Homo sapiens
  misc_feature 1..2298: note = ENST00000638686
  source 1..2298: mol_type = unassigned DNA; mol_type = unassigned DNA
acgggacctctacagggagacggtgggccggcccttgggggggctgatgtggccccaaggctgagtcccgtcagggtctggcctcggcctcaggcccccaaggagccggccctacaccccatgggtttgtcactgcccaaggagaaagggctaattctctgcctatggagcaagttctgcagatggttccagagacgggagtcctgggcccagagccgagatgagcagaacctgctgcagcagaagaggatctgggagtctcctctccttctagctgccaaagataatgatgtccaggccctgaacaagttgctcaagtatgaggattgcaaggtgcaccagagaggagccatgggggaaacagcgctacacatagcagccctctatgacaacctggaggccgccatggtgctgatggaggctgccccggagctggtctttgagcccatgacatctgagctctatgagggtcagactgcactgcacatcgctgttgtgaaccagaacatgaacctggtgcgagccctgcttgcccgcagggccagtgtctctgccagagccacaggcactgccttccgccgtagtccctgcaacctcatctactttggggagcaccctttgtcctttgctgcctgtgtgaacagtgaggagatcgtgcggctgctcattgagcatggagctgacatccgggcccaggactccctgggaaacacagtgttacacatcctcatcctccagcccaacaaaacctttgcctgccagatgtacaacctgttgctgtcctacgacagacatggggaccacctgcagcccctggacctcgtgcccaatcaccagggtctcacccctttcaagctggctggagtggagggtaacactgtgatgtttcagcacctgatgcagaagcggaagcacacccagtggacgtatggaccactgacctcgactctctatgacctcacagagatcgactcctcaggggatgagcagtccctgctggaacttatcatcaccaccaagaagcgggaggctcgccagatcctggaccagacgccggtgaaggagctggtgagcctcaagtggaagcggtacgggcggccgtacttctgcatgctgggtgccatatatctgctgtacatcatctgcttcaccatgtgctgcatctaccgccccctcaagcccaggaccaataaccgcacgagcccccgggacaacaccctcttacagcagaagctacttcaggaagcctacatgacccctaaggacgatatccggctggtcggggagctggtgactgtcattggggctatcatcatcctgctggtagaggttccagacatcttcagaatgggggtcactcgcttctttggacagaccatccttgggggcccattccatgtcctcatcatcacctatgccttcatggtgctggtgaccatggtgatgcggctcatcagtgccagcggggaggtggtacccatgtcctttgcactcgtgctgggctggtgcaacgtcatgtacttcgcccgaggattccagatgctaggccccttcaccatcatgattcagaagatgatttttggcgacctgatgcgattctgctggctgatggctgtggtcatcctgggctttgcttcagccttctatatcatcttccagacagaggaccccgaggagctaggccacttctacgactaccccatggccctgttcagcaccttcgagctgttccttaccatcatcgatggcccagccaactacaacgtggacctgcccttcatgtacagcatcacctatgctgcctttgccatcatcgccacactgctcatgctcaacctcctcattgccatgatgggcgacactcactggcgagtggcccatgagcgggatgagctgtggagggcccagattgtggccaccacagtgatgctggagcggaagctgcctcgctgcctgtggcctcgctccgggatctgcggacgggagtatggcctgggagaccgctggttcctgcgggtggaagacaggcaagatctcaaccggcagcggatccaacgctacgcacaggccttccacacccggggctctgaggatttggacaaagactcagtggaaaaactagagctgggctgtcccttcagcccccacctgtcccttcctatgccctcagtgtctcgaagtacctcccgcagcagtgccaattgggaaaggcttcggcaagggaccctgaggagagacctgcgtgggataatcaacaggggtctggaggacggggagagctgggaatatcagatctga

SEQ ID NO: 22419 - DNA, 2927 bp, Homo sapiens
  misc_feature 1..2927: note = ENST00000611485
  source 1..2927: mol_type = unassigned DNA; mol_type = unassigned DNA
agacaggccagctctgcagagtcctggctggctctgccaagtgtaacaaactcacagccctctccaaactggctggggctgctgggagactcccaaggaactcgtcaggaaggcaggagacaggagacgggacctctacagggagacggtgggccggcccttgggggggctgatgtggccccaaggctgagtcccgtcagggtctggcctcggcctcaggcccccaaggagccggccctacaccccatgggtttgtcactgcccaaggagaaagggctaattctctgcctatggagcaagttctgcagatggttccagagacgggagtcctgggcccagagccgagatgagcagaacctgctgcagcagaagaggatctgggagtctcctctccttctagctgccaaagataatgatgtccaggccctgaacaagttgctcaagtatgaggattgcaaggtgcaccagagaggagccatgggggaaacagcgctacacatagcagccctctatgacaacctggaggccgccatggtgctgatggaggctgccccggagctggtctttgagcccatgacatctgagctctatgagggtcagactgcactgcacatcgctgttgtgaaccagaacatgaacctggtgcgagccctgcttgcccgcagggccagtgtctctgccagagccacaggcactgccttccgccgtagtccccgcaacctcatctactttggggagcaccctttgtcctttgctgcctgtgtgaacagtgaggagatcgtgcggctgctcattgagcatggagctgacatccgggcccaggactccctgggaaacacagtgttacacatcctcatcctccagcccaacaaaacctttgcctgccagatgtacaacctgttgctgtcctacgacagacatggggaccacctgcagcccctggacctcgtgcccaatcaccagggtctcacccctttcaagctggctggagtggagggtaacactgtgatgtttcagcacctgatgcagaagcggaagcacacccagtggacgtatggaccactgacctcgactctctatgacctcacagagatcgactcctcaggggatgagcagtccctgctggaacttatcatcaccaccaagaagcgggaggctcgccagatcctggaccagacgccggtgaaggagctggtgagcctcaagtggaagcggtacgggcggccgtacttctgcatgctgggtgccatatatctgctgtacatcatctgcttcaccatgtgctgcatctaccgccccctcaagcccaggaccaataaccgcacaagcccccgggacaacaccctcttacagcagaagctacttcaggaagcctacgtgacccctaaggacgatatccggctggtcggggagctggtgactgtcattggggctatcatcatcctgctggtagaggttccagacatcttcagaatgggggtcactcgcttctttggacagaccatccttgggggcccattccatgtcctcatcatcacctatgccttcatggtgctggtgaccatggtgatgcggctcatcagtgccagcggggaggtggtacccatgtcctttgcactcgtgctgggctggtgcaacgtcatgtacttcgcccgaggattccagatgctaggccccttcaccatcatgattcagaagatgatttttggcgacctgatgcgattctgctggctgatggctgtggtcatcctgggctttgcttcagccttctatatcatcttccagacagaggaccccgaggagctaggccacttctacgactaccccatggccctgttcagcaccttcgagctgttccttaccatcatcgatggcccagccaactacaacgtggacctgcccttcatgtacagcatcacctatgctgcctttgccatcatcgccacactgctcatgctcaacctcctcattgccatgatgggcgacactcactggcgagtggcccatgagcgggatgagctgtggagggcccaggttgtggccaccacggtgatgctggagcggaagctgcctcgctgcctgtggcctcgctccgggatctgcggacgggagtatggcctgggggaccgctggttcctgcgggtggaagacaggcaagatctcaaccggcagcggatccaacgctacgcacaggccttccacacccggggctctgaggatttggacaaagactcagtggaaaaactagagctgggctgtcccttcagcccccacctgtcccttcctacgccctcagtgtctcgaagtacctcccgcagcagtgccaattgggaaaggcttcggcaagggaccctgaggagagacctgcgtgggataatcaacaggggtctggaggacggggagagctgggaatatcagatctgactgcgtgttctcacttcgcttcctggaacttgctctcattttcctgggtgcatcaaacaaaacaaaaaccaaacacccagaggtctcatctcccagccccaggggagaaagaggagtagcatgaacgccaaggaatgtacgttgagaatcactgctccaggcctgcattactccttcagctctggggcagaggaagcccagcccaagcacggggctggcagggcgtgaggaactctcctgtggcctgctcatcacccttccgacaggagcactgcatgtcagagcactttaaaaacaggccagcctgcttgggcgctcggtctccaccccagggtcataagtggggagagagcccttcccagggcacccaggcaggtgcagggaagtgcagagcttgtggaaagcgtgtgagtgagggagacaggaacggctctgggggtgggaagtggggctaggtcttgccaactccatcttcaataaagtcgttttcggatccctgccca

SEQ ID NO: 22420 - DNA, 2405 bp, Homo sapiens
  misc_feature 1..2405: note = ENST00000632381
  source 1..2405: mol_type = unassigned DNA; mol_type = unassigned DNA
ctttgcctgccagatgtacaacctgttgctgtcctacgacagacatggggaccacctgcagcccctggacctcgtgcccaatcaccagggtctcacccctttcaagctggctggagtggagggtaacactgtgatgtttcagcacctgatgcagaagcggaagcacacccagtggacgtatggaccactgacctcgactctctatgacctcacagagatcgactcctcaggggatgagcagtccctgctggaacttatcatcaccaccaagaagcgggaggctcgccagatcctggaccagacgccggtgaaggagctggtgagcctcaagtggaagcggtacgggcggccgtacttctgcatgctgggtgccatatatctgctgtacatcatctgcttcaccatgtgctgcatctaccgccccctcaagcccaggaccaataaccgcacaagcccccgggacaacaccctcttacagcagaagctacttcaggaagcctacgtgacccctaaggacgatatccggctggtcggggagctggtgactgtcattggggctatcatcatcctgctggtagaggttccagacatcttcagaatgggggtcactcgcttctttggacagaccatccttgggggcccattccatgtcctcatcatcacctatgccttcatggtgctggtgaccatggtgatgcggctcatcagtgccagcggggaggtggtacccatgtcctttgcactcgtgctgggctggtgcaacgtcatgtacttcgcccgaggattccagatgctaggccccttcaccatcatgattcagaagatgatttttggcgacctgatgcgattctgctggctgatggctgtggtcatcctgggctttgcttcaggtaatcatctgtccaggaccaggggccatggcagggaagagatgagaaagtctagggggcactggctctggctaaacttggggaggaggagtaatgcagagatcagaggagacctatggtatcagaggatgggacgtcctccagaggtgagaaaaatcgggagtgttagggagaggtggctcttaggatcaagatgaggctcatagaaaactagggaccgtaaaaacccaaagtttggagcactgcagagctggtgatattgagatgaagggaccaggatggacatgcacgcagagcccggggtgggctggtcgtctgcatggttgccatggtaaccctcacccccttgggtggagcagccttctatatcatcttccagacagaggaccccgaggagctaggccacttctacgactaccccatggccctgttcagcaccttcgagctgttccttaccatcatcgatggcccagccaactacaacgtggacctgcccttcatgtacagcatcacctatgctgcctttgccatcatcgccacactgctcatgctcaacctcctcattgccatgatgggcgacactcactggcgagtggcccatgagcgggatgagctgtggagggcccaggttgtggccaccacggtgatgctggagcggaagctgcctcgctgcctgtggcctcgctccgggatctgcggacgggagtatggcctgggggaccgctggttcctgcgggtggaagacaggcaagatctcaaccggcagcggatccaacgctacgcacaggccttccacacccggggctctgaggatttggacaaagactcagtggaaaaactagagctgggctgtcccttcagcccccacctgtcccttcctacgccctcagtgtctcgaagtacctcccgcagcagtgccaattgggaaaggcttcggcaagggaccctgaggagagacctgcgtgggataatcaacaggggtctggaggacggggagagctgggaatatcagatctgactgcgtgttctcacttcgcttcctggaacttgctctcattttcctgggtgcatcaaacaaaacaaaaaccaaacacccagaggtctcatctcccagccccaggggagaaagaggagtagcatgaacgccaaggaatgtacgttgagaatcactgctccaggcctgcattactccttcagctctggggcagaggaagcccagcccaagcacggggctggcagggcgtgaggaactctcctgtggcctgctcatcacccttccgacaggagcactgcatgtcagagcactttaaaaacaggccagcctgcttgggcgctcggtctccaccccagggtcataagtggggagagagcccttcccagggcacccaggcaggtgcagggaagtgcagagcttgtggaaagcgtgtgagtgagggagacaggaacggctctgggggtgggaagtggggctaggtcttgccaactccatcttcaataaagtcgttttcggatccc

SEQ ID NO: 22421 - DNA, 3069 bp, Homo sapiens
  misc_feature 1..3069: note = ENST00000632455
  source 1..3069: mol_type = unassigned DNA; mol_type = unassigned DNA
gatctgggagtctcctctccttctagctgccaaagataatgatgtccaggccctgaacaagttgctcaagtatgaggattgcaaggtgcaccagagaggtaagaagcacaaatgcagcatgatctcctaggtgagccccacacatggggcctcccaggagtgcccaggacctcgtgctgttggcctctgaatctatcgtctccaatccgctgtcccacagaagccatataacccacctctctgtaaatgccaggagccatgggggaaacagcgctacacatagcagccctctatgacaacctggaggccgccatggtgctgatggaggctgccccggagctggtctttgagcccatgacatctgagctctatgagggtgagggcccacgggtctggggtgaagagcaggaatgactggttgggtatttcaagtcagtctctgtgatggataatttgggaaagacacaggggatctgagcctcctactctttttttctcttctctgtctcccttccgtgtcagtcctgactgcccatcactagaacgcctgccccctgaaatgccaggggcctagagaagaggaagagatgggcagcagctggatcccctgggaatcctgaacacccgagggctccctgttctccatcccaggctacccctgagggaaagagactggggtgcatatgggagggaccccctgcaggatcctgggaacagacccgtgactgacagctgtctctgggccaggtcagactgcactgcacatcgctgttgtgaaccagaacatgaacctggtgcgagccctgcttgcccgcagggccagtgtctctgccagagccacaggcactgccttccgccgtagtccccgcaacctcatctactttggggagcaccctttgtcctttgctgcctgtgtgaacagtgaggagatcgtgcggctgctcattgagcatggagctgacatccgggcccaggactccctgggaaacacagtgttacacatcctcatcctccagcccaacaaaacctttgcctgccagatgtacaacctgttgctgtcctacgacagacatggggaccacctgcagcccctggacctcgtgcccaatcaccagggtctcacccctttcaagctggctggagtggagggtaacactgtgatgtttcagcacctgatgcagaagcggaagcacacccagtggacgtatggaccactgacctcgactctctatgacctcacagagatcgactcctcaggggatgagcagtccctgctggaacttatcatcaccaccaagaagcgggaggctcgccagatcctggaccagacgccggtgaaggagctggtgagcctcaagtggaagcggtacgggcggccgtacttctgcatgctgggtgccatatatctgctgtacatcatctgcttcaccatgtgctgcatctaccgccccctcaagcccaggaccaataaccgcacaagcccccgggacaacaccctcttacagcagaagctacttcaggaagcctacgtgacccctaaggacgatatccggctggtcggggagctggtgactgtcattggggctatcatcatcctgctggtagaggttccagacatcttcagaatgggggtcactcgcttctttggacagaccatccttgggggcccattccatgtcctcatcatcacctatgccttcatggtgctggtgaccatggtgatgcggctcatcagtgccagcggggaggtggtacccatgtcctttgcactcgtgctgggctggtgcaacgtcatgtacttcgcccgaggattccagatgctaggccccttcaccatcatgattcagaagatgatttttggcgacctgatgcgattctgctggctgatggctgtggtcatcctgggctttgcttcagccttctatatcatcttccagacagaggaccccgaggagctaggccacttctacgactaccccatggccctgttcagcaccttcgagctgttccttaccatcatcgatggcccagccaactacaacgtggacctgcccttcatgtacagcatcacctatgctgcctttgccatcatcgccacactgctcatgctcaacctcctcattgccatgatgggcgacactcactggcgagtggcccatgagcgggatgagctgtggagggcccaggttgtggccaccacggtgatgctggagcggaagctgcctcgctgcctgtggcctcgctccgggatctgcggacgggagtatggcctgggggaccgctggttcctgcgggtggaagacaggcaagatctcaaccggcagcggatccaacgctacgcacaggccttccacacccggggctctgaggatttggacaaagactcagtggaaaaactagagctgggctgtcccttcagcccccacctgtcccttcctacgccctcagtgtctcgaagtacctcccgcagcagtgccaattgggaaaggcttcggcaagggaccctgaggagagacctgcgtgggataatcaacaggggtctggaggacggggagagctgggaatatcagatctgactgcgtgttctcacttcgcttcctggaacttgctctcattttcctgggtgcatcaaacaaaacaaaaaccaaacacccagaggtctcatctcccagccccaggggagaaagaggagtagcatgaacgccaaggaatgtacgttgagaatcactgctccaggcctgcattactccttcagctctggggcagaggaagcccagcccaagcacggggctggcagggcgtgaggaactctcctgtggcctgctcatcacccttccgacaggagcactgcatgtcagagcactttaaaaacaggccagcctgcttgggcgctcggtctccaccccagggtcataagtggggagagagcccttcccagggcacccaggcaggtgcagggaagtgcagagcttgtggaaagcgtgtgagtgagggagacaggaacggctctgggggtgggaagtggggctaggtcttgccaactccatcttcaataaagtcgttttcgga

SEQ ID NO: 22422 - DNA, 2313 bp, Homo sapiens
  misc_feature 1..2313: note = ENST00000632330
  source 1..2313: mol_type = unassigned DNA; mol_type = unassigned DNA
ctcgtcaggaaggcaggagacaggagacgggacctctacagggagacggtgggccggcccttgggggggctgatgtggccccaaggctgagtcccgtcagggtctggcctcggcctcaggcccccaaggagccggccctacaccccatgggtttgtcactgcccaaggagaaagggctaattctctgcctatggagcaagttctgcagatggttccaggactccctgggaaacacagtgttacacatcctcatcctccagcccaacaaaacctttgcctgccagatgtacaacctgttgctgtcctacgacagacatggggaccacctgcagcccctggacctcgtgcccaatcaccagggtctcacccctttcaagctggctggagtggagggtaacactgtgatgtttcagcacctgatgcagaagcggaagcacacccagtggacgtatggaccactgacctcgactctctatgacctcacagagatcgactcctcaggggatgagcagtccctgctggaacttatcatcaccaccaagaagcgggaggctcgccagatcctggaccagacgccggtgaaggagctggtgagcctcaagtggaagcggtacgggcggccgtacttctgcatgctgggtgccatatatctgctgtacatcatctgcttcaccatgtgctgcatctaccgccccctcaagcccaggaccaataaccgcacaagcccccgggacaacaccctcttacagcagaagctacttcaggaagcctacgtgacccctaaggacgatatccggctggtcggggagctggtgactgtcattggggctatcatcatcctgctggtagaggttccagacatcttcagaatgggggtcactcgcttctttggacagaccatccttgggggcccattccatgtcctcatcatcacctatgccttcatggtgctggtgaccatggtgatgcggctcatcagtgccagcggggaggtggtacccatgtcctttgcactcgtgctgggctggtgcaacgtcatgtacttcgcccgaggattccagatgctaggccccttcaccatcatgattcagaagatgatttttggcgacctgatgcgattctgctggctgatggctgtggtcatcctgggctttgcttcagccttctatatcatcttccagacagaggaccccgaggagctaggccacttctacgactaccccatggccctgttcagcaccttcgagctgttccttaccatcatcgatggcccagccaactacaacgtggacctgcccttcatgtacagcatcacctatgctgcctttgccatcatcgccacactgctcatgctcaacctcctcattgccatgatgggcgacactcactggcgagtggcccatgagcgggatgagctgtggagggcccaggttgtggccaccacggtgatgctggagcggaagctgcctcgctgcctgtggcctcgctccgggatctgcggacgggagtatggcctgggggaccgctggttcctgcgggtggaagacaggcaagatctcaaccggcagcggatccaacgctacgcacaggccttccacacccggggctctgaggatttggacaaagactcagtggaaaaactagagctgggctgtcccttcagcccccacctgtcccttcctacgccctcagtgtctcgaagtacctcccgcagcagtgccaattgggaaaggcttcggcaagggaccctgaggagagacctgcgtgggataatcaacaggggtctggaggacggggagagctgggaatatcagatctgactgcgtgttctcacttcgcttcctggaacttgctctcattttcctgggtgcatcaaacaaaacaaaaaccaaacacccagaggtctcatctcccagccccaggggagaaagaggagtagcatgaacgccaaggaatgtacgttgagaatcactgctccaggcctgcattactccttcagctctggggcagaggaagcccagcccaagcacggggctggcagggcgtgaggaactctcctgtggcctgctcatcacccttccgacaggagcactgcatgtcagagcactttaaaaacaggccagcctgcttgggcgctcggtctccaccccagggtcataagtggggagagagcccttcccagggcacccaggcaggtgcagggaagtgcagagcttgtggaaagcgtgtgagtgagggagacaggaacggctctgggggtgggaagtggggctaggtcttgccaactccatcttcaataaagtcgttttcgga

SEQ ID NO: 22423 - DNA, 1806 bp, Homo sapiens
  misc_feature 1..1806: note = ENST00000632149
  source 1..1806: mol_type = unassigned DNA; mol_type = unassigned DNA
ccctttcaagctggctggagtggagggtaacactgtggtgagagacggtccccatccctgaggtgtctttctaatgaccctcaacctatcccgctggccctgggagaaacagaggtgaacgcgatccctgatgcttagatcccattctcaactcagaaatttttcaacccctcccactgtggttacctgttccctttcttgcccactccttttcccctgaggcattgggggttacagagtctagatcccatgctaggattgtctgtaatgcctcagcccaccttccctttcagcccccagagcagggccctccagcctctcgtctcccctttccaaactctggagggagtcatgggagaggatgaggaacctatgaatgtcactgtgaatgtgggttcttctgccctctaaaggctgtcatcaaaatgaaagggcagccaccttctccaggggtgctgtcctcctgcacatgcatcctatccacactctgtgaccgtcccctttgcttactgctcctgagtcatcttcactttcccttagatgtttcagcacctgatgcagaagcggaagcacacccagtggacgtatggaccactgacctcgactctctatgacctcacagagatcgactcctcaggggatgagcagtccctgctggaacttatcatcaccaccaagaagcgggaggctcgccagatcctggaccagacgccggtgaaggagctggtgagcctcaagtggaagcggtacgggcggccgtacttctgcatgctgggtgccatatatctgctgtacatcatctgcttcaccatgtgctgcatctaccgccccctcaagcccaggaccaataaccgcacaagcccccgggacaacaccctcttacagcagaagctacttcaggaagcctacgtgacccctaaggacgatatccggctggtcggggagctggtgactgtcattggggctatcatcatcctgctggtagaggttccagacatcttcagaatgggggtcactcgcttctttggacagaccatccttgggggcccattccatgtcctcatgtgagttcccttcctctcactcccatcccttccctcaacagggctccagttccactccttggattcctgacctctcaagaaccttagctccagagccccctctctagtgctgtgtgtatgaccctgggcattgagtgtggggaggctgaatctgcatgtgtgggtactttcccagctacattcttgctgtcaggtccccaggatcatcccagccctcccctcatcaccctcctccctgctcccccagcatcacctatgccttcatggtgctggtgaccatggtgatgcggctcatcagtgccagcggggaggtggtacccatgtcctttgcactcgtgctgggctggtgcaacgtcatgtacttcgcccgaggattccagatgctaggccccttcaccatcatgattcagaagatgatttttggcgacctgatgcgattctgctggctgatggctgtggtcatcctgggctttgcttcaggtaatcatctgtccaggaccaggggccatggcagggaagagatgagaaagtctagggggcactggctctggctaaacttggggaggaggagtaatgcagagatcagaggagacctatggtatcagaggatgggacgtcctccagaggtgagaaaaatcgggagtgttagggagaggtggctcttaggatcaagatgaggctcatagaaaactagggaccgtaaaaacccaaagtttggagcactgcagagctggtgatattg

SEQ ID NO: 22424 - DNA, 532 bp, Homo sapiens
  misc_feature 1..532: note = ENST00000633318
  source 1..532: mol_type = unassigned DNA; mol_type = unassigned DNA
agagtcctggctggctctgccaagtgtaacaaactcacagccctctccaaactggctggggctgctgggagactcccaaggaactcgtcaggaaggcaggaccaataaccgcacaagcccccgggacaacaccctcttacagcagaagctacttcaggaagcctacgtgacccctaaggacgatatccggctggtcggggagctggtgactgtcattggggctatcatcatcctgctggtagaggttccagacatcttcagaatgggggtcactcgcttctttggacagaccatccttgggggcccattccatgtcctcatcatcacctatgccttcatggtgctggtgaccatggtgatgcggctcatcagtgccagcggggaggtggtacccatgtcctttgcactcgtgctgggctggtgcaacgtcatgtacttcgcccgaggattccagatgctaggccccttcaccatcatgattcagaagatgatttttggcgacctgatgcgattctgctggctgatggctgtg

SEQ ID NO: 22425 - DNA, 540 bp, Homo sapiens
  misc_feature 1..540: note = ENST00000631384
  source 1..540: mol_type = unassigned DNA; mol_type = unassigned DNA
gtgaacagtgaggagatcgtgcggctgctcattgagcatggagctgacatccgggcccaggactccctgggaaacacagtgttacacatcctcatcctccagcccaacaaaacctttgcctgccagatgtacaacctgttgctgtcctacgacagacatggggaccacctgcagcccctggacctcgtgcccaatcaccagggtctcacccctttcaagctggctggagtggagggtaacactgtggtgagagacggtccccatccctgaggtgtctttctaatgaccctcaacctatcccgctggccctgggagaaacagaggtgaacgcgatccctgatgcttagatcccattctcaactcagaaatttttcaacccctcccactgtggttacctgttccctttcttgcccactccttttcccctgaggcattgggggttacagagtctagatcccatgctaggattgtctgtaatgcctcagcccaccttccctttcagcccccagagcagggccctccagcctctcgtctcccctt

SEQ ID NO: 22426 - DNA, 673 bp, Homo sapiens
  misc_feature 1..673: note = ENST00000634074
  source 1..673: mol_type = unassigned DNA; mol_type = unassigned DNA
atgaggattgcaaggtgcaccagagaggagccatgggggaaacagcgctacacatagcagccctctatgacaacctggaggccgccatggtgctgatggaggctgccccggagctggtctttgagcccatgacatctgagctctatgagggtgagggcccacgggtctggggtgaagagcaggaatgactggttgggtatttcaagtcagtctctgtgatggataatttgggaaagacacaggggatctgagcctcctactctttttttctcttctctgtctcccttccgtgtcagtcctgactgcccatcactagaacgcctgccccctgaaatgccaggggcctagagaagaggaagagatgggcagcagctggatcccctgggaatcctgaacacccgagggctccctgttctccatcccaggctacccctgagggaaagagactggggtgcatatgggagggaccccctgcaggatcctgggaacagacccgtgactgacagctgtctctgggccaggtcagactgcactgcacatcgctgttgtgaaccagaacatgaacctggtgcgagccctgcttgcccgcagggccagtgtctctgccagagccacaggcactgccttccgccgtagtccccgcaacctcatctactttggggagcaccctttg

SEQ ID NO: 22427 - DNA, 247 bp, Homo sapiens; identical to SEQ ID NO: 22417
  misc_feature 1..247: note = ENST00000633826
  source 1..247: mol_type = unassigned DNA; mol_type = unassigned DNA

SEQ ID NO: 22428 - DNA, 11154 bp, Homo sapiens
  misc_feature 1..11154: note = ENST00000361875
  source 1..11154: mol_type = unassigned DNA; mol_type = unassigned DNA
cccagcatccctggcgcggccatttcagccccatcttggcccagcggagggagctgcagccgccgcttcagcagtttgaatttcagtttcttcggggtttaggaattgggcgcaccgaggaggagccggagaagccaccaccgctacctcacacagccggggcgcctccggtcccgtgccagcggtctgccgccgccgcccctctctgagagaagccgcgaggggaggccgagaccgccgtcgccgcccgcccgcaggggtggttccccctgtaaggggaggaccgagccggctttcccctcccccagagcgggtttccgcctgaggcagtcgacatgtccctggggctgagctccggctagagccggggagggagggccgcctgcccgcgccacagccccaccgcccgcccgcggaccttcagccagctccggcccgcggctcccggctgaattaggcatctccgactccggactcgccgctccttccctcagtcagagagcccagcgctgacgccggcaccggcctgaggagcccgagcggggcagcaccgcccctcacgccgccgccaccgcctcctcctcctcctcttcgccctcccactcccacccccagccaaggcctgctgaccgcgccgagcgccgagctggactgaccacggctgcccggagacgagagaggaagcagccggcccgcccctgggttcgcgctctcgccgcctctgagggaattgaattgaggcgccgcggctgcgagagctaaaaaggaaggaggagccgccgcgggactgagacgggggcagagccgaagagaccgacacagagaaggaaacgaggaggaggatgtctcaccgggcggccagcgcctggatcagcccgtgactcttaacagcggcgggcctcagaccccagcgcagactcggactttgtctttgggggcccgtgctctgccctccccggtttccgacaggacccagaggagccggcgtgcctctctgccctccagccttcttcaccatgtccaagatgccggccaagaagaagagctgcttccagatcaccagtgtcaccacggcccaggtggccactagcatcaccgaggacaccgagagcttggacgacccggacgagtcacgcacagaggacgtctcctccgagattttcgacgtctctcgggccacggattatggccctgaggaggtctgcgagcgcagctcttccgaagagacgcttaacaatgttggggatgcggagactcccgggaccgtctccccaaacctcctcctagatgggcagctggcagcggcggctgctgctcccgccaacggaggaggagtcgtttcggcccggagcgtgtctggggcgctcgccagtaccctggcggcggctgccacttcggcccccgcccccggagcacccggcggcccccagctcgcgggctcatccgccgggccagtgactgcagccccatctcagcctcccaccacatgtagttcccgttttcgcgtgatcaagctggaccacgggagcggagagccctatagacgcggccgatggacgtgtatggaatactatgagagggattcagacagcagcgtcctgactagatccggggattgcattagacacagcagtacttttgaccagactgcggagcgggacagcggcctgggcgccaccggagggtcggtggtggtagtagtggcctccatgcagggggcgcacgggcccgagtcgggaactgacagctccttgactgctgtgtcacagctacccccgtcggagaaaatgagccagcccactccggcccagccgcagagttttagcgttgggcagccacagccgccgccgccacccgtaggtggggctgtggctcaaagctcggctccgctgccgccgttcccgggagccgcgaccgggccgcagccaatgatggcagccgcgcagcccagccagccccagggagcggggcccgggggacagactctgccgccgacgaatgtaaccctggcgcagccggctatgtccctgcctccgcagccgggccctgcagtgggcgcccccgcggcgcagcagccccagcagttcgcgtatcctcagcctcagataccgcccggacatttgctgcccgtccagccctccggccagagtgagtacctgcagcagcacgtggccggcctgcagccgccaagccccgcgcagccctcgtccaccggcgccgcagcgagccccgccacggcggccacccttcccgtgggcaccggccagaatgcttcctcggtgggcgcgcagctcatgggcgcgtcttcccagcccagcgaagccatggccccccggacgggaccagcgcaaggcgggcaggtcgcgccttgtcagccgactggagtgcccccggctactgtgggaggcgtggtgcagccgtgcctcggtcctgccggggctgggcagccccagtccgtgcctccgccgcagatgggtggcagtggtccgctgtcagccgtacctggtggccctcacgccgtggtgcccggagttccaaacgtgcctgcagccgtgcccgctccaagcgtgcctagtgtgtctaccacttctgttactatgccaaatgtacccgcgcctctggcccagtcgcaacagctgagcagccatacgccagtcagcaggagcagcagcataatccagcatgttgggctgcccttagcgccaggcacacacagcgcaccaacaagtctaccacagtctgacctaagccagtttcaaactcagacccagcctttagtcgggcaagtcgacgatactagaagaaaatcagaacccctacctcaaccaccactttctctcattgctgaaaataagcctgttgtgaagccgcctgttgcagattccctggcaaacccccttcagttaacacctatgaacagtctggccacctctgtattcagcatagctattcctgttgatggtgatgaagacaggaatccttcaactgctttctaccaagcgttccatttgaacacgttaaaggaatcaaagagcctctgggatagtgcatctgggggaggtgttgtagccattgacaacaaaatagaacaagcaatggatctggtgaaaagccatttgatgtatgcagtaagagaagaagtggaagttttaaaggaacaaataaaagaattagttgaaagaaactctttacttgaacgagaaaatgcactgttaaaatctctttcaagcaatgatcaattatcccaactcccaacccaacaggccaatcctggtagcacttctcaacagcaagcagtgatagcacagcctccgcagccaacgcaacctccacagcagccgaatgtctcctcagcataaagctttcttaagcctcattaagaaaaaaactgaaagcaatctatccttgtgtgccactggtgttctttccactttatacgaaagcaagtagccatgctttggttgtgtgtttggccttttcagtattagacaatcattctacaagagcttttcctctctctgagatgtcatgcagcgctgttgatgtccagttctatgtcatcagtacacaaggagaataatagatggggtttattaaagcgagcaaagtctgcattttacctggtgcgcatgagtggggtctttaagagttttggtggctctcccatgtttcctattacccatggatttaccctgagccttcctatcacattataaataacagttcatctaaagagccacttttctttctgattcagtaacatttgcctacataagttttcatttatttgtgttttatttattacagggctgctattttcataatgtacatgaacaatgtcacagaacttttttaatttttttgaataattataagtatcagtaaaggaagtgaaagacaggattgcatttaatagataaaacgtttaggcaataattgaacaaaagaatcctggcatatttctaacactaatggcaatttacttatggtatttattttcagtagtaaagacccagcttgaatgtaaattttgtatagtgtaagtatgaagaacatagtgcaactgtacaggtagtcaccagttattgtgatatgataaataattgggctattttgatgaagaaaactttgttcatttgtttctactttctaagagaaattgccacgattcctctgcttttcaacatttcgtatgacttttttttcgggtgggaataaaaagctgtgaaattgttcaacctactttgtaaccaaagaagcaaagctgtgtaatggagtttggtttttttttgttgtttttttttttttgtctttttttttttttataatgcacattctttatgtatttttatttagtgttttctcagtcacaattttctttactgtctagcatgatctgcatgacctataatctttgaaccactttcgtacctcatgtttttatccagcactcttattgtaatatgtactagtctgtgaacaatgtcaaataaaagagaacgaacaggtagtttggtggagctgagctagtgtacaatacactagttgtaaaaaaaaaaaaaaaaaaaagtgagccatcttttgttcatttaaaatggtgttttgaatttcgtatgcagaaaacgttttgttacattgcagattttaatgtatttaataaatgcaacatgcagattaagtgcagtgtatactgagtatttaaattaaaatgtacatttcataaatacagtttcaaaagaaagcatcattttgtgtatactaacacattaagtgtatgtcagaaattgatgtataaatatatattttaacattttctgaaattaaactgcagttttgttgaaatatttggctctatatgtgttcaaaatttgactagatttgtattttcacagttcaaaatactccttaaagacctgttaataatgacttactgatagttcttaaattttcaaagtaaaacaatttaaagaatgcaaaaatagtgagcaatatttgtactcaatattcatattatgttagtgatacttaagtaggaaatccttgtctaccaaaacttttacttgaattcagaaaggtgcctgtagaaattaacatgcactgcatctgtagccagctagctaatcagagttaatgagaaccagtagttagttctccgtgttaaaagacttatttgaagtaaaaatttaatcagattagccacaaacaaacaaggcataaaattgggatgtacatgagattgccaaatattttctattctagttgtgctgcaagacattgaacaaaatgttaatgaataacattataaatcaaggaactaagtacataggcttgagtaagcaaccctaaggatgtgtagtaagattccaagtagagctgctacaggtgagatacttaatggaatgtgaaacttcactgttggactgttaaccgaaaaggtttgctggctgtgcccctccagtgctaactgtgacatgtgatatttaatacaggtggagaaaaactagtcttagaaatgggatttttgtgaaaatagattccattttgattctggggctggaaaaacacttcataaacaaagtaatagtctccaaggaaatgaataataaggtttaaaatggtaacagcagttattactacttttatattaagaaaaacagtagaaaaggagagaaaatatgggtagttcacagaagagataaatggcagtttctaaaggttcaacctctagtaacctaagaaatgcaaattaatgtttttggcgaattgtaataagtgtcctaagtagcaggacttaacatagaaagaaagacaggctttcctgtgtacttttagaaagtaatttggcagtatgtatctagagccttaaataataagctttccagtgtaacgacaggagaagatactcaactcatggtccattgttcaaaaatgcagaattattgtggtgtctgccctctgctttcccatcatcccctcccctcaaaatccaaactatccctactgtcaacccttcccccagctgattgtttaggatcttaagtaacttccaattcagctttggagatttagtctcctgctccaaatagttgtaaatattaactgattgagatcccaatttggaggcacagtcttacaggaatgccatctatctaattctgtcagtgtaatgcccatagagcaaggtcccacataagcttttctgttttaatttagccggtaaatcataagtagaaatttttctgatacggtaattgtctacaattcaaacctaactttccccaaataaaatttagtttgttccgatgtgatctcacagcttgccacaccaaaaacaaatagtaggggttaggaggcattaaataaacagtttccttaactcctgattgtccaaaatagctgaatttttccaattctatttataatatcctatgctaattagaagtattgagataacgttttataatcaagcctccagtgactggggatcacagctgccattattcacaagaattttcacaggtgaatgattatatttctccaagttgcaaactccagtaattcatggacctttttttaaaaaaaaaaaaagtcttaatagaaccagaatatctctgttcttgaaaatttatctttgcagaaccagaaatagctaattgtctggaaacaatttttaagatttgaagtcacatttttaaaagaagctttatggctcagtggcaagcactttgtgacatttctttaataatcctatgaaaaggacaaaacccagccctcaaaattgacaatttgaggacataataagccaactgataatgcagtgaggaatacttgttactatgtacagtcagggatggttttgtcagggtaggtttcctcaaaaacatgacacctgagtcttgaaggtcataagagccagagggaagggtgttccaagcacaagaaaagagaactcaatggcttaaaagtataaacaaggctcctagggcagccacagaattgcattggagacaggcaggcagtgacttccccactgacctagtattttggcatctattcagaaagcaagaatgatttattgaatggttttaagcaatgggatactatgctcaaattatgctggatgtgcacaattccagtggcagatgggaggtaggttagagtagctgaaactggaagctgagaaataatttaggagggatgacaatccggaaaataaatgaaagggcaaaattacataggcaattttgtgaaggtcatgaaggaagtttgtcttgggtctttctgtaccattttcctctccacaatgaacatcccattcccagtgtcaggtatcaggtgcctattttctttttttcttttttctttttttttttttttgagacagagtcttgctgtgctcaggctggagtgcagtggcaagatctcggctcactgcaacctccgcctcccaggttcaagcgattctcctgcctcagcctcctgagtagctgggattacaggcgtgtgccaccatgccaggctaatttttgtatttttagtagagacagggtttcaccatgttggccaggttggtcttgaactcctgacctcaagtcatctcccccgcccgcctgggcctcccaaagtgttgggattacaggcgtgagccaccgcacccagctgcctattttcttgtccctccaaaaaaagattaaagagtcccaactcatacttgaaagtttgactcggtcttttccttccaacagttataaatctgtgaaatgaaagtctttgtttccttaaagggatttcaagaatttaacaaaagggttggggaatggaacctttgctgtcactatgcctgtctctcaattctaccctaaaggtaaactaaatggaatccttttatggtgactaggattaggatgttgattccaaagcctttccctaaaatctattccttgctccctggaaaggataatacaggttctggcccccactgtaggtactgacagcccaaggcagaataggttttgctaggctttagccttttattctttgacataggtcagtcctgcaggcttcttttttctaagtctcctgcctatccaaaaccagaccttttctcccacctccttctgcttcaagcctcttaataatccatatttctattttctagcaatagtaatagtttattatttagtgatgtatacttgcaccccatttactccttttcaatatttcaggatacatctttgtcctgtatttctgtaccagttcacagaatttctacagcaagatccctttaaatgtatggctttccttcataggttgcaaggattactttatacaagtgctactgtaactatatcttttgtggagtacaattggtatgacatgctgtgttcatagatgaaaatgctaagtgaggcactctgaagcaagttaaagttcacagacattcttgcttgcccaccacccccccgaaccccgccatggaatcatcaaataagaaaaataagacagattttcagattggtgatggcaaagtaagacgctggtattttgcactggcgcagtccatttagttgttgaatttgttcagcatacctggatggtgagtgagttagctttatttttcattctcagcagggaaactgatagactaggcagtttggggaattttcccattgtctactgtcatgggtccatagtatttaagtttacagactacaacattgtccacagaagccatatttatccccttggagggaagggaaaggtgtgctaacttagatcataaaaacaactgaattttaaaacaaggcaaatgccacagttcaacttctccataaaaaagttaagttcatctctccattcttttgcatgcctacaatatttccatataacaactgtaaaatactcttgcctgctgcaatccaaatgttatccggatcacagttcttgctgtcatttcacaggcatgcaatgtatctatagataggtcatatcatacctgaggaagatcagagacagcaagggaacattttccccacacttgagatggaaataataacaggtcagtggctaataaaaagaaacatgtatgactttgtaaaaccctaaaagtgatgttttcaagaaatttaggtttcttttttttattttataaaaaaaatgttgacatgcaatttaattctatttcaatttaggtgctgcaacctgtactggatgtttggggatagaaagatgaatgggacatgatttgtgtgctccaatgagctcagtccagtgtaagtgtaaaagttaaagtgccatattgtttattcagagtatatgttatagtttgtgaaccttatatcatttgttaaatgaaaggtttttataaatcaacagtaatattgccatcccatgtaaaaatcctttgatattgccaggaaacaactttaaatcaccagaaagctttaacatcaaataatacttttagaaggaggggaaaagccttccacctcgacatcgagcctatgaagtattccctaaaaaagaggaactaatctgagaaaagtttacacatttttaatactctaagttgtagataatgaaattgatttaaatcaaagttaactagaataggattcatgtgtcatgaattatattgtctattgtctcataagcaacaagtgacacttattatcttggctgacaaaatcagctaccatttaatgaaccaagttaagaataactcaggtgactgataccaaaaataaatctctaatacagctgagaatccagaaacacaaataatatgttgagtaagtaataaaagtgacatttcaaattagtaaggaaaaaatggattattcaacaaatagtatgggatagcataacaatttagaagaaatataaagttagatctttcacaaaaattaattctagctagactagcagttagtcttctactttttggttactcccttttagaaattggaagctatgaagctatataccctgtccatttgaaaatgcacataagcaaagaactttacaaataggttataaagagaagctcaatctcagcaaaataagggaagtgcacattaaaacacaagaaaccatctcagatccaactaatatttagcgtgcatacaaatcaaaagctggaaagggtgtggaaaaacaggaatacattgctagtgagcatacaaattggcacagcctcttttaaagacaattgtgtatcacccattaaattttaaaagtcacataccctgtgacctaacaattccaacttttaatgtcctaaagaaacatacatgtgttcacaagatagcctgtacaatgatgtcaattgcacctttgcttgtacagtagacccccttatctgcattttcactttttgaggtttcagtcatccaaggtcaaccacaatacaaaaatattaaatggaaaattccagaaacgaacataagttttaaacttcaaacctttctgcatagtataataaaaatctctcactatccctctccatcctgcctgggacaggaatcatccctttgtccagtgtatccacaatgtatacactcattatatacccattttataatgcccattagtcatttctattatcagatcataaaaaaacatagtacatagagggtttggtattattcatggtttcaggcattcagtgagggtcttggaaaatatcctccatgatgggggagctactgtaatactatgaaattggaaaaaccaaaatactcatcaagaggatggactatggtacacatgatgaagtattaagtatcaatgaaaaagagagagtcctacatgtccggcatggaaggatctccaggagacaatgttaaaagtttgggggaaaaattgaaagacaatacctgtaatacatatgatactagtgatgttaaatcacatcacacacacacacacacacacacacacacacacacaaatactgtatagtgtacttctacaagtacatatttgtgtattatatagagagaaggtctggaaggatactaaccaaactgtcaacagtagtttggtagcgtgcattagctttaactgtaatgtttgatgtttttgaatatgcatttatgtattgtttgtgtaatgacaaattaataaattagaaataaaataaaataatgtgtt

SEQ ID NO: 22429 - DNA, 826 bp, Homo sapiens
  misc_feature 1..826: note = ENST00000480589
  source 1..826: mol_type = unassigned DNA; mol_type = unassigned DNA
agctgagcagccatacgccagtcagcaggagcagcagcataatccagcatgttgggctgcccttagcgccaggcacacacagcgcaccaacaagtctaccacagtctgacctaagccagtttcaaactcagacccagcctttagtcgggcaagtcgacgatactagaagaaaatcagaacccctacctcaaccaccactttctctcattgctgaaaataagcctgttgtgaagccgcctgttgcagattccctggcaaacccccttcagttaacacctatgaacagtctggccacctctgtattcagcatagctattcctgttgatggtgatgaagacaggatctggtgaaaagccatttgatgtatgcagtaagagaagaagtggaagttttaaaggaacaaataaaagaattagttgaaagaaactctttacttgaacgagaaaatgcactgttaaaatctctttcaagcaatgatcaattatcccaactcccaacccaacaggccaatcctggtagcacttctcaacagcaagcagtgatagcacagcctccgcagccaacgcaacctccacagcagccgaatgtctcctcagcataaagctttcttaagcctcattaagaaaaaaactgaaagcaatctatccttgtgtgccactggtgttctttccactttatacgaaagcaagtagccatgctttggttgtgtgtttggccttttcagtattagacaatcattctacaagagcttttcctctctctgagatgtcatgcagcgctgttgatgtccagttctatgtcatcagtacacaaggagaataataga

SEQ ID NO: 22430 - DNA, 2093 bp, Homo sapiens
  misc_feature 1..2093: note = ENST00000466814
  source 1..2093: mol_type = unassigned DNA; mol_type = unassigned DNA
aatccagcatgttgggctgcccttagcgccaggcacacacagcgcaccaacaagtctaccacagtctgacctaagccagtttcaaactcagacccagcctttagtcgggcaagtcgacgatactagaagaaaatcagaacccctacctcaaccaccactttctctcattgctgaaaataagcctgttgtgaagccgcctgttgcagattccctggcaaacccccttcagttaacacctatgaacagtctggccacctctgtattcagcatagctattcctgttgatggtgatgaagacagtgcatctgggggaggtgttgtagccattgacaacaaaatagaacaagcaatggatctggtgaaaagccatttgatgtatgcagtaagagaagaagtggaagttttaaaggaacaaataaaagaattagttgaaagaaactctttacttgaacgagaaaatgcactgttaaaatctctttcaagcaatgatcaattatcccaactcccaacccaacaggccaatcctggtagcacttctcaacagcaagcagtgatagcacagcctccgcagccaacgcaacctccacagcagccgaatgtctcctcagcataaagctttcttaagcctcattaagaaaaaaactgaaagcaatctatccttgtgtgccactggtgttctttccactttatacgaaagcaagtagccatgctttggttgtgtgtttggccttttcagtattagacaatcattctacaagagcttttcctctctctgagatgtcatgcagcgctgttgatgtccagttctatgtcatcagtacacaaggagaataatagatggggtttattaaagcgagcaaagtctgcattttacctggtgcgcatgagtggggtctttaagagttttggtggctctcccatgtttcctattacccatggatttaccctgagccttcctatcacattataaataacagttcatctaaagagccacttttctttctgattcagtaacatttgcctacataagttttcatttatttgtgttttatttattacagggctgctattttcataatgtacatgaacaatgtcacagaacttttttaatttttttgaataattataagtatcagtaaaggaagtgaaagacaggattgcatttaatagataaaacgtttaggcaataattgaacaaaagaatcctggcatatttctaacactaatggcaatttacttatggtatttattttcagtagtaaagacccagcttgaatgtaaattttgtatagtgtaagtatgaagaacatagtgcaactgtacaggtagtcaccagttattgtgatatgataaataattgggctattttgatgaagaaaactttgttcatttgtttctactttctaagagaaattgccacgattcctctgcttttcaacatttcgtatgacttttttttcgggtgggaataaaaagctgtgaaattgttcaacctactttgtaaccaaagaagcaaagctgtgtaatggagtttggtttttttttgttgtttttttttttttgtctttttttttttttataatgcacattctttatgtatttttatttagtgttttctcagtcacaattttctttactgtctagcatgatctgcatgacctataatctttgaaccactttcgtacctcatgtttttatccagcactcttattgtaatatgtactagtctgtgaacaatgtcaaataaaagagaacgaacaggtagtttggtggagctgagctagtgtacaatacactagttgtaaaaaaaaaaaaaaaaaaaagtgagccatcttttgttcatttaaaatggtgttttgaatttcgtatgcagaaaacgttttgttacattgcagattttaatgtatttaataaatgcaacatgcagattaagtgcagtgtatactgagtatttaaattaaaatgtacatttcataaatacagtttcaaaagaaagcatcattttgtgtatactaacacattaagtgtatgtcagaaattgatgtataaatatatattttaacattttctgaaattaaactgcagttttgttg

SEQ ID NO: 22431 - DNA, 715 bp, Homo sapiens
  misc_feature 1..715: note = ENST00000485421
  source 1..715: mol_type = unassigned DNA; mol_type = unassigned DNA
ctgaaaataagcctgttgtgaagccgcctgttgcagattccctggcaaacccccttcagttaacacctatgaacagtctggccacctctgtattcagcatagctattcctgttgatggtgatgaagacaggaatccttcaactgctttctaccaagcgttccatttgaacacgttaaaggaatcaaagagcctctgggatagaattttttttagaattcagcatcggaggaggaatgtgacataataatgatcgaaagccgaaagtttaaaagttgtgatgccctcacatggttggagggttattctagcttctaaggactgaatgttgtccacaagagtgtcatcaggtcataaattgtgcatctgggggaggtgttgtagccattgacaacaaaatagaacaagcaatggatctggtgaaaagccatttgatgtatgcagtaagagaagaagtggaagttttaaaggaacaaataaaagaattagttgaaagaaactctttacttgaacgagaaaatgcactgttaaaatctctttcaagcaatgatcaattatcccaactcccaacccaacaggccaatcctggtagcacttctcaacagcaagcagtgatagcacagcctccgcagccaacgcaacctccacagcagccgaatgtctcctcagcataaagctttcttaagcctcattaagaaaaaaactgaaagcaatcta

SEQ ID NO: 22432 - DNA, 312 bp, Homo sapiens
  misc_feature 1..312: note = ENST00000492828
  source 1..312: mol_type = unassigned DNA; mol_type = unassigned DNA
gatctcacaggaatccttcaactgctttctaccaagcgttccatttgaacacgttaaaggaatcaaagagcctctgggataggggggaaatcacatggtatctagcatgggacaaagcagcaaaataaaccaaaaggacaatctctattttatatagaaaataaacatacttttctgcatcctgtgtactttaagtatatctatatttttgaagggttcatactgtgttgaatttttcttatgaaatagtcacttccccagtgtattttaatgcaaatgcatattctataaaataaactatattttaatttt

SEQ ID NO: 22433 - DNA, 930 bp, Homo sapiens
  misc_feature 1..930: note = ENST00000460316
  source 1..930: mol_type = unassigned DNA; mol_type = unassigned DNA
aataagctattttaaattactgtatatttggttttaagtgaaacacaaatgtcttttacattcttttaagagttggaagggaggttaaattttttagaataataacatattctaattttttccagtgcatctgggggaggtgttgtagccattgacaacaaaatagaacaagcaatggatctggtgaaaagccatttgatgtatgcagtaagagaagaagtggaagttttaaaggaacaaataaaagaattagttgaaagaaactctttacttgaacgagaaaatgcactgttaaaatctctttcaagcaatgatcaattatcccaactcccaacccaacaggccaatcctggtagcacttctcaacagcaagcagtgatagcacagcctccgcagccaacgcaacctccacagcagccgaatgtctcctcagcataaagctttcttaagcctcattaagaaaaaaactgaaagcaatctatccttgtgtgccactggtgttctttccactttatacgaaagcaagtagccatgctttggttgtgtgtttggccttttcagtattagacaatcattctacaagagcttttcctctctctgagatgtcatgcagcgctgttgatgtccagttctatgtcatcagtacacaaggagaataatagatggggtttattaaagcgagcaaagtctgcattttacctggtgcgcatgagtggggtctttaagagttttggtggctctcccatgtttcctattacccatggatttaccctgagccttcctatcacattataaataacagttcatctaaagagccacttttctttctgattcagtaacatttgcctacataagttttcatttatttgtgttttatttattacagggctgctattttcataatgtacatgaacaatgtcacagaacttt

SEQ ID NO: 22434 - DNA, 1812 bp, Homo sapiens
  misc_feature 1..1812: note = ENST00000372390
  source 1..1812: mol_type = unassigned DNA; mol_type = unassigned DNA
acgcaggaaggggggggtcaccgccgctctgggatccgtcatcgaagcgtccctgcggccgctgcgccgtgaaaaccagctgctgcagccgcagaggcagccggaggcagaggggcggcgggcaggaccagacagggctgggcagggggctggccgagcgccgtgcgccgcttgggagaaggccggaagcttaccagccgagaaggaattcctagctagcttcagagccggtgcctccggagccagcgtggtggccatagacaacaagatcgaacaggccatggatctggtgaagaatcatctgatgtatgctgtgagagaggaggtggagatcctgaaggagcagatccgagagctggtggagaagaactcccagctagagcgtgagaacaccctgttgaagaccctggcaagcccagagcagctggagaagttccagtcctgtctgagccctgaagagccagctcccgaatccccacaagtgcccgaggcccctggtggttctgcggtgtaagtggctctgtcctcagggtgggcagagccactaaacttgttttacctagttctttccagtttgtttttggctccccaagcatcatctcacgaggagaactttacacctagcacagctggtgccaagagatgtcctaaggacatggccacctgggtccactccagcgacagacccctgacaagagcaggtctctggaggctgagttgcatggggcctagtaacaccaagccagtgagcctctaatgctactgcgccctgggggctcccagggcctgggcaacttagctgcaactggcaaaggagaagggtagtttgaggtgtgacaccagtttgctccagaaagtttaaggggtctgtttctcatctccatggacatcttcaacagcttcacctgacaacgactgttcctatgaagaagccacttgtgttttaagcagaggcaacctctctcttctcctctgtttcgtgaaggcaggggacacagatgggagagattgagccaagtcagccttctgttggttaatatggtataatgcatggctttgtgcacagcccagtgtgggattacagctttgggatgaccgcttacaaagttctgtttggttagtattggcatagtttttctatatagccataaatgcgtatatatacccatagggctagatctgtatcttagtgtagcgatgtatacatatacacatccacctacatgttgaagggcctaaccagccttgggagtattgactggtcccttacctcttatggctaagtctttgactgtgttcatttaccaagttgacccagtttgtcttttaggttaagtaagactcgagagtaaaggcaaggaggggggccagcctctgaatgcggccacggatgccttgctgctgcaaccctttccccagctgtccactgaaacgtgaagtcctgttttgaatgccaaacccaccattcactggtgctgactacatagaatggggttgagagaagatcagtttgggcttcacagtgtcatttgaaaacgttttttgttttgttttgtaattattgtggaaaactttcaagtgaacagaaggatggtgtcctactgtggatgagggatgaacaaggggatggctttgatccaatggagcctgggaggtgtgcccagaaagcttgtctgtagcgggttttgtgagagtgaacactttccactttttgacaccttatcctgatgtatggttccaggatttggattttgattttccaaatgtagcttgaaatttcaataaactttgctctgtttttctaaaaataaa

SEQ ID NO: 22435 - DNA, 2027 bp, Homo sapiens
  misc_feature 1..2027: note = ENST00000372397
  source 1..2027: mol_type = unassigned DNA; mol_type = unassigned DNA
tttgcatggcccctgacgccatgtgacgcagccggctcctcctatataaagaagcaggagccaaaatatctccgagtctgggttggactggcggccgtggagtttgtgacatacgaggtgacacccctcgagtcacttcccttcaactccagctggagcgcctgcttggctttgggttcgttctgcagccttcgccccgctcctagcctcagggccggactccagcgcagagcccagcccagcgcagcctgccagcagccacccagccgcccagccgcccagccccgcacgaaacccggccagagcttcctagcagcccgagccatgaacaccgaaatgtatcagacccccatggaggtggcggtctaccagctgcacaatttctccatctccttcttctcttctctgcttggaggggatgtggtttccgttaagctggacaacagtgcctccggagccagcgtggtggccatagacaacaagatcgaacaggccatggatctggtgaagaatcatctgatgtatgctgtgagagaggaggtggagatcctgaaggagcagatccgagagctggtggagaagaactcccagctagagcgtgagaacaccctgttgaagaccctggcaagcccagagcagctggagaagttccagtcctgtctgagccctgaagagccagctcccgaatccccacaagtgcccgaggcccctggtggttctgcggtgtaagtggctctgtcctcagggtgggcagagccactaaacttgttttacctagttctttccagtttgtttttggctccccaagcatcatctcacgaggagaactttacacctagcacagctggtgccaagagatgtcctaaggacatggccacctgggtccactccagcgacagacccctgacaagagcaggtctctggaggctgagttgcatggggcctagtaacaccaagccagtgagcctctaatgctactgcgccctgggggctcccagggcctgggcaacttagctgcaactggcaaaggagaagggtagtttgaggtgtgacaccagtttgctccagaaagtttaaggggtctgtttctcatctccatggacatcttcaacagcttcacctgacaacgactgttcctatgaagaagccacttgtgttttaagcagaggcaacctctctcttctcctctgtttcgtgaaggcaggggacacagatgggagagattgagccaagtcagccttctgttggttaatatggtataatgcatggctttgtgcacagcccagtgtgggattacagctttgggatgaccgcttacaaagttctgtttggttagtattggcatagtttttctatatagccataaatgcgtatatatacccatagggctagatctgtatcttagtgtagcgatgtatacatatacacatccacctacatgttgaagggcctaaccagccttgggagtattgactggtcccttacctcttatggctaagtctttgactgtgttcatttaccaagttgacccagtttgtcttttaggttaagtaagactcgagagtaaaggcaaggaggggggccagcctctgaatgcggccacggatgccttgctgctgcaaccctttccccagctgtccactgaaacgtgaagtcctgttttgaatgccaaacccaccattcactggtgctgactacatagaatggggttgagagaagatcagtttgggcttcacagtgtcatttgaaaacgttttttgttttgttttgtaattattgtggaaaactttcaagtgaacagaaggatggtgtcctactgtggatgagggatgaacaaggggatggctttgatccaatggagcctgggaggtgtgcccagaaagcttgtctgtagcgggttttgtgagagtgaacactttccactttttgacaccttatcctgatgtatggttccaggatttggattttgattttccaaatgtagcttgaaatttcaataaactttgctctgtttttctaaaaataaa

SEQ ID NO: 22436 - DNA, 2213 bp, Homo sapiens
  misc_feature 1..2213: note = ENST00000315660
  source 1..2213: mol_type = unassigned DNA; mol_type = unassigned DNA
atatcccagtgctgactcccgggcgtgcagaccgctaactagctcactcgctctcagctcctgccaccgctcagccgtcacagcccaggggagcccgagagcctgagagcctgcaaaccggggagggagggagcaaaggagggagggagcaagggcgcgccctggctctccctctgccctgctgcccgcccttcctgcctccacagcttgtcttttccaggcaccctggagtcccctcaggccagctcggtgggcgcgcacctgccagccgcccctgacctcgcaggccaggcgacctccgagcctgagaagatggcccagtccaagctcgattgccgctcacctgtcggcctcgactgctgcaactgctgcctggacctggcccatcggagtgggctccagcgaggcagcagcggggagaacaacaacccgggcagccctacagtgagcaactttcggcagctgcaggaaaagctggtctttgagaacctcaataccgacaagctcaacagcataatgcggcaggattcgctagagccggtgctgcgggacccctgctacctgatcaacgagggcatctgcaaccgcaacatcgaccagaccatgctctccatcctgctcttcttccacagtgcctccggagccagcgtggtggccatagacaacaagatcgaacaggccatggatctggtgaagaatcatctgatgtatgctgtgagagaggaggtggagatcctgaaggagcagatccgagagctggtggagaagaactcccagctagagcgtgagaacaccctgttgaagaccctggcaagcccagagcagctggagaagttccagtcctgtctgagccctgaagagccagctcccgaatccccacaagtgcccgaggcccctggtggttctgcggtgtaagtggctctgtcctcagggtgggcagagccactaaacttgttttacctagttctttccagtttgtttttggctccccaagcatcatctcacgaggagaactttacacctagcacagctggtgccaagagatgtcctaaggacatggccacctgggtccactccagcgacagacccctgacaagagcaggtctctggaggctgagttgcatggggcctagtaacaccaagccagtgagcctctaatgctactgcgccctgggggctcccagggcctgggcaacttagctgcaactggcaaaggagaagggtagtttgaggtgtgacaccagtttgctccagaaagtttaaggggtctgtttctcatctccatggacatcttcaacagcttcacctgacaacgactgttcctatgaagaagccacttgtgttttaagcagaggcaacctctctcttctcctctgtttcgtgaaggcaggggacacagatgggagagattgagccaagtcagccttctgttggttaatatggtataatgcatggctttgtgcacagcccagtgtgggattacagctttgggatgaccgcttacaaagttctgtttggttagtattggcatagtttttctatatagccataaatgcgtatatatacccatagggctagatctgtatcttagtgtagcgatgtatacatatacacatccacctacatgttgaagggcctaaccagccttgggagtattgactggtcccttacctcttatggctaagtctttgactgtgttcatttaccaagttgacccagtttgtcttttaggttaagtaagactcgagagtaaaggcaaggaggggggccagcctctgaatgcggccacggatgccttgctgctgcaaccctttccccagctgtccactgaaacgtgaagtcctgttttgaatgccaaacccaccattcactggtgctgactacatagaatggggttgagagaagatcagtttgggcttcacagtgtcatttgaaaacgttttttgttttgttttgtaattattgtggaaaactttcaagtgaacagaaggatggtgtcctactgtggatgagggatgaacaaggggatggctttgatccaatggagcctgggaggtgtgcccagaaagcttgtctgtagcgggttttgtgagagtgaacactttccactttttgacaccttatcctgatgtatggttccaggatttggattttgattttccaaatgtagcttgaaatttcaataaactttgctctgtttttctaaaaataaa

SEQ ID NO: 22437 - DNA, 2266 bp, Homo sapiens
  misc_feature 1..2266: note = ENST00000372383
  source 1..2266: mol_type = unassigned DNA; mol_type = unassigned DNA
ctccacaggtccgccccaatccccgctcacacttgggaaacttgggactgcgctggggccgcgtgtggcacctcaggggggcggcccccggcctcaagaggagggggaggagaaggaggaagaggaggaagtgagcccgaaggatccgctcggagctgtttgtccagctgtttctattcgcacccggagcagtacagccagaagggggccgagccgaaggtggctggctttaggcgctaatttccaactcttttcctcacagcttgtcttttccaggcaccctggagtcccctcaggccagctcggtgggcgcgcacctgccagccgcccctgacctcgcaggccaggcgacctccgagcctgagaagatggcccagtccaagctcgattgccgctcacctgtcggcctcgactgctgcaactgctgcctggacctggcccatcggagtgggctccagcgaggcagcagcggggagaacaacaacccgggcagccctacagtgagcaactttcggcagctgcaggaaaagctggtctttgagaacctcaataccgacaagctcaacagcataatgcggcaggattcgctagagccggtgctgcgggacccctgctacctgatcaacgagggcatctgcaaccgcaacatcgaccagaccatgctctccatcctgctcttcttccacagtgcctccggagccagcgtggtggccatagacaacaagatcgaacaggccatggatctggtgaagaatcatctgatgtatgctgtgagagaggaggtggagatcctgaaggagcagatccgagagctggtggagaagaactcccagctagagcgtgagaacaccctgttgaagaccctggcaagcccagagcagctggagaagttccagtcctgtctgagccctgaagagccagctcccgaatccccacaagtgcccgaggcccctggtggttctgcggtgtaagtggctctgtcctcagggtgggcagagccactaaacttgttttacctagttctttccagtttgtttttggctccccaagcatcatctcacgaggagaactttacacctagcacagctggtgccaagagatgtcctaaggacatggccacctgggtccactccagcgacagacccctgacaagagcaggtctctggaggctgagttgcatggggcctagtaacaccaagccagtgagcctctaatgctactgcgccctgggggctcccagggcctgggcaacttagctgcaactggcaaaggagaagggtagtttgaggtgtgacaccagtttgctccagaaagtttaaggggtctgtttctcatctccatggacatcttcaacagcttcacctgacaacgactgttcctatgaagaagccacttgtgttttaagcagaggcaacctctctcttctcctctgtttcgtgaaggcaggggacacagatgggagagattgagccaagtcagccttctgttggttaatatggtataatgcatggctttgtgcacagcccagtgtgggattacagctttgggatgaccgcttacaaagttctgtttggttagtattggcatagtttttctatatagccataaatgcgtatatatacccatagggctagatctgtatcttagtgtagcgatgtatacatatacacatccacctacatgttgaagggcctaaccagccttgggagtattgactggtcccttacctcttatggctaagtctttgactgtgttcatttaccaagttgacccagtttgtcttttaggttaagtaagactcgagagtaaaggcaaggaggggggccagcctctgaatgcggccacggatgccttgctgctgcaaccctttccccagctgtccactgaaacgtgaagtcctgttttgaatgccaaacccaccattcactggtgctgactacatagaatggggttgagagaagatcagtttgggcttcacagtgtcatttgaaaacgttttttgttttgttttgtaattattgtggaaaactttcaagtgaacagaaggatggtgtcctactgtggatgagggatgaacaaggggatggctttgatccaatggagcctgggaggtgtgcccagaaagcttgtctgtagcgggttttgtgagagtgaacactttccactttttgacaccttatcctgatgtatggttccaggatttggattttgattttccaaatgtagcttgaaatttcaataaactttgctctgtttttctaaaaat

SEQ ID NO: 22438 - DNA, 2199 bp, Homo sapiens
  misc_feature 1..2199: note = ENST00000372384
  source 1..2199: mol_type = unassigned DNA; mol_type = unassigned DNA
gtcatatcccagtgctgactcccgggcgtgcagaccgctaactagctcactcgctctcagctcctgccaccgctcagccgtcacagcccaggggagcccgagagcctgagagcctgcaaaccggggagggagggagcaaaggagggagggagcaagggcgcgccctggctctccctctgccctgctgcccgcccttcctgcctccacaggcaccctggagtcccctcaggccagctcggtgggcgcgcacctgccagccgcccctgacctcgcaggccaggcgacctccgagcctgagaagatggcccagtccaagctcgattgccgctcacctgtcggcctcgactgctgcaactgctgcctggacctggcccatcggagtgggctccagcgaggcagcagcggggagaacaacaacccgggcagccctacagtgagcaactttcggcagctgcaggaaaagctggtctttgagaacctcaataccgacaagctcaacagcataatgcggcaggattcgctagagccggtgctgcgggacccctgctacctgatcaacgagggcatctgcaaccgcaacatcgaccagaccatgctctccatcctgctcttcttccacagtgcctccggagccagcgtggtggccatagacaacaagatcgaacaggccatggatctggtgaagaatcatctgatgtatgctgtgagagaggaggtggagatcctgaaggagcagatccgagagctggtggagaagaactcccagctagagcgtgagaacaccctgttgaagaccctggcaagcccagagcagctggagaagttccagtcctgtctgagccctgaagagccagctcccgaatccccacaagtgcccgaggcccctggtggttctgcggtgtaagtggctctgtcctcagggtgggcagagccactaaacttgttttacctagttctttccagtttgtttttggctccccaagcatcatctcacgaggagaactttacacctagcacagctggtgccaagagatgtcctaaggacatggccacctgggtccactccagcgacagacccctgacaagagcaggtctctggaggctgagttgcatggggcctagtaacaccaagccagtgagcctctaatgctactgcgccctgggggctcccagggcctgggcaacttagctgcaactggcaaaggagaagggtagtttgaggtgtgacaccagtttgctccagaaagtttaaggggtctgtttctcatctccatggacatcttcaacagcttcacctgacaacgactgttcctatgaagaagccacttgtgttttaagcagaggcaacctctctcttctcctctgtttcgtgaaggcaggggacacagatgggagagattgagccaagtcagccttctgttggttaatatggtataatgcatggctttgtgcacagcccagtgtgggattacagctttgggatgaccgcttacaaagttctgtttggttagtattggcatagtttttctatatagccataaatgcgtatatatacccatagggctagatctgtatcttagtgtagcgatgtatacatatacacatccacctacatgttgaagggcctaaccagccttgggagtattgactggtcccttacctcttatggctaagtctttgactgtgttcatttaccaagttgacccagtttgtcttttaggttaagtaagactcgagagtaaaggcaaggaggggggccagcctctgaatgcggccacggatgccttgctgctgcaaccctttccccagctgtccactgaaacgtgaagtcctgttttgaatgccaaacccaccattcactggtgctgactacatagaatggggttgagagaagatcagtttgggcttcacagtgtcatttgaaaacgttttttgttttgttttgtaattattgtggaaaactttcaagtgaacagaaggatggtgtcctactgtggatgagggatgaacaaggggatggctttgatccaatggagcctgggaggtgtgcccagaaagcttgtctgtagcgggttttgtgagagtgaacactttccactttttgacaccttatcctgatgtatggttccaggatttggattttgattttccaaatgtagcttgaaatttcaataaactttgctctgtttttctaaaaat

SEQ ID NO: 22439 - DNA, 1216 bp, Homo sapiens
  misc_feature 1..1216: note = ENST00000372382
  source 1..1216: mol_type = unassigned DNA; mol_type = unassigned DNA
aattgctagagctgcttttccaagacagtgtccatctctccaccaagattctccttgggctccctcccactcatcatcgccttctgcatctgcatctgcattctcctccccattttcctgcccctgaaattcggagctctgggccctggccatgcagggcagttcacatgatccacagagaacaaggcactttctctttctctgtctttccttcttgcttccctccttctggactttggggattttccatgaaaccaaagtaactatgtaagtggcagtggccttcctgtctatagtctcccacactggagtggaaccagaagggaagagagaagataagcgagaagcaaggacaaattaaaccatggcatttcagcctccttattcctccagcctcttcagaaaaagggacaatgcctccggagccagcgtggtggccatagacaacaagatcgaacaggccatggatctggtgaagaatcatctgatgtatgctgtgagagaggaggtggagatcctgaaggagcagatccgagagctggtggagaagaactcccagctagagcgtgagaacaccctgttgaagaccctggcaagcccagagcagctggagaagttccagtcctgtctgagccctgaagagccagctcccgaatccccacaagtgcccgaggcccctggtggttctgcggtgtaagtggctctgtcctcagggtgggcagagccactaaacttgttttacctagttctttccagtttgtttttggctccccaagcatcatctcacgaggagaactttacacctagcacagctggtgccaagagatgtcctaaggacatggccacctgggtccactccagcgacagacccctgacaagagcaggtctctggaggctgagttgcatggggcctagtaacaccaagccagtgagcctctaatgctactgcgccctgggggctcccagggcctgggcaacttagctgcaactggcaaaggagaagggtagtttgaggtgtgacaccagtttgctccagaaagtttaaggggtctgtttctcatctccatggacatcttcaacagcttcacctgacaacgactgttcctatgaagaagccacttgtgttttaagcagaggcaacctctctcttctcctctgtttcgtgaaggcaggggacacagatgggagagattgagccaagtcagccttctgttgg

SEQ ID NO: 22440 - DNA, 956 bp, Homo sapiens
  misc_feature 1..956: note = ENST00000506081
  source 1..956: mol_type = unassigned DNA
acatctattgaaagggtaacgacagacggagatcaactaaggtggcaggtaaggttcagaaaaggagaaggacaacaaatttggagaaataggagaagcttgtcttttccaggcaccctggagtcccctcaggccagctcggtgggcgcgcacctgccagccgcccctgacctcgcaggccaggcgacctccgagcctgagaagatggcccagtccaagctcgattgccgctcacctgtcggcctcgactgctgcaactgctgcctggacctggcccatcggagtgggctccagcgaggcagcagcggggagaacaacaacccgggcagccctacagtgagcaactttcggcagctgcaggaaaagctggtctttgagaacctcaataccgacaagctcaacagcataatgcggcaggattcgctagagccggtgctgcgggacccctgctacctgatcaacgagggcatctgcaaccgcaacatcgaccagaccatgctctccatcctgctcttcttccacagtgcctccggagccagcgtggtggccatagacaacaagatcgaacaggccatggatctggtgaagaatcatctgatgtatgctgtgagagaggaggtggagatcctgaaggagcagatccgagagctggtggagaagaactcccagctagagcgtgagaacaccctgttgaagaccctggcaagcccagagcagctggagaagttccagtcctgtctgagccctgaagagccagctcccgaatccccacaagtgcccgaggcccctggtggttctgcggtgtaagtggctctgtcctcagggtgggcagagccactaaacttgttttacctagttctttccagtttgtttttggctccccaagcatcatctcacgaggagaactttacacctagcacagctggtgccaagagatgtcctaaggacatggccac

SEQ ID NO: 22441 - DNA, 569 bp, Homo sapiens
  misc_feature 1..569: note = ENST00000514426
  source 1..569: mol_type = unassigned DNA
atgcaatcgctacatctattgaaagggtaacgacagacggagatcaactaaggtggcagccctacagtgagcaactttcggcagctgcaggaaaagctggtctttgagaacctcaataccgacaagctcaacagcataatgcggcaggattcgctagagccggtgctgcgggacccctgctacctgatcaacgagggcatctgcaaccgcaacatcgaccagaccatgctctccatcctgctcttcttccacagtgcctccggagccagcgtggtggccatagacaacaagatcgaacaggccatggatctggtgaagaatcatctgatgtatgctgtgagagaggaggtggagatcctgaaggagcagatccgagagctggtggagaagaactcccagctagagcgtgagaacaccctgttgaagaccctggcaagcccagagcagctggagaagttccagtcctgtctgagccctgaagagccagctcccgaatccccacaagtgcccgaggcccctggtggttctgcggtgtaagtggctctgtcctcagggtgggcagagccact

SEQ ID NO: 22442 - DNA, 576 bp, Homo sapiens
  misc_feature 1..576: note = ENST00000486554
  source 1..576: mol_type = unassigned DNA
gggggctggccgagcgccgtgcgccgcttgggagaaggccggaagcttaccagccgagaaggaattcctagctagcttcagagccgggtaggtttgcctgggaccttgtaggccggctgtgggggactccccgggtcgcacagccccattgtttgcatattgcccgagcaggccacggtggcctgcgcgccccaggactcgcaagcagctccgatcggttggaactcggggcggcggcagcagcgctgagccggcctggatgaggagatgcagcttcctgcaggggccaaggaaggatctggggacaaactgtccggaactctgggccagggaggcgagaaggagagagagaggaagagccgaggcagatggaggactttggccacaactgccatgtactcaagagtagaaccgagtgggtaatgggtcgctttgctttttgtcttggcagtgcctccggagccagcgtggtggccatagacaacaagatcgaacaggccatggatctggtgaagaatcatctgatgtatgctgtgagagaggaggtggagatcctgaaggagcagatccgagagc

SEQ ID NO: 22443 - DNA, 551 bp, Homo sapiens
  misc_feature 1..551: note = ENST00000503515
  source 1..551: mol_type = unassigned DNA
gagtctgggttggactggcggccgtggagtttgtgacatacgaggtgacacccctcgagtcacttcccttcaactccagctggagcgcctgcttggctttgggttcgttctgcagccttcgccccgctcctagcctcagggccggactccagcgcagagcccagcccagcgcagcctgccagcagccacccagccgcccagccgcccagccccgcacgaaacccggccagagcttcctagcagcccgagccatgaacaccgaaatgtatcagacccccatggaggtggcggtctaccagctgcacaatttctccatctccttcttctcttctctgcttggaggggatgtggtttccgttaagctggacaacagtgcctccggagccagcgtggtggccatagacaacaagatcgaacaggccatggtgagtggcatcactgcgtcattctcatcccctgacttagctgctgcttatgtaactctgggcaggattgagggaatgggtgaaaaagcccttagccaaaaccctgaggaagccgacagcctgcct

SEQ ID NO: 22444 - DNA, 802 bp, Homo sapiens
  misc_feature 1..802: note = ENST00000514897
  source 1..802: mol_type = unassigned DNA
gctgctctatttcaaaggccagacttgtgaatgaaggagccgatgcgggggtggggagtactgactgaaatgtaagtcagttttacgtgaaaactgaacgtcatgaaaagtttagttttttcagacactaatcgttatttaatcctacacatttaaagtattccaagtctctgagtcctgagaaaccctggaaacccaccacttgcccacccagaacatccctccatcttacagagctggggcacgcccctcaggcctgtgaacatgcaatcgctacatctattgaaagggtaacgacagacggagatcaactaaggtggcagcttgtcttttccaggcaccctggagtcccctcaggccagctcggtgggcgcgcacctgccagccgcccctgacctcgcaggccaggcgacctccgagcctgagaagatggcccagtccaagctcgattgccgctcacctgtcggcctcgactgctgcaactgctgcctggacctggcccatcggagtgggctccagcgaggcagcagcggggagaacaacaacccgggcagccctacagtgagcaactttcggcagctgcaggaaaagctggtctttgagaacctcaataccgacaagctcaacagcataatgcggcaggattcgctagagccggtgctgcgggacccctgctacctgatcaacgagggcatctgcaaccgcaacatcgaccagaccatgctctccatcctgctcttcttccacagtgcctccggagccagcgtggtggccatagacaacaagatcgaacaggccatgg

SEQ ID NO: 22445 - DNA, 546 bp, Homo sapiens
  misc_feature 1..546: note = ENST00000480691
  source 1..546: mol_type = unassigned DNA
agggtaacgacagacggagatcaactaaggtggcaggtaaggttcagaaaaggagaaggacaacaaatttggagaaataggagaaggcaccctggagtcccctcaggccagctcggtgggcgcgcacctgccagccgcccctgacctcgcaggccaggcgacctccgagcctgagaagatggcccagtccaagctcgattgccgctcacctgtcggcctcgactgctgcaactgctgcctggacctggcccatcggagtgggctccagcgaggcagcagcggggagaacaacaacccgggcagccctacagtgagcaactttcggcagctgcaggaaaagctggtctttgagaacctcaataccgacaagctcaacagcataatgcggcaggattcgctagagccggtgctgcgggacccctgctacctgatcaacgagggcatctgcaaccgcaacatcgaccagaccatgctctccatcctgctcttcttccacagtgcctccggagccagcgtggtggccatagacaacaagatcgaacaggc

SEQ ID NO: 22446 - DNA, 581 bp, Homo sapiens
  misc_feature 1..581: note = ENST00000510887
  source 1..581: mol_type = unassigned DNA
agagagaaggaaggggaggactgaggagagacggcgaaggggcagagggaaaccgggacagagactgcctctgaggggttcagggaagagaggacacagcgagctggggaaaggagcttgtcttttccaggcaccctggagtcccctcaggccagctcggtgggcgcgcacctgccagccgcccctgacctcgcaggccaggcgacctccgagcctgagaagatggcccagtccaagctcgattgccgctcacctgtcggcctcgactgctgcaactgctgcctggacctggcccatcggagtgggctccagcgaggcagcagcggggagaacaacaacccgggcagccctacagtgagcaactttcggcagctgcaggaaaagctggtctttgagaacctcaataccgacaagctcaacagcataatgcggcaggattcgctagagccggtgctgcgggacccctgctacctgatcaacgagggcatctgcaaccgcaacatcgaccagaccatgctctccatcctgctcttcttccacagtgcctccggagccagcgtggtggccatagacaacaagat

SEQ ID NO: 22447 - DNA, 567 bp, Homo sapiens
  misc_feature 1..567: note = ENST00000502650
  source 1..567: mol_type = unassigned DNA; mol_type = unassigned DNA
aagggtgcgggcggggtggggcgaggggtggagggacaggatccagccgctcggggcccccgcccgccagccggagaagtggcggaggaccgttctccgccgtcccctctaggcttgtcttttccaggcaccctggagtcccctcaggccagctcggtgggcgcgcacctgccagccgcccctgacctcgcaggccaggcgacctccgagcctgagaagatggcccagtccaagctcgattgccgctcacctgtcggcctcgactgctgcaactgctgcctggacctggcccatcggagtgggctccagcgaggcagcagcggggagaacaacaacccgggcagccctacagtgagcaactttcggcagctgcaggaaaagctggtctttgagaacctcaataccgacaagctcaacagcataatgcggcaggattcgctagagccggtgctgcgggacccctgctacctgatcaacgagggcatctgcaaccgcaacatcgaccagaccatgctctccatcctgctcttcttccacagtgcctccggagccagcgtggtggccata

SEQ ID NO: 22448 - DNA, 521 bp, Homo sapiens
  misc_feature 1..521: note = ENST00000506724
  source 1..521: mol_type = unassigned DNA; mol_type = unassigned DNA
gcgtgcgtatttctggcggaggatgcgccatgagcgctgaaagagcctgaaccgaagcgtccggctcgccgagagagtgagagccgggccggctcccaggagcgcgggcgaggcttgtcttttccaggcaccctggagtcccctcaggccagctcggtgggcgcgcacctgccagccgcccctgacctcgcaggccaggcgacctccgagcctgagaagatggcccagtccaagctcgattgccgctcacctgtcggcctcgactgctgcaactgctgcctggacctggcccatcggagtgggctccagcgaggcagcagcggggagaacaacaacccgggcagccctacagtgagcaactttcggcagctgcaggaaaagctggtctttgagaacctcaataccgacaagctcaacagcataatgcggcaggattcgctagagccggtgctgcgggacccctgctacctgatcaacgagggcatctgcaaccgcaacatcgaccagaccatgctctccat

SEQ ID NO: 22449 - DNA, 425 bp, Homo sapiens
  misc_feature 1..425: note = ENST00000505965
  source 1..425: mol_type = unassigned DNA; mol_type = unassigned DNA
tctatttcaaaggccagacttgtgaatgaaggagccgatgcgggggtggggagtactgactgaaatcttgtcttttccaggcaccctggagtcccctcaggccagctcggtgggcgcgcacctgccagccgcccctgacctcgcaggccaggcgacctccgagcctgagaagatggcccagtccaagctcgattgccgctcacctgtcggcctcgactgctgcaactgctgcctggacctggcccatcggagtgggctccagcgaggcagcagcggggagaacaacaacccgggcagccctacagtgagcaactttcggcagctgcaggaaaagctggtctttgagaacctcaataccgacaagctcaacagcataatgcggcaggattcgctagagccggtgctgcgggacccctgctacctga

SEQ ID NO: 22450 - DNA, 503 bp, Homo sapiens
  misc_feature 1..503: note = ENST00000502961
  source 1..503: mol_type = unassigned DNA; mol_type = unassigned DNA
aaaggccagacttgtgaatgaaggagccgatgcgggggtggggagtactgactgaaattattccaagtctctgagtcctgagaaaccctggaaacccaccacttgcccacccagaacatccctccatcttacagagctggggcacgcccctcaggcctgtgaacatgcaatcgctacatctattgaaagggtaacgacagacggagatcaactaaggtggcagcttgtcttttccaggcaccctggagtcccctcaggccagctcggtgggcgcgcacctgccagccgcccctgacctcgcaggccaggcgacctccgagcctgagaagatggcccagtccaagctcgattgccgctcacctgtcggcctcgactgctgcaactgctgcctggacctggcccatcggagtgggctccagcgaggcagcagcggggagaacaacaacccgggcagccctacagtgagcaactttcggcagctgcaggaaaagctggtctttgag

SEQ ID NO: 22451 - DNA, 474 bp, Homo sapiens
  misc_feature 1..474: note = ENST00000369517
  source 1..474: mol_type = unassigned DNA; mol_type = unassigned DNA
atgactgctctctttctgatgtccatgctttttggccttacatgtgggcaagcgatgtctttttgtattccaactgagtatacaatgcacatcgaaaggagagagtgtgcttattgcctaaccatcaacaccaccatctgtgctggatattgtatgacacgggatatcaatggcaaactgtttcttcccaaatatgctctgtcccaggatgtttgcacatatagagacttcatctacaggactgtagaaataccaggatgcccactccatgttgctccctatttttcctatcctgttgctttaagctgtaagtgtggcaagtgcaatactgactatagtgactgcatacatgaagccatcaagacaaactactgtaccaaacctcagaagtcttatctggtaggattttctgtctaatagtgatataatttgcaatttggttaaatgtgcttgcctgaaataaagctaataaaa

SEQ ID NO: 22452 - DNA, 537 bp, Homo sapiens
  misc_feature 1..537: note = ENST00000256592
  source 1..537: mol_type = unassigned DNA; mol_type = unassigned DNA
gggtcaccacagcatctgctcaccaatgcaaagtaagcatgactgctctctttctgatgtccatgctttttggccttacatgtgggcaagcgatgtctttttgtattccaactgagtatacaatgcacatcgaaaggagagagtgtgcttattgcctaaccatcaacaccaccatctgtgctggatattgtatgacacgggatatcaatggcaaactgtttcttcccaaatatgctctgtcccaggatgtttgcacatatagagacttcatctacaggactgtagaaataccaggatgcccactccatgttgctccctatttttcctatcctgttgctttaagctgtaagtgtggcaagtgcaatactgactatagtgactgcatacatgaagccatcaagacaaactactgtaccaaacctcagaagtcttatctggtaggattttctgtctaatagtgatataatttgcaatttggttaaatgtgcttgcctgaaataaagctaataaaaatattatgtttcacattatcttctg

SEQ ID NO: 22453 - DNA, 12187 bp, Homo sapiens
  misc_feature 1..12187: note = ENST00000371497
  source 1..12187: mol_type = unassigned DNA; mol_type = unassigned DNA
gtgtgtgtgtgcgagggtgtgtgtgtgtgtttgtgtgtgtgtgcatatgtggggggtgtgagtgtgtgtgtgcgaggaagcgggggtgcgtgcgcgtgtgagtgcgtgtgtgagtgtctgtgtgtgtgtctgtgtgtgtgtgtgagtgagtgaattccagattttctgtctttccaaaacccgctcctgtcctctcgcatatcactcacagacggggatctgacagcagccacaaacctacagtgagtgatcgctctccccccggcacgaatccgccatagagatcggcgaggaggaggaggaggaggaggaagaaaagaaggaggaggtggaggaggaggtggaggaggaggaggaggagggaaagaggagaaggaagaagaagaaaaagaagaaacccactaccttcccaggattgccttttttttttccttatctttacgcgcgagtgtgcctgtggcgcgtgtgcgcccctcgtcccttccatccgaacccgggcttggatgtttaataaagaaatcaagtgtctcaacagtcaccaaaaaaaaaaaaaaccgcaaaaacaaaaccaaaaaaattccaaaagcaaaaacaaaaaagagagaggaaaaaaaattcaaaataaacaaacaaacaaacaaggcagaaccaacctctacttcaaagcagccggcacaagccacccgtgtctgccacccagagaggggggtctctggcccgtggtggaggagttgcaggggggatcgtcagggggacagaggccgagtgacgtcctaggagccaccgggcaagaggcggaggagacccagagaggccagagagacagcgggccccagcgcgcggctcggggctggggcgccagaagtgggactggagcgaagtagaggatgccgaggagaaaacagcaggcacccaagcgggcggcaggctacgcccaggaggaacagctgaaagaagaggaggaaataaaagaagaggaggaggaggaggacagcggttcagtagctcaactgcagggtggcaatgacacagggacggacgaggagctagaaacgggcccagagcaaaaaggctgcttcagctaccagaactctccaggaagtcatttgtccaatcaggatgccgagaacgagtctctgctgagtgacgccagtgatcaggtgtcggacatcaagagtgtctgcggcagagatgcctcagacaagaaagcacacactcacgtcaggcttccaaacgaagcacacaattgcatggataaaatgaccgctgtctacgccaacatcctgtcggattcctactggtcaggcctgggccttggcttcaagctgtccaatagtgagaggaggaactgtgacacccgaaacggcagcaacaagagtgattttgattggcaccaagacgctctgtccaaaagcctgcagcagaacttgccttctcggtccgtctcgaaacccagcctgttcagctcggtgcagttgtaccgacagagcagcaagatgtgcgggactgtgttcacaggggccagcagattccgatgccgacagtgcagcgcggcctatgacaccctagtcgagctgactgtgcacatgaatgaaacgggccactatcaagatgacaaccgcaaaaaggacaagctcagacccacgagctattcaaagcccaggaaaagggctttccaggatatggacaaagaggatgctcaaaaggttctgaaatgtatgttttgtggcgactcctttgattccctccaagatttgagcgtccacatgattaaaacaaaacattaccaaaaagtgcctttgaaggagccagtcccaaccatttcctcgaaaatggtcaccccggctaagaaacgcgtttttgatgtcaatcggccgtgttcccccgattcaaccacaggatcttttgcagattctttttcttctcagaagaacgccaacttgcagttgtcctccaacaaccgctatggctaccaaaatggagccagctacacctggcagtttgaggcctgcaagtcccagatcttaaagtgcatggagtgtgggagctcccatgacaccttgcagcagctcaccacccacatgatggtcacaggtcactttctcaaggtcaccagctctgcctccaagaaagggaagcagctggtattagacccgttagcagtggagaaaatgcagtcgttgtctgaggccccaaacagtgattctctggctcccaagccatccagtaactcagcatcagattgtacagcctctacaactgagttaaagaaagagagtaaaaaagaaaggccagaggaaaccagcaaggatgagaaagtcgtgaaaagcgaggactatgaagatcctctacaaaaacctttagaccctacaatcaaatatcaatacctaagggaggaagacttggaagatggctcaaagggtggaggggacattttgaaatctttggaaaatactgtcaccacagccatcaacaaagcccaaaacggggcccccagctggagtgcctaccccagcatccacgcagcctaccagctgtctgagggcaccaagccgcctttgcctatgggatcccaggtactgcagatccggcctaatctcaccaacaagctgaggcccattgcaccaaagtggaaagtgatgccactggtttctatgcccacacacctggccccttacactcaagtcaagaaagagtcagaagacaaagatgaagcggtgaaggagtgtgggaaagaaagtccccacgaagaggcctcatctttcagccacagtgagggcgattctttccgcaaaagtgaaacacctccagaagccaaaaagaccgagctgggtcccctgaaggaggaggagaagctgatgaaagagggcagcgagaaggagaaaccccagcccctggagcccacatctgctctgagcaatgggtgcgccctcgccaaccacgccccggccctgccatgcatcaacccactcagcgccctgcagtccgtcctgaacaatcacttgggcaaagccacggagcccttgcgctcaccttcctgctccagcccaagttcaagcacaatttccatgttccacaagtcgaatctcaatgtcatggacaagccggtcttgagtcctgcctccacaaggtcagccagcgtgtccaggcgctacctgtttgagaacagcgatcagcccattgacctgaccaagtccaaaagcaagaaagccgagtcctcgcaagcacaatcttgtatgtccccacctcagaagcacgctctgtctgacatcgccgacatggtcaaagtcctccccaaagccaccaccccaaagccagcctcctcctccagggtcccccccatgaagctggaaatggatgtcaggcgctttgaggatgtctccagtgaagtctcaactttgcataaaagaaaaggccggcagtccaactggaatcctcagcatcttctgattctacaagcccagtttgcctcgagcctcttccagacatcagagggcaaatacctgctgtctgatctgggcccacaagagcgtatgcaaatctctaagtttacgggactctcaatgaccactatcagtcactggctggccaacgtcaagtaccagcttaggaaaacgggcgggacaaaatttctgaaaaacatggacaaaggccaccccatcttttattgcagtgactgtgcctcccagttcagaaccccttctacctacatcagtcacttagaatctcacctgggtttccaaatgaaggacatgacccgcttgtcagtggaccagcaaagcaaggtggagcaagagatctcccgggtatcgtcggctcagaggtctccagaaacaatagctgccgaagaggacacagactctaaattcaagtgtaagttgtgctgtcggacatttgtgagcaaacatgcggtaaaactccacctaagcaaaacgcacagcaagtcacccgaacaccattcacagtttgtaacagacgtggatgaagaatagctctgcaggacgaatgccttagtttccactttccagcctggatcccctcacactgaacccttcttcgttgcaccatcctgcttctgacattgaactcattgaactcctcctgacaccctggctctgagaagactgccaaaaaaaaaaaaaaaaaaaaatcaccccagccatttctcttcatcctcactaacaatttggtaatgaagtattgatttccacttctctgcttatgggcggtattagattttcattgataaattgcaatggggctgtctcgtctccacagtacccttttcactgtcacaagaaaacaaagtgccaccgaagaaaagtaatgactgagagcattgatgtacttattttgtcagtttgtaacaggaaagtgggggggagtctaagtcttcatagtctaatgtccaagtgggttgcactagatgtagacacttggaggcttacttttcatggtaatgtccatttcctatttataacccctctgggaacgtttgtctaaaggaaatgtttctgttcagtgtaacaattacagttgcacctggattgcccagtcctgcccctgcactaggggaccattaatcactgcaaagtagaagaattattaagttaaaccagagtttgagccaagaaaacccctgaacaatgttcatcttctgtgaaacttgctcaaatagttaagcttaaccatgttgctgccaaagacttttcctatgcagtggtggggcaccttgatcatcatcattatcttgattggctgaaaaaaaaatagttttaagcacacaccactgtctatgagaactgcaaattgggagaataggtgaaatgcagaatctgagagaacgcgagaagatgagatcattacagggtggaaagttctgcagcagccttttctggtaatccctttctgcagaacctgatgtttatgggctctaaaacgcagcttagctttagaagcaacagaaagcatgaaatagggtgtccattttaaatgtgttcctgcaacttttttcattaaaactttgagggcccaattttaatttgtggaatattcccgttaataatgagatctaattaagacatccattaaaagcccgttaaagttaatttaacgtaaaaattccaatagaactgtattagattttctccattaaattaacgttatggatttttaacggatgtcttaattatacgttattattaacgggaatactgtattacacagattaaaatcaggtcctaagtcaacttggaagagctaagagcatgttttaatattaaaagtcttgcatacctagtgcacagtttggagacgcaaggatagatctgtttactctagttgaacattttctatacaattgaaagcaacctataatagataaatccatcattgcatttaaacaatgaatttccttattctcaaaggacaaatacgtctggattatgtggtaaattgctactcagctatggtgaaatatttatactattctaggcacaacactaggaactaggtgattctgaaacaaaaggaatattttctgttgttgctttaattaccaaggttatttttttttaatctcaacactgacaaaatgaaaccaaatatctcttcctcaccatttctcaaggaggctgcctgttggaattgttttggaaattttgacatgatccctaaattcaacattgggattaaaaaaaaaaaaaaacttcttatttacctcctagggaaagtgttgcccttatgccacatataatagcaaattgctttttttatggcatgcataacctagatgggaaaaaatatggcgcttcggggaaggagggaaaaagtaaatgaagttccaggaatgtcattctgaagtaatgaggcatggacagaaaatatacccctcacatcatcggattgagatggcagtcgaaatagcttcattgaagtgtcagcactcatccatcaatcaatcacccacaaggaaaaatagcaacagtacaacggggtggcttttatgggatttactcatgggcatagggaatagcggctcaaatgtagttctgacatgaaaagcaaggtgctgatattattttttatgatgggaggatcataaagtgaattgagaacagtgaggtctgtctttgcttaacctattcaaccagaaatgaatggagctcgactggaaaggaacagtcttcagatgggttaagattgaagggtggactggactctactgagcaccgtccttcaacaaggaaattctattaaaggaaaatcaatgcattagtattggggttctcgtagctgttaaaaattgtctgctccaatccagggttattaggccaaagttacataattcagatctcactgcaaccatccaaaagtggattctcgagcccttgctccaatggggggaggagatcaatacaattcccaattccatggaaattgtttcccttctaaggaagaaaaaataaatcatctgcttcaacatataatcgatatggttttgttagcgtaatttctatggtgggtggggtgggaggtgagagaaaaaaatattgataaatttggtaagacaggtgaattgccgcctggcaaccgtgcatgtcactgccgagggatggctgctaaggttcaccttagaaaacaagatctgggctggcactggggcatacatcaccactcagcatattcctagaggccaggcctgtcttcactcagccagccctctgaggcttctagaaacttctttctggaggaaaaaaactaaataacataaactcaggagaatgtctttacccaccttcataccactgctttctttttgctgaataaaacacagttctgataagtaagaactttagaattggaaaggaggctgacatgcaaatataatgcaaattaccctcaagtatcgccattcttccaccacctcttggtaccagtgagagcgagagattgccttttcttccccatccctccttccagctaagaccaccaaccagctgcaaattgagatgtccatttaaaaatttatatgtcaatatttaaatgttacatatttggccctattttgtagttcagcaaatcctccaaatacacagcatgttacaaggcactggtggcacagggcacaacaggaaatgatatttatttagcaaattcatttaacaaatattattgggcacctgttatgtgagacactgtcctaggcactgtgggataacaacagcaaacacttcacacaacagcctggccttcctgtgttttacaacagctcctaaagatagctgatatcaagacatttgagggacacagttcatgtagaatcaaaatattagtatttcagaataaggattttttttctgaaaagcatacagagaggaaacagcttaaaaataggtcaagacctaaaaacagaatataatcacggaataaactggataacccagacagtccccacagaatttctttcaggtcacagatttcttaaaactcacccccaaaatgtgcctgcttggttgtttgaatcttgcataattaatgtcacaggcgcaagccgctgaacttagttgagatgcagaaaacaaacaaatgcaatgacatatctgagaagcatttatgtaactccggttaagtggtgaggaggggtgtgtgaagacagtgtgcatgcatgagtgtgtattcatatatatgtgtatacatatgaatttcactgttattttccagggtctatggacaatgtggcagtaagagtctatgatgttctgaaacttttcacagtaaatccaaagattacagaccttacaaggtgcttgcattctgttgcttttccatctgtcacttctcaggttatttgactgtgttcaaaccttcttttctttttcattgagtttcattttttaagcttgttaaatgcttttgtttaaaaaaaaaaaaaaaaccccaaatgtcatttttcacattatcctctcttctctgcaacaaggatagtaagatgtagatgaatgcaaaaataataacaacaataaggaaatatattaaagctttaaaatatgcacatatgtagttctaaagagcaataacggtagtatctatttcgaacatgcattaggcaaaaaagaaatcaaaactgaaattttcgtgtatttttccccttgtaagatgttcaaatgctaacttcattttctcctttcctctatgtggcactttctcaaaatatctatgaaatacttttagacaaagattgagctggagaaagagatacaaatttccatccccccagacagagagacatatttccattgtaggaaggcattaaacattttgaaacttgtgaatcatctttagaatttctactggggaattttacttcttcatccaaagtaaaagccacttatctcctttggttcccagtgacagattcagaggcatacgcagatatacaattttcaggctctagttaatcttcttccaatagttacgaacaatgggctaacaggcgtgggtgtttctccaaaaattattcatgcacaaggcagcccaaagcttcagggaaaactagaaatgtgttatggattagaataggactgttttaaaatgctagtaccaggtggaacgctatttctgcaacaggactctgtccatttcctttggaacaatatattccaagtaaaatggctcttccaaggaatgacacctttacttgacacccttcggcatacaaatgattttaccaatagccatgattattattaaggccttttaaaatacaggctgtttgaaaaaagacagattaaatattcacagcctttgtatcatggttatttgcttaaaacagcttttagaagtacaagtaataactttttgataagaaaccccaggagaaactttttggtaagaaacctcaaaaaatttgaacaaaggcattacaaaaaaaaaaaaaaaactaaccactccattcaactctctcagaaaataaatttcaatgtgttcaatgaattgtcttgaacctgaaacctgcatttagatatcagtcccctgccaatagctaatattaacagaatttgaacaatcatacaattatgtctcaaatgtgaagactttgtacagtaatattttcactttctaaatgacccatataacattcaggaattatagatgtgtatgtatattttttaagtacagaaagttcagccagtcttcagagaagtaaaagtgatgtctattgtgcattgaagtaaatattacaaacattccagtttcgcaatacaatacttgagctttcgaacacctcagacactagaatgtgtaatgcgagtcaaaaaagctgacatacaaaacaattcccatttggctcagggttcctaaatgtcacaatatcttgggtaaaatatactttttgatttcctgatgatgtccttctaatcccttctgactttgattcctaacagccaggcactgttgacatgaatcattaacttccaaacccctttaaaatcaagaagctaggtgatcatacagtcatttcaatggccaaccagttcttgctctacagagcttttacacctttttgggaaacctgatatcaaacacatttatgttatatatttgctcccttgcattaattctagatttttttttaatttcttttagaaagggcaggggggaagtgggtcagagcaaggttcaagaatcacattcatccttgctctaaagtgtttacttgccagcaaagaaaggcaaacacatttttatattcagaaagcagaccggtcattttcaaagaaaaatgactgcaaccatgcctgtagaatgtttctgtgcaagcgcactaattttctatcacctgcatgctgtatataatacatttgcctgtatactaggaagaaaaaccaggctgttttccctgagtacaatgcagcttggatggctgggagcgtaagccttccgtgcatttttatagtgtacatatttgtatatactaactatatcgccatgtatgaacacagattttgttatatttgcttgtttctgtttcctaccaaactggcccacaatggggattcttttgtatagaaaaaatatgcttgtaattttttcctggtcattctctttcaatagcttatgaaagaattagatctgagtttacaaagaaactataagaaccaagtttgtctgtctgcatgagtcccgtccaattgctggatctagggaggaaccaacttcctaattcagagttttccttttaaaggcatgctttacccccatgggaaaactgcacactcatccatgtagaattattctctttgtattttatctaatagtgcctgaaaatttttttaatgtcttcttagaagaagaattcataattgtcaaaatttgaaacattagcttaattttgtttttatgacctcaagattcttctccttatttattcggttgctgttgtaatggggccccaggccattcctgacatcggcgtgttcttcttctgcattaaggatgtttttgaaattacagagattattgagccaacaggctgttttaatcaaaaccatgtttcacttctttttgatgattataaattgtccttgcaatgaaaaaaaaaaaagaacttttctgctaggaagattataccaccctgtggccaaacagattcatcacagataggcatctatgcccatttctctgggatctggaaaattcttcccttggctgaccccaatttcttttactccccattatcctgaatattagctttcaatgcagtcactatttgacatttccaaaggctttgccgcattgtcactgcccaaagacaaacaaccactggaaatgatggctttcctgcttgaaacgaagggggccaggtgcagtggctcaagcctgtaacccctgcactttggaaggctgaggcaggcggatcacttgaggtcaggagtttcagaccaacctggccaacatggcaaaacctcgtctctactaaaaatacaaaaaacattagcagggcatggtggtgcgtgcctgtagtcccagctacttgggaggctgaggcaagagaattgcttgagcccgggaggcgaaggttgcagtgagctgagatggtgccactgcactccagcctgggcaacagagcaagactgtgtctcaaaaaaaaaaaaaagaatggattttcagaaaaagtgctccctttcctgtcctgtggtgccaccatcctgtcctccttcgtaatcatgaacaatctgatcttgaactcccacataacttaaatcaggcaaaaagaaacattcacagcgtccccttgctgaataaaaatgactttgtttggaggcacttaagatgtatgcctgtgtgtggtgccgcagcattgaaattatctgtagaaggggaattttttttaaaaatacaattttatcactagaaataaattccgatggtggaaacgaagaaaacccttaaattatatcacaaaagccattattttttgcatccaaagagtttttttttttaaggaaaatcattctactttgagaactgtaattaaagccctaaataacagacactactttgttgagctattgtgaaaaaaaaacaacacattcgccaaggttatatggagcccctgatttccatcaaaaaggtttctataagtatattatttacatttttatacatgataactcttgcctttgtgttgaaaaaaaaaaagtctcttttttttcccccactcagcagttattggaaatagactgttcccatctgaaaccgtatcgtaatttgcatcaggaaacccaactgctgacattgaggacctgggtgtgttcaattatgattttgctggaggctgtccctcattttaatgctgcagctattgaaccaccttcctgaaacctagctgatacggaatagcagagacatgcctctcaacaccattagctttgcaaatggcttcatttcagtcaacgtcgacttctgctttggccaattgaaaaatgaaaattaaaggagagaagaaaaaaaacacagatgcacttaaaacatgaaaagaattatttatatgataaaaatatatttagcttttcaaagcacaagactgaatagaagtgctctttttatgctttctggagatgttactgttaaatgtctttctacatcaggcttaataaatctgtaatgacatttgatggattga

SEQ ID NO: 22454 - DNA, 3803 bp, Homo sapiens
  misc_feature 1..3803: note = ENST00000603338
  source 1..3803: mol_type = unassigned DNA; mol_type = unassigned DNA
atttatttttctagaacacacccgacatgtaggctctattgcaatacatctgaaaacacaaaatctgtttgctccaaaattggtgatagcctctgacttaagatgatggtggccaggcgaggtggttcaagcctgtgattccagcactttgggaggccgaggcaggcagatcagatcatgaggtcaggagttcaagaccagcctggccaacatggtgaaacctcaggaggctgaggcaggagaattccttgaactgggacccaggaggcagaggttgcagtgagctgagatcacgccactgcactccagctggggatacagagcaagactccatctcaaaaaaagaaaaaaaagaaagaaaagatgatggctgctgcgttgctccattatacaggctacgcccaggaggaacagctgaaagaagaggaggaaataaaagaagaggaggaggaggaggacagcggttcagtagctcaactgcagggtggcaatgacacagggacggacgaggagctagaaacgggcccagagcaaaaaggctgcttcagctaccagaactctccaggaagtcatttgtccaatcaggatgccgagaacgagtctctgctgagtgacgccagtgatcaggtgtcggacatcaagagtgtctgcggcagagatgcctcagacaagaaagcacacactcacgtcaggcttccaaacgaagcacacaattgcatggataaaatgaccgctgtctacgccaacatcctgtcggattcctactggtcaggcctgggccttggcttcaagctgtccaatagtgagaggaggaactgtgacacccgaaacggcagcaacaagagtgattttgattggcaccaagacgctctgtccaaaagcctgcagcagaacttgccttctcggtccgtctcgaaacccagcctgttcagctcggtgcagttgtaccgacagagcagcaagatgtgcgggactgtgttcacaggggccagcagattccgatgccgacagtgcagcgcggcctatgacaccctagtcgagctgactgtgcacatgaatgaaacgggccactatcaagatgacaaccgcaaaaaggacaagctcagacccacgagctattcaaagcccaggaaaagggctttccaggatatggacaaagaggatgctcaaaaggttctgaaatgtatgttttgtggcgactcctttgattccctccaagatttgagcgtccacatgattaaaacaaaacattaccaaaaagtgcctttgaaggagccagtcccaaccatttcctcgaaaatggtcaccccggctaagaaacgcgtttttgatgtcaatcggccgtgttcccccgattcaaccacaggatcttttgcagattctttttcttctcagaagaacgccaacttgcagttgtcctccaacaaccgctatggctaccaaaatggagccagctacacctggcagtttgaggcctgcaagtcccagatcttaaagtgcatggagtgtgggagctcccatgacaccttgcagcagctcaccacccacatgatggtcacaggtcactttctcaaggtcaccagctctgcctccaagaaagggaagcagctggtattagacccgttagcagtggagaaaatgcagtcgttgtctgaggccccaaacagtgattctctggctcccaagccatccagtaactcagcatcagattgtacagcctctacaactgagttaaagaaagagagtaaaaaagaaaggccagaggaaaccagcaaggatgagaaagtcgtgaaaagcgaggactatgaagatcctctacaaaaacctttagaccctacaatcaaatatcaatacctaagggaggaagacttggaagatggctcaaagggtggaggggacattttgaaatctttggaaaatactgtcaccacagccatcaacaaagcccaaaacggggcccccagctggagtgcctaccccagcatccacgcagcctaccagctgtctgagggcaccaagccgcctttgcctatgggatcccaggtactgcagatccggcctaatctcaccaacaagctgaggcccattgcaccaaagtggaaagtgatgccactggtttctatgcccacacacctggccccttacactcaagtcaagaaagagtcagaagacaaagatgaagcggtgaaggagtgtgggaaagaaagtccccacgaagaggcctcatctttcagccacagtgagggcgattctttccgcaaaagtgaaacacctccagaagccaaaaagaccgagctgggtcccctgaaggaggaggagaagctgatgaaagagggcagcgagaaggagaaaccccagcccctggagcccacatctgctctgagcaatgggtgcgccctcgccaaccacgccccggccctgccatgcatcaacccactcagcgccctgcagtccgtcctgaacaatcacttgggcaaagccacggagcccttgcgctcaccttcctgctccagcccaagttcaagcacaatttccatgttccacaagtcgaatctcaatgtcatggacaagccggtcttgagtcctgcctccacaaggtcagccagcgtgtccaggcgctacctgtttgagaacagcgatcagcccattgacctgaccaagtccaaaagcaagaaagccgagtcctcgcaagcacaatcttgtatgtccccacctcagaagcacgctctgtctgacatcgccgacatggtcaaagtcctccccaaagccaccaccccaaagccagcctcctcctccagggtcccccccatgaagctggaaatggatgtcaggcgctttgaggatgtctccagtgaagtctcaactttgcataaaagaaaaggccggcagtccaactggaatcctcagcatcttctgattctacaagcccagtttgcctcgagcctcttccagacatcagagggcaaatacctgctgtctgatctgggcccacaagagcgtatgcaaatctctaagtttacgggactctcaatgaccactatcagtcactggctggccaacgtcaagtaccagcttaggaaaacgggcgggacaaaatttctgaaaaacatggacaaaggccaccccatcttttattgcagtgactgtgcctcccagttcagaaccccttctacctacatcagtcacttagaatctcacctgggtttccaaatgaaggacatgacccgcttgtcagtggaccagcaaagcaaggtggagcaagagatctcccgggtatcgtcggctcagaggtctccagaaacaatagctgccgaagaggacacagactctaaattcaagtgtaagttgtgctgtcggacatttgtgagcaaacatgcggtaaaactccacctaagcaaaacgcacagcaagtcacccgaacaccattcacagtttgtaacagacgtggatgaagaatagctctgcaggacgaatgccttagtttccactttccagcctggatcccctcacactgaacccttcttcgttgcaccatcctgcttctgacattgaactcattgaactcctcctgacaccctggctctgagaagactgccaaaaaaaaaaaaaaaaaaaaatcaccccagccatttctcttcatcctcactaacaatttggtaatgaagtattgatttccacttctctgcttatgggcggtattagattttcattgataaattgcaatggggctgtctcgtctccacagtacccttttcactgtcacaagaaaacaaagtgccaccgaagaaaagtaatgactgaga

SEQ ID NO: 22455 - DNA, 980 bp, Homo sapiens
  misc_feature 1..980: note = ENST00000605656
  source 1..980: mol_type = unassigned DNA; mol_type = unassigned DNA
agaaaaggccggcagtccaactggaatcctcagcatcttctgattctacaagcccagtttgcctcgagcctcttccagacatcagagggcaaatacctgctgtctgatctgggcccacaagagcgtatgcaaatctctaagtttacgggactctcaatgaccactatcagtcactggctggccaacgtcaagtaccagcttaggaaaacgggcgggacaaaatttctgaaaaacatggacaaaggccaccccatcttttattgcagtgactgtgcctcccagttcagaaccccttctacctacatcagtcacttagaatctcacctgggtttccaaatgaaggacatgacccgcttgtcagtggaccagcaaagcaaggtggagcaagagatctcccgggtatcgtcggctcagaggtctccagaaacaatagctgccgaagaggacacagactctaaattcaagtgtaagttgtgctgtcggacatttgtgagcaaacatgcggtaaaactccacctaagcaaaacgcacagcaagtcacccgaacaccattcacagtttgtaacagacgtggatgaagaatagctctgcaggacgaatgccttagtttccactttccagcctggatcccctcacactgaacccttcttcgttgcaccatcctgcttctgacattgaactcattgaactcctcctgacaccctggctctgagaagactgccaaaaaaaaaaaaaaaaaaaaatcaccccagccatttctcttcatcctcactaacaatttgggtctatggacaatgtggcagtaagagtctatgatgttctgaaacttttcacagtaaatccaaagattacagaccttacaaggtgcttgcattctgttgcttttccatctgtcacttctcaggttatttgactgtgttcaaaccttcttttctttttcattgagtttcattttttaagcttgttaaatgcttttgttt

SEQ ID NO: 22456 - DNA, 670 bp, Homo sapiens
  misc_feature 1..670: note = ENST00000626626
  source 1..670: mol_type = unassigned DNA; mol_type = unassigned DNA
cggggaaggagggaaaaagtaaatgaagttccaggaatgtcattctgaagtaatgaggcatggacagaaaatatacccctcacatcatcggattgagatggcagtcgaaatagcttcattgaagtgtcagcactcatccatcaatcaatcacccacaaggaaaaatagcaacagtacaacggggtggcttttatgggatttactcatgggcatagggaatagcggctcaaatgtagttctgacatgaaaagcaaggtgctgatattattttttatgatgggaggatcataaagtgaattgagaacagtgaggtctgtctttgcttaacctattcaaccagaaatgaatggagctcgactggaaaggaacagtcttcagatgggttaagattgaagggtggactggactctactgagcaccgtccttcaacaaggaaattctattaaaggaaaatcaatgcattagtattggggttctcgtagctgttaaaaattgtctgctccaatccagggttattaggccaaagttacataattcagatctcactgcaaccatccaaaagtggattctcgagcccttgctccaatggggggaggagatcaatacaattcccaattccatggaaattgtttcccttctaaggaagaaaaaataaatcatctgcttcaac

SEQ ID NO: 22457 - DNA, 3093 bp, Homo sapiens
  misc_feature 1..3093: note = ENST00000329613
  source 1..3093: mol_type = unassigned DNA; mol_type = unassigned DNA
atgatggctgctgcgttgctccattatacaggctacgcccaggaggaacagctgaaagaagaggaggaaataaaagaagaggaggaggaggaggacagcggttcagtagctcaactgcagggtggcaatgacacagggacggacgaggagctagaaacgggcccagagcaaaaaggctgcttcagctaccagaactctccaggaagtcatttgtccaatcaggatgccgagaacgagtctctgctgagtgacgccagtgatcaggtgtcggacatcaagagtgtctgcggcagagatgcctcagacaagaaagcacacactcacgtcaggcttccaaacgaagcacacaattgcatggataaaatgaccgctgtctacgccaacatcctgtcggattcctactggtcaggcctgggccttggcttcaagctgtccaatagtgagaggaggaactgtgacacccgaaacggcagcaacaagagtgattttgattggcaccaagacgctctgtccaaaagcctgcagcagaacttgccttctcggtccgtctcgaaacccagcctgttcagctcggtgcagttgtaccgacagagcagcaagatgtgcgggactgtgttcacaggggccagcagattccgatgccgacagtgcagcgcggcctatgacaccctagtcgagctgactgtgcacatgaatgaaacgggccactatcaagatgacaaccgcaaaaaggacaagctcagacccacgagctattcaaagcccaggaaaagggctttccaggatatggacaaagaggatgctcaaaaggttctgaaatgtatgttttgtggcgactcctttgattccctccaagatttgagcgtccacatgattaaaacaaaacattaccaaaaagtgcctttgaaggagccagtcccaaccatttcctcgaaaatggtcaccccggctaagaaacgcgtttttgatgtcaatcggccgtgttcccccgattcaaccacaggatcttttgcagattctttttcttctcagaagaacgccaacttgcagttgtcctccaacaaccgctatggctaccaaaatggagccagctacacctggcagtttgaggcctgcaagtcccagatcttaaagtgcatggagtgtgggagctcccatgacaccttgcagcagctcaccacccacatgatggtcacaggtcactttctcaaggtcaccagctctgcctccaagaaagggaagcagctggtattagacccgttagcagtggagaaaatgcagtcgttgtctgaggccccaaacagtgattctctggctcccaagccatccagtaactcagcatcagattgtacagcctctacaactgagttaaagaaagagagtaaaaaagaaaggccagaggaaaccagcaaggatgagaaagtcgtgaaaagcgaggactatgaagatcctctacaaaaacctttagaccctacaatcaaatatcaatacctaagggaggaagacttggaagatggctcaaagggtggaggggacattttgaaatctttggaaaatactgtcaccacagccatcaacaaagcccaaaacggggcccccagctggagtgcctaccccagcatccacgcagcctaccagctgtctgagggcaccaagccgcctttgcctatgggatcccaggtactgcagatccggcctaatctcaccaacaagctgaggcccattgcaccaaagtggaaagtgatgccactggtttctatgcccacacacctggccccttacactcaagtcaagaaagagtcagaagacaaagatgaagcggtgaaggagtgtgggaaagaaagtccccacgaagaggcctcatctttcagccacagtgagggcgattctttccgcaaaagtgaaacacctccagaagccaaaaagaccgagctgggtcccctgaaggaggaggagaagctgatgaaagagggcagcgagaaggagaaaccccagcccctggagcccacatctgctctgagcaatgggtgcgccctcgccaaccacgccccggccctgccatgcatcaacccactcagcgccctgcagtccgtcctgaacaatcacttgggcaaagccacggagcccttgcgctcaccttcctgctccagcccaagttcaagcacaatttccatgttccacaagtcgaatctcaatgtcatggacaagccggtcttgagtcctgcctccacaaggtcagccagcgtgtccaggcgctacctgtttgagaacagcgatcagcccattgacctgaccaagtccaaaagcaagaaagccgagtcctcgcaagcacaatcttgtatgtccccacctcagaagcacgctctgtctgacatcgccgacatggtcaaagtcctccccaaagccaccaccccaaagccagcctcctcctccagggtcccccccatgaagctggaaatggatgtcaggcgctttgaggatgtctccagtgaagtctcaactttgcataaaagaaaaggccggcagtccaactggaatcctcagcatcttctgattctacaagcccagtttgcctcgagcctcttccagacatcagagggcaaatacctgctgtctgatctgggcccacaagagcgtatgcaaatctctaagtttacgggactctcaatgaccactatcagtcactggctggccaacgtcaagtaccagcttaggaaaacgggcgggacaaaatttctgaaaaacatggacaaaggccaccccatcttttattgcagtgactgtgcctcccagttcagaaccccttctacctacatcagtcacttagaatctcacctgggtttccaaatgaaggacatgacccgcttgtcagtggaccagcaaagcaaggtggagcaagagatctcccgggtatcgtcggctcagaggtctccagaaacaatagctgccgaagaggacacagactctaaattcaagtgtaagttgtgctgtcggacatttgtgagcaaacatgcggtaaaactccacctaagcaaaacgcacagcaagtcacccgaacaccattcacagtttgtaacagacgtggatgaagaa

SEQ ID NO: 22458 - DNA, 37027 bp, Homo sapiens
  misc_feature 1..37027: note = ENST00000604411
  source 1..37027: mol_type = unassigned DNA; mol_type = unassigned DNA
taaaaatgtaaaagatcagctgggtgtggtggctcacacctgtaatcccagcactttgggaggctgaggtgggtggatcacgagatcaggaattcaagaccagcgtggccaacatggtgaaaccctgtctctactaaaaatacaaaaattagctgagcatgatggtgcacactgtaatcccagctactcagcaggctgtggcaggagaatcacttgaacccaggaggtagaggttgcagtgagccgagatcgcgccagtgcactccatcctgggcaacagaacaagactccaactcgaaaaaaaaatcaataaaaatgtaaaagatcattcttagcttggaggctataaaaaaggatgcagcatgtcagatttggcccattagctgcagtttcctgacctctatctacctcaattggttctttacttacattacatggaaagtgcaaacttggatggcttcaatgtctggcttcttttatttatttatttatttatttatttatttatttatttattttttgagacggggtctcgctgtggcccgggctggagtgcagtggcacgatctctgctcactgcaagctccacctcctgggttcacaccattctcctgcctcagcctcccgaatagctggaactacaggtgcacgccaccacgcttggctaattttttatatttttagtagagacggggtttcactgtgttagttagccaggatggtctcgatctcctgacctcatgatccgcccatctcggcctcccaaagtgctgggattacaggtgtgagccaccgtgcccggctggctggcttctttttacccttcacatctggctttaaatactaccttttcacagatttcttctctaatcactctttctaaagtaaatatgctgtttttcattattagtcattgcatcctatttctttccctttaattttcttatcacaatgtataattatatgtttttttttttttttggttattgcctgtctccctcaatagatcataagttccatttgataaggtacaatgtctgttggtttattagccagtgcctaacactaccatttaatatgtattcaatgaatatttgttaaatgtattgattgaatttaaagtgactactcagcctacttctgccccttggagcttggattgtttcttcaaaggtattgatccttttgactattttaattatgaattcactaaagacatctggaaggcttattgtgtcaagcagtgccaaatccatggcttgatgaacctagatccatccccttcccctttccatatcacagatgacaacttgatggttggcctatgacttgtaaaagttgtcatatttgaattctgaaatttctctaattttcttgggaagcagaaaggaaaaattagtagttggcctcaaagggacagttgaatttcacatataatgagcaaagtagtgtgaggaagagaggagggccttttcttttgaggtcataactaaaagttaggtgagcaaatgccataagcatgaaaatagcaaaccaagcttcttggtttctatccaaaggctttgttgggaaaagtatcaaagtgtgttcatttgttatgtaatatataaggtagagaacccaatttgaaggaggtggaataactttccaaaatacttatggctaaattctcagttgatcttggaataagattcaagaatccaaatgcacccttctttgttatcttgctagaaaacatgctgggcatggtggctcatgcctgtaatcccaacacgttgagaggccgaggtgggcagatcacgagatcaggagttggagaccagcctgatcaacatggtgaagccccgtctctactaaaaatacaaaaattagccagacatagtggcacgcacctataatccgtgctactcaggaggtaggcaggagaattgctggaacccgggaggtggagtttgcagtgagccaagatcacaccactgcaatccagcctgggtgacagagcgagactctgtctcaaaaaaaaaagaaaagaaaaaagaaaagaaagaaaaaagggaagggaaggaaaggggggaggggagggaagggaagggaagggaaggtaagggaagggaagggaagggaagggaaaagggaaaacaatgtgcttttacccacagctgataagcttttctaattgtctacctttgggttaaactttatcattgagtgtttttatcccattatgaaagaattaaggtttgaaggactgaggtaagggtggatatttactcttaattgagtagcttaaccaagtcaagccacagattagctgaagccaaaaagcactggcagcatttgaaataactgagaacatattatacttaacactttattatctaagagaggcacttgaagttgagacctagaaatttgattctgggttctttgtttctaaggggcagggtgaacccagctatagcattcacagatgctatagaattatatatattctatatataattatatatattacattcatattaatatatgttaatatattctatattattcatatagaattcacagataatccaagtgcttttttaatacattgataccaaatctctcctgctctcaaaaaaaaaagcccaaggcaaaaatttttgattagcctgtatccgcaaattcatagtgcatggcatgatgggtactctacatccctcctcctattgcactcactgtgcccagatgaacctaaagtcaccagtaatagtgctaatgtagtaatgggcccaagcttcaaaagaaggaaaattagtattcagtatttaaatgtgggaaagaggaagaatatggaaattatcaattttataatacctatacatattcttacctgcattaatgtgaatagacatcaatgataaacagaataatgccccataaagatgtctacactgtaatctccaaaacttataactatactatatcacatggcaagagggaattaaggttactaatcagctgaccttgagatgggagattctcctggtttgtatgggtgggcccaatgtaatcacagggtccttataaatggaaaaggcagacaggagattcagtgtcagactgatacaatgagggaaagactaccagcagttgatggctttgaagatagaagaagggggccatgagccaagaaatgtgagtagcctctagaagctgaaaaaggcaagaaaacggattcttccctagaatctccagaaatgcagccctgccaacatggtgattttaactcaatgagatgcattttagacttctgacatctagaattgtgttattttcagccctcaagtttgtggtaatttgttacagcagcattaagaaaatgtacaatgaccatgtgcagtgcctcatgcttgtaatcccagcactttgggaggccaaggtgggtggatcgcttgagtccaagagttcgagaccagcctgggaaacatggtgaaaccttgtctctacaaaaacacaaaaattagcctggtgtggttgtgtggacctgtagtcccagctactctggaggctgaggtgggaggatggcttaaacccataaggtggagattacaatgagccaagatcatgccactgcactccagcctggacagtagagccagaacttctctcaaaaaaataaaaaagaaagaaactatacaatgctcctgtgattctagtgctatgtacatatatcctttatagggaattaaggaggttatagacacaaccagaagaggaggcatggaatagactaatgtataatggataggaaagtgtatcttttacaacttctctgtaaaaacaccttcacctactttatgagtttgcctcagctgccataacaaaatatcagaccaagtggcttaaataacaatttattttctcacagttctggaggctagaagtctaagatgaaagtgccagcaagtttgatttctggtgaagtctctcttccttgcttgccaatggccgctttctcactgtgtcttcaaatgtccttcctctgagtatgtgaggagagagaggtttgatgcctcttcaccttcttataaggacaccagtcctactggattagggctccacccttatgacctcatttaaccttaattacctccttaaaggttctatctccaaatacagtcacatttggagtcagacctacaacatatgaattttgagaggacacaattcagtctataacacctagatggaaggcaatttcatataaagatgatatgcagtctatgacagcaaagtagctagtggaaatcacaacccctaattctatttttatgtcattccctaagtccaggtcccatgtggatatagcattgttcagggctatctctttgctgttctttttttttttttagactcacacaagcaatgtggagaaggaacatgaaaacatctttgagatagagcttaatacagatgtcaatctctttgtaaataagcaattaaaagtggaaccactgtccaccatgtgagaagagtgactggctatggctggatatttttaaatacacataaaatgtggtataaatggtagaatgccagggatagaaggagtatcttataagttacctagtcaacgttctggcttctgggcagaaaactatctaaactcagccagataatcagtttcaactaaatcaggaaaacatggaatcatctttatctaggtagtgttatagttacattgcctcatttatctacacatcaataaattctttctcattgctaatatttatcattcttatcatagtataagcaaatgttttaattctattatggtaaagataaagcttctgtaattaaaacactttaatctggaaagacagcagtaaacccttcaagcaaaagcccaagtaggttcaaaaataatagccagagaggttaaaggtaaaccaatagagtgatatgttacagcaactaagggagagaggcaggagttttttaaaagagagaagaggaattataacaacagaaacaggttagccagctgccagtttagatgagcataatgagtcccttagatagatcattggtgatttttatcaaaacactatcggtggagttgtgggagtggtaggctgactatagtggattggggaattaaatagtgatgaacccaaaacagaaagtctgaagaaattccctttgagccaaaaaaaaaaaaggccgggtgcagtggctcacacccataatcccagcactttgggaggccgaggtgggaggatcacctgaggtcaggagttcaagacaagcctggccaacatggtgactctactaaacattgtctctactaaaagatacaaaaattagccggaagtggtggcaggcaacttaatcccagctacttgggaggcagaggcaggagaattgtttgaacccgggaggtggaggttgcactgagctgagatcgagccattgcactcaaacctgggggacaagagggagacttctctaaaaaaaaaaaattccctttgagcatctctactgtagagatgaaataagagagaagtggattctttagtatagagatggaaaggtatggagctagaacatgtgggttgtgaacagtggctaactaaaccaggaccagtaacctagatatcacattgggcttaattgctgggttattcattcattcaggcaacatgtatttgttgagagcctgaatgtgccaggtaatagaaacacaaaggtggttaaaatagaccttggcctctgtcttcaggaagcttccagtctgaagagggatgaagacatatattaatcaaacaatcccacaaatgcaggtataatctgcataaactgacaaatatatctactttggagtcaagaaattaagagaaatcactgatgtgatcagtgaacaagtaagatttattaggaagatggaaggatgacattacttcaaatatattacaggaaaccccaaccatggtaacaacatcaggcctatctttacatatgtttaataatgcttaacttcacttttgctcctatcctccccaaagcaatcttcaagttcttctgtatctttgttttattttctttgttcttttttgtctcatttcctatactgtttttattccatactttgacagttcagtgaactcctttgatagatcccaagtcctcctttttcaatatttacacttataatcatttttgatcactccaaaactgagaactttgagtgtagattttctaggcttcttattttatttttagacattatatagaaaaattagagggaagggaaaagaaggatggcaacatggtaactgggacagtgttcaaaaggtctaagtcctacttctcactccatacaaattatctgcaatttttttatttttgagacaggctcttatctctcacctgggctagagtgcagtggcacaatcatagctcactataaccttgaactccagggctcaagggatccttccatttcggcctcccgagtagttaggactacaggtgtgtgccactacacacagctagtttttaatttttttttattttcatagacacagggtctcactatgttgctcaaactggtcttgaactcctggccccaagcaatcctcctgccttggcctcccaaagttctagaattgttacaggaaagaggtcccaatccaggcccaaagagattttatttatgtactagtgtggagcctagcctaggacacatcaagcagaagtgcagataaggtctgactctttccagtacagctagggtgcctggctctccacatgtccccagaccttatctagaatctaatgtctccaaggtaggtacattgaataattttcaaaagtcaaggaagcagtttatgaccttaaagtagttagcaaacttaatatctgacctgactaatttagaccaaatgtttacatttttgaagatatttttattttatcagtaatctttaaaactattttctattttccaaagattacttaagtcaaatgaactaaaaggcattatacattttagttttctgatgaaatatctgatttaagcacttattatttttgaaccaattaaagcttttttatatcacacacacaacacatataaatacacagacaggctgggtgcagtggctcacacttgtaatcccagcactttgggtggccaaggcaggcggatcacgtgaggtcaggagtttgagagcagcctggtcaatgtggtaaaaccccatctccactaaaaatacaaaaattagctgggcatggtggaggatgcctgtaatcccagctactcaggaggctgaggcaggaggatagcttgaacccaggaggtagaggttgcagtgagccaagattgtgccactgcactccaggctgggtgacagagggagaccctgtctcaaaaaattaataaataaatacacagaagaagataaaggacttatcccctaaggcaggaatcaaaccctgaacacaggccaccattgtgaaaagaaaaagcacagccacatggttacaaggtcaagctcccaaggacatacaaaacaagaaggaaacctcatccagttttttcagggacctgcagcaaagtttgtacctgataaatttactgggccatcttgaacagcaggtttacaggtgtcctaagctcatgttctatcctaagatacccctctttatgacagaacaatacagaaagacacacaacagatttgctacaacttaagactagcctcataaatccattttttcactaatcaaaactttacagaggaaatgaacagtgatttttgccatccattcaaccagttttatagagagagagagaggaaagcattgcctgaggcagggtggggaaggcccggcactccgagtgccagagaaagccccacccattgcagcaacactgaaaagttcatgcagctgcttgtcagtcatgaacggattttttccagcagtcccatcagctctcatttccctttttaggagggaaaagctccccatgttctacaatcctctacatgcctaattctgtcaaccatagccatcagcaaagagtgcaaggcagatcaatccaaagagaatagcggttaacatcctataatgccaaacctgttcttagccgaaagggactttaaggagagggactttactgagagggacctctaaccccctaaatcttaaaagggactctaatcctcctaagttgggcctctaacccagtgtcagtcaagcatccttgccttttattgagaggaagctttaaccctctcttacgagagactctaactcccctaagttgagctataaccaatcccatcctttgcctgagtaccccaccacttacccaaagttgtccaattagtaatgctgcagtctatttcctttgtgctgggggtctcctcagtatcatcccttcgagtttcaccagaaagatgttatcaggccccaccacttacccaaagttagcctttggattgggggtttctgcattatagtcacttcagtggttgccaaaaagatgttataggacccccaacacttacccaaaattaacctttgggtcaggtatttctgcactatagtcccttctgtgataatcagaaagatgttataggaaaaggatcctgatccaggcccccaggagagggttcttggatcttgtgcaagaaagaattcagggcgagtccgcagtgcaaagcaaaaccaagtttattaggaaagtaaaggagtaacagaatggctactccatagacagagtaaccccaagggctgctggttgcccatttttgtgtttttttcttgatgatatactaaacaaggggtggattgttcatgccttcccattttagaccatatagggtaacttcctgacattgccatggcatttgtaaactgtcatggtgctgatgggaatgtagcagtgaggatggccacactaatgtgttttaagccttttcctcagccaaactacaaaaaagcaaaaattactttgtttcaatattacccctactggctaacacactagcaggtcatcagaatatttgccattcctacaaaattccaagattctgtgatgatcctttgagtataagaatcacagagatacacacaattgttacatgctctatttaagttttctatgttatattttctctttataccccccaccccatttcctgactctttctttttaaagggtctttgggatcatgaaagcaaaatgcagcatcctcagtgtcacacacgtccatgtgaagagaccaccaaacaggctttgtgtgagcaataaagctttttaataacctgggtgcgggcaggctgagtctgaaaagagagtcagcaaagggagataggggtggggcagttttataggatttgggtaggtagtggaaaattactgtcaaagggggttgttctctggcgggcaggggtggaggacacaaggtgctcagtgggggagcttctgagccaggagaatgaatttcacaaatgtcatcagctaaggcaggaaccagccattttcacttattttgtgattcttcagttgcttcaggccatctggatgtatacatgcaggcttgggctcagaggcctgacattcctgtctttttatattaataagaaaaataaaacaaaatagtgttgaagtgttggggcggtgaaaaattttttggggggtggtatggagagttactgggtgatgtttcttagggttgctttgagtgggattaggggtggcgtgggaacctagagtgggagagataaagctgaaggaagattttgtggtaaggggtgatattgtggatttgttagaaggaatatttgtcacatagaatgattggtgatggcctggatacagttttgtatgaattgagaaactaaacagaagacacaaggtcccaataacagaaggagaaaaacaggtattaaaggactaagaattgggaggactcaggacatccaatcagagtgcctaagggggttcagcgtgattattttcttggttgatgagtttttgggctctatccttgagtttttttatgttgtcatataccaagccagattgatttaggtaaaaacaacacttttcatttaaaaatacacacagtcccctttttttgagcagtaagtcaaggcctcagtgattttggaggaaagagaaatgcaaagccagcaatcattttttaaagaaggattagaaacagctaggagagagtgaatgagattgatagtgtggtggagatagctggggagaggtagagggtcgcataagaacaggaatgagaataagagtgaatataaaggtaaagaataggactttattagggtgaaagtattggagtgtaccttgtcactgaagatcttctatccacttcaagagagacttaaggaaggtggtttgaggtaaaaccaggagatatgagttatgatggtttggaggaaaagtgtaaactggcagtgtaaacaagggcagggcatttacgagtagttgagaatggtgaataggagtatgactagacagaagatagtagggatgacaagttttggggttgcagtccaagtagtgggggtgactgcataaagccttgttgcaataagtagggtaataaacttaatagaatgaaaggatgttttaggctcataagggttactactgttcttcagaaatgtgagtgagtttaagggaagtagggttgagtacttgcaacttctaggaggaagaggagagattaggctggctgtccaatggacacagctttattctggaatggtgagcctaatagggagggtcttacaggcggatggcagttggggtattatagatgactaagtagggtccggtctatcaaggttatagagtttgaggggtcagattcttaacaagaactgatcgtccatctagggtgtctttatatggctgggaatatggagtaggcaagaaaagattagcagcttggcaaatttcctgtcttgcctgctggaggaccagcagatagattcctagaggactggtgtctgagacgaggttggggccaagcaagaaagtgtgtctatataaaagtttaaatggactgtaccctctagcatctcaaggacaggctctaattctgagaaaggcaagaggtaaaagtactgtccaatcttttttaagttggaggctgagcttggtgagatgtgtctttaaaagaccattagtccattctacctctcctgaagattgagaatggtaaggggtatgaaggttccactgaataccaagagcctgagaaactgcttgggtgatttgactaataaaggccggtccattatcagactgtatagaggtgggaaggccaagcctaggaattatgtctgaaagaagggaagaaatgactatggtggccttctcagaccctgtgggaaagtcctctacccatccaatgaaagtgtctacccagaccaagaggtattttagtttcctgactcggggcatgtgagtaaagtcaatttgccagtcctgggcagggcaaattctcgagcttgatgtgtagggaagggagggggcctgaggaattcctgagtagtagtagtatagcagatgggacagagaagtgatttttttaggatagatttttacaaaggaaaggaaatgagaggttttaagaggcaggatagcagcttgcaacttacatggaaggggttacaaaatgacaacagaatagaataggcctgtgaggctggaaggagatattttccttgttccaagaaccatttgccttgtgtggaaagagattgataggtggaagtttcagtgggagagtaggtgggagtgacagatgagaaggagaaaaactggccatgagggacagaagttgggacactagctgcttctttagctaccttatcagcataagcactgtcctgagtgatgggatctgatgccttttgatggcccttggagtgaatgactccagcttcctttggaagtaaagtggccttgagaagagtttttattaaagaggcattaatgatggaggacacttgcatagcgaggaaacctcttttagcctacataacagcatggtggtgcaggatatggaaggcatatttagagtcagtataaatattgatgtgtagtccctttgcaagagtgagagcctgagttaaggcaatgagtttggcttgctgacaggtagtggaggtggacagagtggtaacatcaaggatagatgtggaagatactatagcatagcctgcctttgctaatgagtgacaattaggcctgatggaactgccatcaataaaccaagtgtgatcagggtgaggaacaggaaagaatgaaatatgggtaaatggagtgaatgtcaggtagatcagaaagatacagtcatgggggtcaggtgtggtatcaggaataatgtgggagccagcctaaaacagtaagatcaagttgcttggacagaaaggctacaggtcatggtcctggctcttgtgtaagaattctgaccgcacagccctgcacttcagctgtgtgtaatgaaaaagggttcagatgagttagggagagctagtgtgggagcagcttccagggctgttttaagaaatggaaaaaggagtggggaaaggatttaggatctatggggtcagctaggttttcttttgtgagtttatataatggtttagtcaggacagtaaagctaggtatttaaaggcaaaagtactgaaccatgctcaggaaagaaaggagttgttgctttgtcaagggggttggggtttgggagattagccagacacgatcagcagggagagcatgtgtgtttttatgaagaattatgtcaagatatataacggatgaggaagaaatttgggctttggaggcagatgtgcaatgtccttttgagaatagattgttggagcagcaggagggtgtcctgttgggaagatttgtaggaggggctataaagtagaaggtcatcaaaatatttaataaggtgagatgtagatggatggaaagagagtaaatcatgagaaagggcctgactgaagtaataggagctgtccctgaagccttgcagcagtacagcccaggtaagttgctgagactgatgggtgtcagggtcagtccaggtaaaagtaaagagggccttggaggaagggtgcaaaggaatagtaaagaaagcatatttgagatccagaacataataatgggttgtggaggggttgtgaagggaggtattaagaataagagagtatatgggtttggcaccatggggtggataggcaaacaatttggttgataaggtgcagatcctgaactaacctgtaagacttgtccggtttttggacaggtaaaatgggagaattgtaaggagagtttataggcttcagaagctcatgctgcagcaggcgagtgataacaggctttaacctttttaaagcatgttgtgggatgggatattggcattgagcggggtaagggtgattgtgttttaatgggatgctaaggggtgcatgatcggtccccaaggagggagtaaaggtgtcctatacttgtggattaaggtggggagatacaaggggaggatgcgaaggaggctttgaactggggaaaaggcggcaatgaggtgtggctgtagtccaggaatagccagggaagtagataatttggttaaaatgtcttggcctaataagagaactgggcaggtgggaataactgaaaaagagtgcataaaagaatgttgtccaagttggcaccagagtgggagagttttaaggggttttgaagcttggccgtcaatacccacaaccgttatgggggcaagggaaacaggcccttgaaaggaaggtaatgtggagtgggtagcctccatattgattaagaaggggatggacttaccttccactgtaagagttacctaaagtgtctgtgatggtccaggaggcttctgaggtgatcaggcagcgtcagtctccagctgctaagccaagcagatctgggaaagtgtcagtcagagagccttggaccagagctttaggggctgtaggagtagctgccaggtgagttggacaatcctatttccagtggggtcctgcatagatgggacatggcttacgaggaatcccaggctgcagcattccttggcccagtggccagatttccagcgtgtgaagcaagatcctgggggaggaggtctggaaggaatgcctgactgctgtggcttaggtgctatgaagttcttgtgtgctggagatgtggctggggtttctctcacagtggaggcaagtaattgcaactcttctctattattgtacaccttgcaggtgaggttgattaattcctgttgtggggtttgagggctggagtctaatttttggagctttttctaatgtcaggagctgactgggtgataaaatgcatattgagaatgagacggccttctgacccttctgggtctagctagggtggtaaagtgtctaagggttgttgccaaatgggccatgaactgggctgggtttttatatatgatgaaaaagagcctaaacactaactgatttgggagaggtcagctaaagaaaaaggagcattaaccttgactatgccttcagcttcagccacctctgtaagaggaaactgttgggtagatgggggagggctagccacagaacgcaactgtaagctggaccaggtgtgaggaggggaggtgatagaaggattatagggtgggagagcagaggctgaggaaaaattgggacctggctcagcctggtgaggagcagcctggggaggaggggagaggtcagatgggtctgtagaaaaggaggattcaaaggactcagagcttggggtggagactgaaggaagagacaggagagaaagaagaaagatttgggatgagtcacattgggagcagagattaggaaaagacttgttgcaggaagtcagggaccccaaatggagggaccggctgaagccatggcagaagaatgtggattgtgaagattttatggacatttattagttccccaaattaatacttttgtaatttcttatgcctgtctttattgcaatctctaaacataaattgtaaagatttcatggacacttatcacttccccaatcaatacccttgtgatttcctatgcctgtctttaatttaatctcaatcttgtcagttgaggaggatgtatattgtctcaggaccctgtaataattgcattaactacacaaattgtacagcatgtgtgtttgagcaatatgaaatgtgggcaccctgaaaaatgaacaggataacagcaattgttcagggaataagacagataaccttaaactctgactgccggtgagctgggcagaacagagccatacttctcttctttcaaaagcaaatgggagaaatatcgctgaattctttttctcagcatgggatatccctgagaaagagaatgcgcacctaggggtaggtctctgaactggcccccctggggcgtacctgtctcttatggttgagactgcaggggtgaaataaactccagtctcccatagcgctcccaggcttattagaaaaaggaaattcccacctaataaattttggtcagaccggttgatctcaaaaccctgtctcctgataagatattatcaatgacagtggtgccctaaacttcgttagcaattttaatttcaccttggtcctgtggtcctgtgatctcaccctgcctccacttgccttgtgatattctattaccctgttaagtacttgatgtctgtcacccacacctattcgcacactccctccccttctgaaaatccctaataaaaacttgctggtttttgtggcttgtggggcatcacagatcctaccgatgtgtgatgtctcccccagatgcccagctttaaaatttatctcttttgtactctgtccttttatttctcaagccagtcaatgcttagggaaatagaaaagaacctacgtgattatcagggcaggtcccccgatagggactgatgtgcaaaagaattcctggatatcaggcacctcagaccatttgcccattttacgacaagaattatctagatcttgtaggatggagaaatcgaaagtgctgttttctggctatttggaaccattgtcaagtttgtattggggtcaagtggtattgcagaagaaaataagatgtttaggttttaggtcaggtgtgagttgaagaggttttaagttattgagaacacagtctaagggtgaagatggaggaatggagggtggaagtttgcctatagtgaaggaggcaagccctgagaaaagagagggtagagacacggagagaaggggtggggggtacttgcctcccggggaggtggtgcttgccaccaaggtgaaggatcaaggcaggcatccccatggtgatcagacacctctgaaatgtgggtgaataatcaggcaggcatccccgcagtgattaaacactgagggaagactgtcttcccgagaccatgaccatcgtcagagttttgggttcacacataaaacatgtctcctctgtctctaccagaaaaggaaaggcactgaaattaagggaagggagagattgaagggtagcacagaaattgaaaggagaaagaggttgagggatagtgaaagaagttggagaagagagcaaaaagaggctgcttaccagatttaaaattggtgagatgttccttgggctggttggtctgaggaccagaggtcataggtggatctttctcacggagcaaagaacaggaggacaggggattgatctcccaagggaagtcccctgatctgagttatggcaccaaatgtcacgtgcatccgtgggaagagaccaccaaacaggctttgtgtgagcaataaagctttttaatcacctgggtgcaggcgggctgagtctgaaaagaaagtcagcaaagggagatagggatggggcagttttataggatttgggtaggtagtggaaaattacaatcaaagggagttgttctctggcaggcaggggtagtggtcacaaggtgctcagtgggggagcttctgagccaggagaaggaatttcacaaggtaatgtcatcagttaaggcaggaatcggccattttcacttcttttgtgattcttcagttgcttcaggccatctggatgtatatgtgcaggcttgggctcagaggcctgacactcagcagctactaccaccattggcaccactggcaccactgccaccaccccactgcaccccagttgcttcactctccatcacagaagccttttcagcaacagccaacatttgtaccctcaccaagccctctgattttcccaatcacaaggccttcactacaatattttcttcattcacaagtgtcacctattctccatccccaaggtaagtcaattctaattttcttgcaagggttgacagaggtaaaacctgtccagataccccaaaggtgtttcatcttggcaattcttgactctttcaaggaaataagaatagtcaaatataactaagtaaaataaataagaatatataaggtctgtaaaccaaaaatgaaattctaagccccccaaccaactgaatggacccctcctctcagccaagggcattctaaagttaacctgaaagactaattcaggccatgatggaagtgggtggtcaggcatgcctcattatatcctcctccctttggaatttagacacaaatgaccaacattaacattaaaacagagaccttaagattgacaaagtagactctttgtagcaataagatatgaacacaacagatagcaggccccaaaatatatttattcaacatatttttaaatggccctgcaaagctgtctcttgtggggaaacctacattctgtagagaatgcccttccctttccagatcttttcgcttatccaggagagaattaactaagagtctggtacctttttaagtctgataagaaacatttacaatctattctctctgaagcctcctacctggaggcttcatctgcataagagccttagtctcagaagccccttatgttaatgcagatactcccttctattgatttcaagactttaatcagaaaacctctgagtcttcctatgacctggaagcccccacttagagttgtcccacattttcagacccaaccaatgtacatcttacatgcattgattgatgtcttatgtttccctaaaatgtataaaaccaagctgtagcctgactactttgggtacatgttctcaggtctcttggagctgtgtcatgagctattggtcactcatatttacttggctcagaataaatctcttcaaatattttatagagtttgactctctgttgacaagtcctagttttaaaacagtttttatttcatttatttattttgagatggggtcttccctctgtcacccatgttggagtgcagtggcacaatctcagctcactgtaacctctgcctcccaggctcaggtcatcctgccacctcagtctcccaagtagttagaaccacatacgtgtgccaccatgtccagctaattttttgtatttttgatagagatggggtttctccattttgcccaggctggtctcaaactctctaagctcaggcaatccacctgcctcagcctcccaaaatgctgggactacaggcatgacccacagcgcccaaccaaaatgacttgtttttagacaagaggttagaaattttttttcctcaaagggccagacaataagtagattaggccagggtttctcaacctcaacagtattcacattttgggccagataattctttgttgtggagtgctttccttttcactgtagggtatttaactgcatccctgacttctactccctaggtgccaataacatcttattctcagttgtgacaataaaaacattttccagacatttctagatgtcccataggaggtaaaattgccctgaggtgagaataactggtatagactttgcattccatatgctatctgtcacaactactcagcagtgccattatagcacaaaagcagccatagacaatatgaaaatgaatggacatggtactttcccaataagtactatggaaactgaaatttaaatttcatataattttcacatgtaataaaatattcctttaaaaatttaagcatttagagatggaaaacccattgttagcttgtgggacaaacaaaaacaggtggtaagccatagctttccaactcctatttgttttatttttgaaagtttaataatatatgtaatttaaactactgtatccaaataatattattttaacatgtggtaattataaaaatcaattcataaattcagtatgtattttacatttataatacatctcaatttgtactagccacattttaagtactcaatagtcatatatggctagtagctaccatattgggccatgatgccctagagtatttgcttttaattattaggcatacttcctctcaagaggccctagtcattgggaacatgaggtcactttctctttgaaggtaaaagcctctaagtcctgttattgatctaaactcacacaaaaaaaaaaaaaactgaaagtaaggtttaaaagaccaccatgacaatatttatccaatttgtgactgtatttctgattggcaattcaaaattttgtttggcttagtaatttttcttgctatcttgaatagaattaatcccagaaggtctggtagacaatgagtgttttggtgtaactgggtttctttatgtacaaagctacagaattccccttgaagacactggccttgacatccctgaaatagcaaaatagacttttttgtttactccacgtgtagtatatgacagttagtgcattgtagatagggccatctattgaaatctacatgtgattatactctatcgaacatctactttaaaacagcaaacatgagagcctacaattgacatctcactgtttaaaaaaaacaatttcacatatatattcacaaacatactaaagtggtcaatattcaaagtaaagactcagatattcctcactttgcaccatggtttagttaaataatacaagtaccccaacaacacagtttaaatttcagttaccatggtatattgactgtgatattaaataaagtacaaatttcactgctaggttttcagtatgtaaattactatataactaacagatgtgcatcatgatcaattatgaatcacatcacttctttcacagtctttggtgactggtcacttatcagctattcagtacatgtgcagagaacaaaccatgtgtttgtgttgcctctttgtctgccagtgataaacccaagtgacatttaacaaaaacatataatgaaagagggaattggccaataaaaatgaaagctcaagaaagaaactaaagtcacaatgctggaaatgaaattcaaatcaaaggtaaatgaagttatagaggaaacagctgactgtgggaatgttgacactttcactggttggaaaggctatatagatatgaagccaaaggaacttagttaaagcagacattgacataaatgaggaatttggttgtgacaagcaatgcctattttagaccaatggcttgtatcctcattagggactgtcagtataccaaaagaatgggtgttaagtctaggaaaattataatcatcattaagttgacttttagttcccaagatttcctataattactgttttcagtatttagatattactgctaatggtaaaatggcctatgagtagaaaatatgaaatttacatttctctttatccaaatttcctagtggaaccctgcccctaacaatgtttaccacttcttactgtccattttcacagatatgggggacatgattacatgccctcaacccatatgttttctaggtaactctaccacagaataaagcggtactcaaattactctcagcttgcttaatatccactttaggacactgaaaaacaaacacaaagggactaaacaagatgaacagtacgtatcccatttcttttaagtccactatcttgatatcatgaggccccctcactggttttatgtagatgggctactggaatgcataagctagtgccaattcttattttccaaagatgttaaaagattaacataggatgggaggagagtgaggatcaaaaaatctacctatcaggtactatgctcactaccagtgtaatgaaatcatttgtacatcaaagcccatgacacacaatttacccatggaaatttacccattggcttttgctgcaaaagtaccccttgaacctaaaataaaagttggaagaaaaaaacttaacatagcaaattcttagacattgttctgacttgtttgcaagacctatgctttcttcctaagctggtgctggatagttcttttgacttttttcattattgatcttctctctccctagcattgccaccaagggaaactatttcatgtaagacattcttttccatccagccatctggttggccctaatttctctgagcacatctttcccacctgtattgtgaaccatagagcaggcctaagggaaggttataaagaaggtaaggttggtctgtattgtctcagtctcttttaatatctattcccttctgtatggtactccttcttctcagagactcctgttctctagcttcttcataatcggctttcaaaataggatctgctgtcagcgatttatccctttagtgctaggatggtaaataaattttatcttgcatgccaactctaaattattagtagcagccacctgaaatgctacgtgaaggattctggggatgcatccagttgaattagttatgagaagaaaaattggctactataggaaagagaatcaacaattcaatggattaaacaaaaagagtgttaattatttcttacatgacagtatcaatgtaaaaagttcaaatcagagagggaattctgtttcttagtcattcagggacttgatttccttccaagtcattgtactttcatctcatagggaatcactcccatctgtatactgaaactgggtagccattacatctgagttgcagctggtgggagaaagtatggaaaggagagcataccctatgtcttaggacccaggcatggaaatggcatacatcacttctactcacattttattgatcataacaatcatttggctgcacagaactgcaaaagaagctgaaaaatgtaccctagctgggcagccacacatcaagcaagaatgggagaatgtattttggtgggcaacgagcatttttgtcccttactaggcttaacaggaatcaatgctatgattaattaatgaaattttccacgagttggaaaaaaactgtggcatccacccatattatggtattagctgatcttgccttaagtgtgaaatggaagtcttgttttctttcctagagggtcctgaagtttaaatataattccaaaaaatttgacaggcattttccactatgagaaaggtacttttgttaggtacaaaaataaacttgtccctgctttatcacttaatgtagaatcaaagattcgtctccagataacagaatttcagacatcagctaccaaggagggaaaatataggcttgggaaagaaggccttcttgtatgaaatcacaccacacaggcactagacagctctacttatataaagtttagctctataaaaatgagattggggtgtttcagagattttattaggaaatgtacagagaaaacagttgatggggcaaaagctataaacactaaggtgagaaggaatcagaatataggcaagagttatagaagcatctaaatggcatttgtatctgtttaatcagcctatcaggtaaatctgcccacttttctccctaccagtgaacatctgttttgaacctctaggatatgggacctcttgcttgataccagtctttctgtgcctacctattctaaagcctgatgtcatcttctgtgccttcccttataggcttacttccttcaacgctgaccattcctccagcatttcttattctaaagaggaacaggtaagaaacttcgttggagggaaaattaagcaaggattggcattagagagggagctgtgcacagtccctgtctcaacaaaaatagcttaagatgagacaagtactttacttagcataatcttgctactgaaggggctattctaaatgtccccccgcccaacaccattatgtaaacattctctaatattcgctacttaatttagattatccacccttccttctggccattgcattccttatctagcaatgcaggaaaagggcaagaaatcaaagggaaggaataaagggacttctgtttccagactgtattttaaagggaagtcatggttggttagcgattttctttagcttttgctttgcgtttgcagaatagctaatattattgttttacctatgggaactggtatccaatctagtgcccaatggggctgttgttactagagctattttctgtgaacctcatagcagactctcttctgctgaaaatgagatttactattcattctgggttctctcaaaagccagcctgccatctacaattagcggtcacatccatttggctatagttcaggtaagtccaattcttcatgtcctgcttctcagctctctgctgctcagagccaaaaaccttatcttagaaccccaaaatacatgtctagttgctgtatcaaagaccaggtagcagcctttacagaaagtcccttttctcagaatctagttgagccaatactatgcagtgtccactatattcttcttggttcattctctttcttttggaggcaacagcttactatggtgaggacaactggaatccatctctacctattcaccactttttaagtagtaaaattggtagctcaaaagtaactttattccctgctaagtcttgctctttccaattattattcaaacatgagaggtgacagtgagaagattggtttggcattataggatggtaccatgcaaggtactctaacaaccggccttctgtctcatggtctatctccctgcagattcaggttgcatcagctgtcctcctatgtccacaatccaaatgctatgggatactatggcagacaagttttccagttcttcaggaagtagcaactgtgagtattctagctcacaatgggaggagcacaacgactggactccagccatgagcaaatacaagtaaaggtttaactgagactgtctgctccccagttctccaacccctgcctaccccaagcccctttttgtcttgatttatagtagaaaagtaatagtcggtcgggcgcgggggctcacacctgtaatcccaccactttggaaggacgaggcaggtggatcacccgaggtcaggaattctagaccagcctggccaacatggtgaaaccccatctctactaaaaatacaagaaaaaaattagctgggtgtggtggcaggctcctgtattcccagctactcagggggccaaggcaggagaatcatttgaacccaggaggcagaggttgcagtgagctgagattgcgccatcacactccagcctgggcaacaagggcgagacgtcatttcaaaaaaaaagaaaaagaaaagtaatagtcacaaaatggatataaaaagagaggtaacaatgggaaactacaggggggcaaattaatacttttatagtttcagcagacctgtagtaacagaagaaaaactgattttcacttggttcagactatctccctgggctagaaagtatagggccaaggtagaggaatcggaggtagatgaattatcttcctgtgtcttcctttaagtagttcacattgctcccatttaggtaccagttaatagtcataattactataatccctctctttggatattctctaagactttatttcctcgtgagcataaagacataaaatagtacactggaggttagctatgattaggaagagccattctaactgtaaattactcataatccaagctctttcctgatgagcatgtatccgttataaaagaggctatgataatatacagtgagaaaagaatttgtttagaaattaagtgaatttggatctagggtcacctcagctattttgcgctgcgacattgatcaagttattttctctgggtttcagatgcctcatctttattttgtgcatttagatacacaattctaattggcccaatgggaattacacagctaacaccatcatgcagcaaaacaaaataaaatacagtggaactgaagtgagggagtaaaaccaccacactatgcagatgagactatctgcctagtaacaagacatttcttggactctggtacttcagccaaatgtcctctgggagtggagaggcggggagacaatatagtccactgccagaaagaacccacatctgttccaccactctcattgtcattgcgtttcctgggatactttcagaataattcattagtaacaacaacaacaacaacaaaaaaaaaaaacagcaaggaaaaggctacaaggggaagggtttttctaggtctttgggatatatctaatcatttcttcacggaatattataaagtagggtccactcaaagctcatccctcacaagccactcaacctttgacattcttcttctatttaatgtgagtcagaattcctaagattttttgaaatcctgcctgcaaagtctgcttatgaatttttttccttaccacggagttcccataaagtgacaggttctgcctaagtagttagctacctgcaaggctgctcgaatccaactttctttcccactctactttgcattctgctctccctttgctctcctctccttaggccctcaagtgatgccagcttttgttctagcactctagaaaggagttactattttgatccagagtacacagagaagagaaactggagtgggtaaaaggaagctcgtcactgagaatgctggtactgggagcaagactgtggcaaacccaggaaatactaacaataagaacccctcaaaagttcacctttaccaagccaatggaaacaatatagctgagtggggtttgaattttgagaactaatgactcctcagctaccatgtaattgccttggtgctccatttgctataattcatgggaaaggtactaaggtccttcaactggttttccttgctacctccacctttttcagaagttggacctatgattagcacacttcctgcctatccattcacagtgaatagaatggctggctaaattttaaaccccatttaaattattccacttcgaaatttgaatgatagatgcttgcctaagtctactggcctcagtaacattaccttttctcatgaccaagggtaaaagagtaaattgataggaggcacaagtttttgtggatgtgggttgggctggcaccaaatccaactacaagcatacagtgaccacttcatacacaccacataaaaaatacaaaaactgaaaaatactatcaaatgctttgacattttctaaatatttctgctgcccctataaaattgccttgtctgacctttcctcactaaccaggagatacggtgtttttcatttcctctcccttcaaattttacaagagaatcaaggaatttgaggaccaaagcaccacaaacacaagagtaagcacagcaaatatgacaaggggactgaagtaagcccctatgggaataggatctgctgaaggaatcaagagggatggacaaaggaacagaagacactcaagaataacttcaggaagtctccttaccgcctcacctgctttccctctgtcctacacatccagccttgcaaagaaataagagtaaagagaaaagtccatgtagcaccatcccagttcagaagcaacccccaagatatgggtcaactttatcacctcaaactctactcatttataatgacaaaattcaactgttaacacataggtaagagttcttcaggcatcggttttaaaggtccatgtactgggacgggtgcggcggctcacacctgtaatcctagcaccttgggaggccaaggctggtggatcacctgaggtcaggagttcaagactagcctggccaacatggtgaaacccagtctctactaaaatacaaaagttagccgggcatgatggcgggtgcctgtaatgccagctgttctggaggctgggacgggagaatcacttgaacctgggagacagtggctgcagtgagccgagatcacaccactgcactccagcctgggtggctgagcaagacactgtctaaaaaaaaaaaaaaaaaagttcatatactgaataaccatctgggcccataacagcttaagactttctggagaaaaaaaaaaaaaccagtttccagtttaatttccaacaaagcagtaggaactcttgcctatagaatactgtgctgggggctgggcacggcgacttatgcccgtaatcccagcactttgggaggccgaggcgggtggatcatttgaggtcaggagttaagagactagcctggccaaaatggtgaaaccctctctctactaaattaaatacaaaaattagcctgctgtcgtactacacgcctttaatcccagctattcgggaggctgaggcacaattgcttgaacctgggtggcagaggttgcagtgagccgatcacaccaccgcactccagcctggagacagagcgagactctgtctcaaaaaaaaaaaaaatactgtgctggttcatttgcctataaagtcaccaatctaatgtttgggtatttgatcattcagaattctagaaacactgaagatcccttcacctactcagggtctgggcctctttcatgaatgcttaattcccacagccttacagtttatacccttctcctctcccacttttgatcctcaagttttttgcttctcacattttttactgggtttgtgcttctcagtatccttgaccaaagcaactgatgctgtaagaaatgagacttcaaaccatttacccacactgggtgattaaggtagtttaaaaaaagaaatgaggccaggcacggtggctcccgcctgtaatcccagaactttgggaggccgaggcaggtgtttcactttaagtcaggagttcgtgaccagcctggccaacatggcaaaaccccgtctctactaaaaatacaaccattagccaggcatggtggctcatgactgtaatcccagctactggtgaggctgaggcaggagaatcgcttgaacccaggaggcagaggttacagtgagccaagatggcaccactgcactccagcctgggcaacaaagcgagactccatctccaaaaaataaattaatttattaatttaaaaagaaaaagaaaaaagaaatgaagaacttacggtaattagtgtggttagggacagtgagttagaaattgtcacatcaaaatacaaagttttcaaaacagtatattttattttacaatagcaaccaactccccagtttgtttcaattgtgacatctagatggcttaagattactttctggtggtcacccatgctgaacaatatttttcaatcttccaaacagcaaagactcaaaagagattctgcatttcacatcagttcacaagttcaagagtcttccatttatcttagcttttggaataaattatctttgaggtagaaggacaatgacgaagccacttaattccttgtgtctgcataaaagcagatttattcatcacaacttcatttatgtgaataaagcagatgatgataaaatgttctcttattcttgtttaatcagtagtggtagtgatgccagaaactgtgaaaggaaggcttttagttactttcttctttccattttccaataatccattccccatccccagctgaagaaaggggtgttactgagtccagctgataccacacattgaaaggtaaacattaatatttcaaatctgatgtctaactaaaaatgtacagaatgaaaactagaaaatttcaaccccagattatcttcaaccttgctccctccaccaatcatactttgacatttatctatttccttctccacttatggatgtaattggcttgctatagaaactacagttcagatgctttgaatgtatgaactacaatgaacaataaagtcctcttcttttgaagcatattttggcttcagctttaagataatcttatgacaagaagggtcacactgattcacttaataaattccattcttacctaacacaaggtttagttgataagcacttggacaaaaataatacttttcaaaaatgtaaagcaaactagtgaggacaaaggattttgtcctcatctcaacaatgatcagctattggaactgcatgaaactgaacaatttaaacctggagctggtaatgttcttaagaccaattcagaacaaaggcaggttgcccttaaaacaggtttgaccttttccttcactcttcctcctgtcccaccctctgtgagtgatttaaaaacggaaaaggtcaaagcccagccaggcctacatttagagaaattttaaaaaaatttttcctttcaattttggccaattatttccaatttttattttattcttaaaacttaagcatggtaaaatgttaagctgttttcatccactgatattattctactataaaaagcccttcttgagcagatttgatgataaaaaggagaacatttctaaggtataattagagaagctgttgcatgagaaatcatgtctccatctccattttgctatgcgttatctgaggattgtttctgaaagagatctatttaggcagtgtatgtatgtgtcagcatgtaaaaagtaaagaactgaaaatagacaaaccttgtaaatgcacttcaaaaccaattgtggctcaagtgtaggtggttccccaaggctggtaccaatgagactggggtttgggaattagttggtcatcatccctcctgctgcccagcagtggtcagtcatttttcatgagggatggactaggaaaatgaagtgtctattataaggagagttcctgtaacttaaggagcaagctcactacaaaacccagctacctgcttatcgtagtggccagagtggtagaagagatacggagtaggaattaaaccacacaatgttatttagggactaagccatgcccctaacaagaaaacaagccaaaaggaaagtattaggcattctctgggaaggcatgcatttttttcccatgtctctggggccaaaaaccttataccaagtacctattggcacccgaatatatttgtagaatgaatgaatacatgaaaaaaaataaacagtaacctttctcctatattctactttccaagccaattaataagcaagtgtcttttcgtcatgattttttttgttttctgtttaggatttaacaaaatggttgagataacagtcacttctgtttgatgaagagtatcacttcattccatttttgtgtttttgttgcatctccaagtcagaataaatgccttttggagcagatatatttcatttagcatttagtatcatcttcatcaatactcgtatgaacgaaaaaataaaaagccctctcttattcccactctacaacgcatgtcaaaggtgatctgtttagtttttccttagtatcgaacatatcacagctactcaatgaagtttcttctcaactaaagaaacacagtctcttagagaatttgttcctgtgtttccaccataagataaatgagataaagtgcactttggtttacgtctttcaagcacttaagaacagcactttattcagttttaataaatttttactaaattggtaaatgcaaaagaatcttttttttattgctcatatgtcttcctgtctctaagccagaccaatgagcaaatacctttaaaactagttgttacatcttgaaccatttaactgtaataaaagcagaatgtttagttaatgaattaaagaacaaaccctgagcccttttatcagtctcctggctttaaactaagccaatgaggaagtgatttgggggattcctgaaactaggaaaaatgtctctttattttgaaagaaacttgcatttttctttctttttttttttttttttaatctcaaaggcaattgagtgggtcttctgggccagacctatttaatttacgaaacatagtaccttgcagagaataggcattgaaatattatttaaacaatcaaaccaaagatgttcttctatcttcagctgtcagtgatctaatgccctcatctctcttatcctcaggacccagaatggtatattccacataaaagatgctttgtttatcaaatgaatcaaaaagcacgcctgaggcatttatttttactcctttacttctgtaggccaggtcaaggtgggtctaattcacttttatcatcagcacttaagaaactggatggaagaccacaacaccttgttttttgcaaaaattttccatctcctcaatcaggccaggaagcatgtatcttctggacaggactttatctctctactcagcttagtacactgccttatattagtccatttgtcccatgttttcatcactgaataaacttgttaaatgacttttggtctggatctcacacctatattacttcatttccttctgtgagcactctataatgataacatcatttttatatcctagggcatgtagttccgagccccacagaaagtaatcaccattcagtaagccaatagttcattcctatctgtatagaactgtaggctttgtaaatctacacatagatctctgttgtaggttcaataatgataataaatgtttgtgcccccagttgttatctctaaggataagagtaatcaatgatcattcagcagatatagcttatatatgggtggcagtttacaaattataaattgattttacacatattttcttctgctacccaagacacaataaagatggtttatctttgcatccccaatgcctagcaatgagattggcacacaatagataactactatagtggcattcttcagacaaccaatcccttgcgtatgcgtattcaaaagataatcattgttattcaaattttcctactttatttgcacaatataataactatcatacaattttataaacctagtacccagcaccaagtgagaaaatcaacagttacatttatatggtgccttagagttcacaaaatgctaacataggtattgccttatttttggctgtggctaaatgaaatatgataaattttcagtgcctttaacagtgagttcacatagtaggcaatcaaaattgatctatttaacaggtatttaaacccttggtttgtataactacttatagaacccttctcactgtggtttaactatacaatgagaattttgtagagacaatacctagcttacagaaagttttattcatacagaaagcatcaaatttttcatttacaagtgctttataatttagaaagcacattcgcaagctgaattaagtgactttcggtctggatctcacatctattacttcatttcctcatactagctctttcctggttacctggaaaaatgtatcagtaataatttaacttaacctcaccagtaaagtcttgattgtttaaaattaagcaatatatcattccttacatctgaatagtatagaggataaactttcctcttattacataggagaattaatcttgtattttacagtacccaaaatagctggtatgtaagaggcacttaatattcattcatccattcattcattcataaatatgtagcccattgacatttgtatcatgctttagtttacaaagcactttaatatgcacctttctgaaattttttgttctatgagaatacttttccccctttggtagctctagcacccagcatggtatctggcacattataggtgaccacaacaagcttagtcccttatgttttcagtatattttaaagtttaaaagcagtttccatgtgttttcgtttctgatacctggaatactgcatttttactcaaaattaccagagcagcaaacacaaattggcctcaaatatacatataatttattcatttatcaaacaattccttgtgtctgcatagtactatatccttttgaaagagcacttttttatgcttgctcctttctttgtatccacaacgcttatcacagtagaatacaagtgctttacagtttacaaagcacattcactattttttttcaggtcacctagatatcaataatcattgcatttttagtgcctagcacagggacaggcacagaaaaggaaactagtagtattcagaaattttctctgaataacaaataatacatcagggggtggtaagctatgaacagcaggccaaatccaattggctcaaaaactaagaatgattttgaccttataaaaacgttgtttaaaaaacaaatatgtaacagaaaccatatggcccacagtctaaagtatttatgatttgaccccttacagaaaaactgtggacccctgatttacataatgcttcacaatttacactgcactttcaaatgttaactgcatgattgccaatacactaattggtttttctcttatgttttacagtgctttcatacacattatcagtcatttaaatcaacttcccacataaacaggaagaaaaaaatcaaggaaagtattaaacatgctcaacagtcccaggttctctcatctttaagcctagagatgggtattaaacccaggagtagcgttggcacagtccaccaaattatttggccactactatgagcagggagttcaggctgtccccttgggacctcgctttgtcccaggcacagtcaccctttccataaccatcactagaaatcccaaaccccagaatcctgctcacctaagctcaaagaaggaagctgttgctggcaggtgcttctcagaagtctggcacatctgtgtatttcttgtctaattcttctcattggcctggagcatctcttcacatttttctctagagagcctggcacttttttttccccaacaacctgaccattttatcttctcagtctagggcttctggggtcaaaagaaaggactgaaatacagtatcacctatatgaatgtctgctcctgagggaagttaacaaaagccagattagatactgactggattttggtgtctctctcaagtggagaagatgtgaatagaaacagaagtttacaaaacactatagcctaacaaataggtaaaagctgtgatttaaagctggctcaagactggcccaggcataatactgtcaatctaaaggtaaccggcaacatcaaaaagtacatctcaaaagaatcaggcttaaagataaacaggagaactggaaatatctaagagtaagaagtgtaaacaatagaaaagaggtagggtttagggttctcatcttgggatttccccaggtcttcaagcttctatccttcctgggttctgggtcatgggcctccagattccggccgttagtcttgagatacctttttcgcttgggtcctctatccatctaggtaggctttgtgacaggggccttccatccttgggttgtaggtcttccagctacaaccctgggctaatcttaggtcgttggccttgtgtcacaagtctcagttcttaggccttccatgtgtcctgtcccaggtcttaagacttctaactcaagccttgagacttccatccaactcaggccttcggtccaattcaggccaccctctgttttcttggctcttgaggcttttgttggtttcaggcctgaggcttctatctatcttggaacatgggctttccatcttagtcctcgggtctcaagtctcaaaccatctgtcttatactttgggccttctatccatatgagccttccaccttctgccctacttgagttctgggttttactgcagtctagggccttgttttggtcttggatcatctcacatggcagcctggcataaggaaccgctccacaatgcttgctctgatagccgacgttctgcacctatcaggcaggggttaggaagcccctctgccacacatgacacacacacacgtacacttgcccacatatgcaaagaaatatttaaggagagattacatgaaatcaaagagagggagatagattcatgaagaggctgaaatactcaaaggtgagtagaaagggaagaagcagagaacaaatacaagccaacagagattaatactgaaatagaaaatcacaaacagcaagagatgctgaggcacgcaggggaggagagagagaatagcccaagagaggcagaaaggaaatgcagaaatgagaaatgtgagataaaaagtagaaacagcagaaaggaggccagactcagaaaaaaggtgaaatttaaaacgaacgagaaggggaaggggtaacaaataatcacagttcacaaagagaaaagagaggtaggcagagaaaggagaggtagacagaacaagaaaaggacaaaaagcacacagcatgtgacccaaaaaggagacatgaaataaagcgtgaaagaagagccacatctaggagagcaaagagaaatagcaacaaaatgaaaaatgagagatatgtctaagacaagacacagaccactcttgtgaacaaaaagagaaaatgaggcaaaggcacacacgaaagaaattagcaagagaaacatggaaatgggtaagacacactttagatagagaacaaagagcaaagacaagaaagaaagagacaaagaaatacacacttgagtgcaagagataagcaaaggcagacattcagaggaagtaagtagtagaagaggcaagatacagtgaggggcacaagaggcatgaaaagcatcacagaaagataaaaaaaatcaaaaagtgtcattagtaattataataaactattgttactacgaatactacttatagtactacaataataacaaccaccaataccaacacagatgctcttctatttataaacttttaccttagggatttcttacatagaaccaaagcatgccaactctgcctgctacctgatagtgctagtggtcacttatattgtgggaaatgaacttatgagtcttcttgggttaccttttacttgacatgtgccaggcactgcaataggtgagcactttacatacatgatttcatttaaccctcacaaacagagaagtctagagactttaagttgtcaaaggtcatatacctaatgagtagcagaggatttaaaacacacaatgtatgcctcttaacatcctgttacaactatttactaggatttctggaagagccaaatgggatgtcacagatgactaagtattttcataaaaggctctttgataggacttgctcaatcccctcctttagcatcacctttccccaactctttagaaaactgacttcattctcacacttttataatggctacttcagagtttagttttctttttacactaatcttaactgacgacagagtctctcacaaacggagatgagaaagggttaccctttcagcagaaagcagaaatggtgttttaagcttctcaacgtttaaggctctaagaatgacagagggcctatacagtgaagacatagaacacacaagcaaaggctaaattcttctgtgatacaactggtaagaagaccataatgtctttgagttgcttcagtgaacccagtcagtaatatggaagactggtcatctttccatctcacatttagccccacttcacattagaccaacacaccccatccaacaccagctcccaaaaaacagctgttataacagttctgaagtgatcctcacaggactgcaacatcaacaacttacttcattcagctatcctcaagtgctagagtgccaggcatgttgatcttcaggtgggaaggctgacttccttcagtgtgttcaaatttcttggacctgctgaagactcagctctctgcactgcttgtaggaagtataatgatttggcagataggaacaatgaagag

SEQ ID NO: 22459 - DNA, 1649 bp, Homo sapiens
  misc_feature 1..1649: note = ENST00000545802
  source 1..1649: mol_type = unassigned DNA; mol_type = unassigned DNA
cggcaaccgcacagctgcctcggactctgacttaattccctccgcgtgctctgaatcgcagagaggcaaacccccaaacaaagagccggcagctcgcgtgcggggctcccgggcgcgtcctgccggctgggctgggagagccggcgccggggcgtcgcggccgagcgctgggcaggcggggactagagggccggcaggaagcctcagtgggcgcaggggcgcgggccgggctgcccacacgctgaccttcccgggctgggagggaggagcgctggctgcgggcggtgggcggctgggcggccccgggagccgccgctctcagtctctctaggcgcagctcccttcgccgcttccggagcccctggcagggcccagaagccatggcccactataagactgagcaggacgactggctgatcatctacttgaagtatttactctttgtcttcaacttcttcttctgggtgagtgaattctgcacacacatcctcttccccgagcactgaatgagtcaagccaccttttgtttttttgtgtcaccactttgaggttgatatcttccaaatcaaagatcaacgatcaaccatgggtgaattcttcccactttaaagcaaatatgtacatttgctactgagaaagaagaaaagaattgggtctgcaggttggcatggagtttgtaccacatggcatctgaatagaggcacaaacataacaataggctttgtgttctagccctgctgtacaaagggtccggttctttcttccccactaacttgttgcaccagcgccttttggaaaatgtgactgcctgaaataataacttgttttccactgaaatccattcacctttcatggttaacattctccaggcccagggcagagaaacagaagtcctggaggctccaactactgctgcctgtgatgaaaataatctctatggcaactctcctcaggagcctgcctgggtgaggtcttccagaggagtgtagtctgtccacttgaagcaatcatctgggtaattgggagcagaataccatcagttcccaaaaatagacactggaatatatatatttgttattacagtctcactaaatttgagaaggtagaagagtgacaagagtgcaggctttgcaggcagctgtacccatgctctgctgactactaatggtggagccttgggcaacttacctaacttcaaggaatctgcttccccagctgcaattcaatgataatttctagcctgttggggttgcattcagtaaatgcagtattttgaatatattagatgtcaaatgcctgaaaataccaccaaatcaacccatgataaggcatagctgggcttcctgctaccatggtgagggagaagacacttgacagagtcttagaagcatctcagaaaggcaaatgcagaagtgggggacatgtctgagttttcagggtctttcttgcaggggcttgcttaagattgggaaagaccatgatgtgagagtttaggatgggtagacatggcaaggcaagagttttgaagagtcttggagaataaaccagtcattagatgctatctgttaaaaagttgtgcgatctgctatttgtttaaatgttgtttgcaaagttcctgaaaggaataataaaataatttgtcactttta

SEQ ID NO: 22460 - DNA, 1058 bp, Homo sapiens
  misc_feature 1..1058: note = ENST00000546076
  source 1..1058: mol_type = unassigned DNA; mol_type = unassigned DNA
agtctctctaggcgcagctcccttcgccgcttccggagcccctggcagggcccagaagccatggcccactataagactgagcaggacgactggctgatcatctacttgaagtatttactctttgtcttcaacttcttcttctgggtcgggggagcagccgtcctggctgtgggcatctggaccctggtggagaagagtggctacctcagcgtcctggcctccagcacctttgccgcctccgcctacatcctcatctttgcgggcgtacttgtcatggtgaccggcttcctgggcttcggtgccatcctctgggagcggaagggctgcctctccacgtatttctgcctgttgctcgtcatcttcctggttgagctggtggcgggagtcctggcccatgtgtattaccagaggctgagtgatgaactgaagcagcacttgaaccggactctggctgagaactacgggcagcccggagccacgcagatcaccgcctcagtggaccgactccagcaggatttcaagtgctgtggaagcaacagctcagccgactggcagcacagcacgtacatcctgttgcgggaggccgagggccgccaggtgcccgacagctgctgcaagacagtggtggtgcgctgcggccagcgggcccacccctccaacatctataaggtggagggaggctgcctcaccaagctggagcagttcctggccgaccacctgctgcttatgggggcagtgggcatcggggtggcctgcctgcagatctgcgggatggttctcacctgctgcttgcaccagaggctccagcggcatttttactaatggccaaccacctcctcttccaactgcccctcaagacaacatgtggccacatgccatctgcaaggcctgcagagttagcaccagctccactagggccatagatgccccctcctttgtgcctagctcctgcgaatccaccgagtgcctgagaccatagcttctgtgcccacccaggcagagaccctcggccccctctcctccatttctgagcccccatggccagatcctgggcaggg

SEQ ID NO: 22461 - DNA, 988 bp, Homo sapiens
  misc_feature 1..988: note = ENST00000535215
  source 1..988: mol_type = unassigned DNA; mol_type = unassigned DNA
agactgtcccgagcttcccccgggcgggcagagggaagccggctggggatgaggagtggaggaggcaggaatgcctgggacactcgcggggcatgtgagcaggtcgggggagcagccgtcctggctgtgggcatctggaccctggtggagaagagtggctacctcagcgtcctggcctccagcacctttgccgcctccgcctacatcctcatctttgcgggcgtacttgtcatggtgaccggcttcctgggcttcggtgccatcctctgggagcggaagggctgcctctccacgtatttctgcctgttgctcgtcatcttcctggttgagctggtggcgggagtcctggcccatgtgtattaccagaggctgagtgatgaactgaagcagcacttgaaccggactctggctgagaactacgggcagcccggagccacgcagatcaccgcctcagtggaccgactccagcaggatttcaagtgctgtggaagcaacagctcagccgactggcagcacagcacgtacatcctgttgcgggaggccgagggccgccaggtgcccgacagctgctgcaagacagtggtggtgcgctgcggccagcgggcccacccctccaacatctataaggtggagggaggctgcctcaccaagctggagcagttcctggccgaccacctgctgcttatgggggcagtgggcatcggggtggcctgcctgcagatctgcgggatggttctcacctgctgcttgcaccagaggctccagcggcatttttactaatggccaaccacctcctcttccaactgcccctcaagacaacatgtggccacatgccatctgcaaggcctgcagagttagcaccagctccactagggccatagatgccccctcctttgtgcctagctcctgcgaatccaccgagtgcctgagaccatagcttctgtgcccacccaggcagagaccctcggccccctctcctccatttctg

SEQ ID NO: 22462 - DNA, 5505 bp, Homo sapiens
  misc_feature 1..5505: note = ENST00000261177
  source 1..5505: mol_type = unassigned DNA; mol_type = unassigned DNA
agtggaggaggcaggaatgcctgggacactcgcggggcatgtgagcaggcccagaagccatggcccactataagactgagcaggacgactggctgatcatctacttgaagtatttactctttgtcttcaacttcttcttctgggtcgggggagcagccgtcctggctgtgggcatctggaccctggtggagaagagtggctacctcagcgtcctggcctccagcacctttgccgcctccgcctacatcctcatctttgcgggcgtacttgtcatggtgaccggcttcctgggcttcggtgccatcctctgggagcggaagggctgcctctccacgtatttctgcctgttgctcgtcatcttcctggttgagctggtggcgggagtcctggcccatgtgtattaccagaggctgagtgatgaactgaagcagcacttgaaccggactctggctgagaactacgggcagcccggagccacgcagatcaccgcctcagtggaccgactccagcaggatttcaagtgctgtggaagcaacagctcagccgactggcagcacagcacgtacatcctgttgcgggaggccgagggccgccaggtgcccgacagctgctgcaagacagtggtggtgcgctgcggccagcgggcccacccctccaacatctataaggtggagggaggctgcctcaccaagctggagcagttcctggccgaccacctgctgcttatgggggcagtgggcatcggggtggcctgcctgcagatctgcgggatggttctcacctgctgcttgcaccagaggctccagcggcatttttactaatggccaaccacctcctcttccaactgcccctcaagacaacatgtggccacatgccatctgcaaggcctgcagagttagcaccagctccactagggccatagatgccccctcctttgtgcctagctcctgcgaatccaccgagtgcctgagaccatagcttctgtgcccacccaggcagagaccctcggccccctctcctccatttctgagcccccatggccagatcctgggcagggaaatgatcctttcaggagacaaccagagcccctcaccaggaacgggggcacccgtggactacgggagggtggcggttgggttctctgctccctcccagctcctgaacctggaacaatcggcagaaaacccaggaaccccggcactcctgcattcagcacgggattcccccacccatgcccagaagccctgaccttgctgtttctggaaaaagcatggggtggggcagggagggctggcatttcccccagaagaccttgccctttgacctgcccactctccacactgcctcacctggaaagccatgtcctgctggcctcattccttcctgaagggcctaggagtggggaggcctgggtagggcagccacaggctgggtagagccgccctggcaggaagcagggggtaaggtggccataccagcacatgctgcactaggagcagagccctgcacctgcctagctgccttcctgggagaaacctccctgggagaccatggccccaagccctggcctctagtgatacgcccctcgggaatctcctgttccggggcctgattctcaggaacaccaggtttcagaccatcttcagcacctaatgttgatgggtgtcaaacatctcctggagtggaccaactcgcaaccctgcaaagtcggagctgctgagaaggggcagctctgaatagaggggcatctgcctgaacctcacttttcctggggccctctccttgaccccgtagccaccaccacactgcttccagggggtccagctctgcttcccttcccacctgtcctagagtggacagagctttttccttgggttctctcttgcatcactaagttcagcagggaatttgcggaattttcaggaagaactttccccagtaataagggagaacagaaagaaaatcctagaaaatacagagtatccatgctggcagctttttgtacaacacccatagggacccccccaaatggctattacaaaggggcagcccattcactacacaagaaccccacacctggcttccaccctccccagctcctgcacttctccccagagcgggaccctcttacttccccccatgaaggggggcaccttgtgctaaggccaaggctgagcgaggtcccagctcacctccctgcttgatccagattgcactgtgatgagcacattgctgacctaggccagtcctggggcaggcgtgctctctctcccatacataggagtggcctcaaggccacccagtgctgaccccaacagagccctgaactgtccagaaactgcatcctcagcacaggaagtacccacatggacagagggaagcccagcctcggggccggttgcctcctcttctctgggtgttctccagtggcttcttggagcctaggctggtttatctcccctgcctaaaaggccctggggttgccaatgcaaattcattaaaacgaagaccagatatcccagactgcacagaggccgagagaaatggtatagtgcgtgattagcattgctgccctccaacctcctgggattcatgcagataatcaaaaactgactatgactcccaagttctctgaaggatgagatcacaactgacaactcttacgacagagggagagtggtgagagagagaaagagggtactgggctagagccatgttcttcctgccgaggtgccagggggaggcggcagtgggcagggggtgctggggccttacctgtctgccctggtggggatgaaagacaggtgacaggcaggtgccctgtgcacagccttatcattgaaggcaggcccaggacagcctgccccatctgccccagccccatgggatggttggtccagcctgactggggcaggattagctgcaattcctgccctgtgtgtcgtccagccagactgcctcttgaaagatggcttgtccaagcggcagacagtggtagaacaacccagggcttggaaatctgacctccttgtccatgccaacagcctgggagatgagacagggttagaggaaacagaggcccaggatacggcaggttctgcctgggagtgtacaatggttggagtccagagccaacgatgtggtccccagcggggtgtgcccctcctgctgacgagggtacagatccatacccaggtcaattcctcccgggcccctgtttggaggctgctacagccttgagttccttggagagagaggacacgcctgtggaatgtcaccttcagtcccgtgcaggcaaaaggcccctgcacaccagggccctaggaaagcagcatcaggtgctgggatcccacccagctggcacgggcacgttcttgccctgcacactccatgctgcccttccctgagctcgcaggggcagacaccaagagaagggcgcgtccccgagtcccctgggtgacctgtgtcaggacagcaggcaagaatgaaacgtggccttggctgacgggttggaatatttgtgaccgttcttgtctttctccctcctgcttccccggcaccctagccccatctccaggagcccctcaggcagagtaagtggggagtgtgtccagggatttttttgtgtttaccaaggtcctgctgtgcacttagaatctgtcaccataaatacttatctcgcagttaccccagcaagagggtgttatttcccccattttataaaaggaaattaaggctgggcaaagttaagacttgcttgtcagtggtcatggctgttgtcttgccacccccagctggggagaaggaagaaaactgggccgggaacccctcccctcagtgtcccccagttctccatctccataaggagccatcaggctgtcattaaggaacagagtgtcactcagggggcactgtcacaaagcagcacccatggcacatgggccgggggtgcagaagcctggcttatttcaggctgacagctggaccctctgggtgcaggggctcaggcagtggccaagagcccaaagggctaaggcccgtgacgaccacccagcccgtcaccccaggtacaaacactgaccccaaagcaagagcagggactgtccctcagccctcagggccttcatgcagggtgcagaatctcatgtccacatggaggtcacccctcaggtcacacccactcccagagcaaccctgggcagggaggggcaccctggggttgtgttgaccacctccccttcaggtgaggcccttttctgccttctttctagccccctgcatggggcacctgctattgctggggctctggggtggaccctgtgtgatttctgtcagggagcttgtgctgtgcatggccagaggtgtttacatccagaagggcccagcacggccctgtggggtgtggggggaatatggtagatcattgtgatgtgcctcggggccctcttgccttggagccagctttgtttcagaatctgctacttgggccctcttcagggttttgaggctggagaagtgagttgggacagtcactgtcatcaccacccaccctgtcacccacctggaaaacattcttgatatactggccatgctgggccgggctcacatccactgagggtatagtgaccaagcgtctaaaccagtcgttctcaaacttcggtgagtatcagaatcacctggaagggcttttacaaacagattgctggccccaccccccagaatttctcatcaggagtgggcaagaccaatcatttgcatttctgacaagttcccaggagctgcagctgctggccctggaaccacactttgagaaccactgctttagaccaaacaccaaaggaagatgcagccaccctcctttacatgtcacaacgctcagggtccatgagtacctcaggctgtccagctgagctccacctgcagcagccgagattcccgactcgctccaccattgggggctaggagtgaagcgtgtcaccatggtcagctcatggccagccaggaaagcctctctgctgtgcgtctgtgcagttcttgttcttccctggaggactcttggatcgcctgtgatcttggccaggagaccaggtgcctgggtcccttcctggaaggggacaagttacacaccccagccccattttcccaccaacttctacatgccttgggagaacctgctacatgttggctgcccccttcccctatttcagcagtgcccagtcctgcttataaacctgaggcctgctccccataccctgccctgtgcaagtgccagccgttattccaggcagcccaatgttgttgaggccagatggattcctggaagcagctggcccatggatgtgagtcatcacagtattctagaaacagagaagaggtcttaacctaatgcgcatagagaaattgttctcattgtaaacatacccctgtccttagctgatctaggtggaagcccagcttcatgtgctagggggcatgataatgataataaaggaattgtatctagga

SEQ ID NO: 22463 - DNA, 16183 bp, Homo sapiens
  misc_feature 1..16183: note = ENST00000429989
  source 1..16183: mol_type = unassigned DNA; mol_type = unassigned DNA
ccgcaccgggcggcgcagggaagcggcgccccttcctcggcagacggcaggcgccgcgcctccggccccgcccctccgcgcccctccgcgccccgcccccgccgctcggacggcccgagtcgcgccctcccgccccgcgccgcggaacttgctctaacttcctcggccgagccgggccgcgccgccgctgccgccgccgcgcgcggattctgcttctcagaagatgcactattatagatactctaacgccaaggtcagctgctggtacaagtacctccttttcagctacaacatcatcttctggttggctggagttgtcttccttggagtcgggctgtgggcatggagcgaaaagggtgtgctgtccgacctcaccaaagtgacccggatgcatggaatcgaccctgtggtgctggtcctgatggtgggcgtggtgatgttcaccctggggttcgccggctgcgtgggggctctgcgggagaatatctgcttgctcaactttttctgtggcaccatcgtgctcatcttcttcctggagctggctgtggccgtgctggccttcctgttccaggactgggtgagggaccggttccgggagttcttcgagagcaacatcaagtcctaccgggacgatatcgatctgcaaaacctcatcgactcccttcagaaagctaaccagtgctgtggcgcatatggccctgaagactgggacctcaacgtctacttcaattgcagcggtgccagctacagccgagagaagtgcggggtccccttctcctgctgcgtgccagatcctgcgcaaaaagttgtgaacacacagtgtggatatgatgtcaggattcagctgaagagcaagtgggatgagtccatcttcacgaaaggctgcatccaggcgctggaaagctggctcccgcggaacatttacattgtggctggcgtcttcatcgccatctcgctgttgcagatatttggcatcttcctggcaaggacgctgatctcagacatcgaggcagtgaaggccggccatcacttctgaggagcagagttgagggagccgagctgagccacgctgggaggccagagcctttctctgccatcagccctacgtccagagggagaggagccgacacccccagagccagtgccccatcttaagcatcagcgtgacgtgacctctctgtttctgcttgctggtgctgaagaccaagggtcccccttgttacctgcccaaacttgtgactgcatccctctggagtctacccagagacagagaatgtgtctttatgtgggagtggtgactctgaaagacagagagggctcctgtggctgccaggagggcttgactcagaccccctgcagctcaagcatgtctgcaggacaccctggtcccctctccactggcatccagacatctgctttgggtcatccacatctgtgggtgggccgtgggtagagggacccacaggcgtggacagggcatctctctccatcaagcaaagcagcatgggggcctgcccgtaacgggaggcggacgtggccccgctgggcctctgagtgccagcgcagtctgctgggacatgcacatatcaggggttgtttgcaggatcctcagccatgttcaagtgaagtaagcctgagccagtgcgtggactggtgccacgggagtgccttgtccactgtccccctgtgtccaccagctattctcctggcgccggaactgcctctggtcttgatagcattaagccctgatggcgccggtggcgcggtgggcatggttcttcactgagagccggctctccttttcttaaagtgtgtaaatagtttatttataggggtaagaatgttctcacaccatttcacttcctcttcctctcctccagcattctcctctgagcagccttagatagtgtccatggctggagccgaccctttgagtccccttgagtgtcttaagaaccagcccacaacagcctctctttctcctccacatactgcagcctccctccatgcatcccacatacaagcactcccccactccccagcgtggcctcactgtcttctggtcttggtgctactgaaattgtcacccagaatttgaatcctgaccctccccactgcaagcccagggagccccagcccaagatggccagcctgaaactgttggccagggctcctcttgtggccatgtacccagggctggctggcctgccatttgcctctccccggagacagccgttcttctgcaaccacaccccgtgcctagccacaaccccaggctgcagctgctcagaagctccaggcattttgtttctggtgaccgcccctaatgggatatcggtgatcactggtccacccttcctgtcagggcttttctggggctgctcttggaaatgaagtcttaagtactgaataactcccctggggatagctggggcatttgtctagctgggctactttctaacactttgccatagctcagaccacttctcatcgttcagggatggactgcaaccttaatttacttgccggagtgtacattctagtgtggtgtatactggtggctgttgatgatgatttttttttttttacacaattctctgtagactaggagaagaatgcttgtgtttttcggaagtgtgatgcttctctttgactgccaaactcttttatggaatatatctttatattaatgctgttttggtcatttttgtttggggtcactattgagatattgctaagcatctcagtggtaaacgcggctgccagaggaaccaagggatagggtatgtagaccttacagaaggatggatggtaaaggcagtccatcatcagcacaatctgacttacatttcattgagtaattttttttttttttaagattctgtatggcagcactttcagttgcccttgtgtgccggccacagccgcacaagttggcttgtggtttatcccccgctataagtgagagctggagaaacttcaactccataggtctagaggaaacattgttttaggttatttctgtccacccctgtgcgatactatttattgatccaagcagaagagcttggggacactgagtcgaagtggggacatgggattgaagcctgggcactgctgctgcatgagctgtgtgtcctgggtgtgccggcctttctgtgaagggggttggtggcagtgcccacctcactagatgcctctgacccagcctcccctgggggagtgggtggccacagaccctccctgccagagctcctggaaggctcctgcaggcctgacccatctattcctgtagacctggtttaggatgaagtctcggtgcgatttttgcagagttgggtttatctttcaactatagacccttctggctgttctcagccatatcatgtgactctgaatagttggatgaggaatggaaagaaagcaaggatgagagccggtcacgtggcagtctccgcccagcatcggctgtccgcacagaggcacagggcaggcctcctgtgcactccccacctagcactggcctgtcctgaatccccgccttccctggttggaggccagctgtggcatttgcaccctcttctcacctcaccatgcacatgctaactttaaagccttggggtctttcctgtaccccctcctcaaccctggtccaccccctctcaggatcttgtcaacgttatttttcctgtcccgtcttcctatcgctggccttcctttcccatcctaaaaacttgccgaggccctatggctccctccctttctttcccaggcagcttcttatctgggctgtctgtaccccttcctttgcaccacccaccatgccccacgtagctgaaagctgcttatcccaattgtcaactctggccttcttcagcctctgtagcaccagacactgcacctcctgaatgtcctctgcttctctgcttcagaggcccaggctcgccagttctctgacctctcccatatgtctgcttaggactctgctgcagctgtcctcaccagcctccggggaatcccactacccacagggcagggctgtgggctgggctgaaaaaccatctgcatggtccacaagaagcctggcactgggtttccccatgaataacaatgaaaattaatggatgcacaaccttcctggaacgtggaatttctctgggagattccatgcagaggccactggggaggtggcaggcatgcatgtgactgtaggtggctgcagtgttggaaggctcccagcagagcagagagggtgtcagtctcatcagggaacccacctgatggcttctcagccagcagtctcagaggaacatagacgactgctgagaaaggagggaggcagcagtggtcccagcacctgaggcatcctgctgtcatgggaaggtctccgcccaaatgtcagatgcatcagcctgtcacccgctggtccagagctttcagctgtactggtagggggtgggtggtggagtgctgaatgaccttcacaggtgggcctttccagctctagggtcttacgggtgtcggtccacagaaccacggtttttaggttgtgtgtccggggctatgggaacctgtcccccatgatggatcttggtagagacacttccctctgtcatcgtgcccaggaggatgctgcaggtgactacctgcagccctgttctcattcatttggatgccctccagaaatctggggagccatacacctttagagccttttttgctccttatcaagttggcaaggcttggccaattcctgttcaaggctgcattaaaggcatgttcaccatcctggctaatacggtgaaaccccttctctactaaaaatacaaaaaaattagccgggcttggtggcgggtgcctgtagtcccagctactccggaggctgaggcaggggaatggtgtgaacccaggaggcggagcttgcagtgagccgagatcacaccactgcactccagcctgggctcaaaaaagaaaaaaaaaaaaaaaaaaaggcccgttcattctcaaatgcttttggcgtctccagggtgcctcaggaaaacatgaagtgggcattgtagaacttggggctactgtgtaactttggaagaaaaagttaagggtacttttaagtggatactgttttgatgaaattgccaacttcagggagcccagcttggagaaggaggacgtgagtattccttacaaggctccgaaacaattctttcttcacttagttttctttctgtgctctgcatcttatattccagcagggtcttccaatgcatggtttaataactactagaactggccaggtgcagtggctcacgcctgtaatcccagaactttgggaggctaagacaggcagatcacttgaggccaggagttcgagaccagcctggacaacatggtgatacccagtttctactaaaaatacaaaaattagtcgggcatggtgatgtgcacctgtagtcccagctgctcgggaggctgaggcaggagaatcgcttgaacccgggagacagaggttgcaacgagccaagatcgagccactgcgctccggcctgggtgacaggagactccatctcaaaaaataaaattaaaaaaaaactactacaataaattatcaccttggactgtataaaacaacttttaaactagtctttttaaaaagtacacttaaataaaaatctaaacataagagaatgtaaagtgaaaagtgaaagtatgtcttctgttacgcagaggtaactactattaggaatccttcctgaaaatgtccatgcatctactcaggtcatcacacccatggaatcattttacatactattttatgagtgttacttaatatactgatccacagtgcgttttcacggtcacgccatcagttgtaggagtgtgccaagaacagatgggccttgcctttgtaccagaggagtccatttacagttgcaggtaatagaaaacccaattcagactggcctaaacaatgaggggaggttttggctcttgaaactggaaagtcccaaggtggggtgagtttcaggtttgggttgatccaagtggctcagtgacgtcaacaggatcttgtttccatttctctgccttccacagcctccccttcatctatggtggagggaaggagtctaccacagacaaaccccgagcctccccctgatgggtggtgtggtggtgaagccagcaagggaagggatccccggacacacccctcctcatgctttatcccactgaaaccatgcggctgtgaaatgcagcatcctccaggagggggatgaaggccggggatgctgtcagctattgccattgcacttctgtggatgggtgttacagttttttgcagggttttgcacttacaaggacatatatatatatatataaactacagtgttattggaattgcttcttacagtttgtaagaaaaaaacatgtttttagaggagttctcctgggaggtgggatcacatttttttttttttttttttttgagacggagtctcgctctgtggcccaggcgggagtgcagtggcgcaatctcggctcactgcaagctccgcctcccgggttcacgccattctcctgcctcagcctcccgagtagctgggactacaggcgcccgccactacgcccggctaattttttttgtatttttagtagagacggggtttcaccgtgttagccaggatgggggatcacattttaataagtaggtactcagggctggggtgtacctgttgctgcctgaccactgctggtgtgtgtgggtataaggtgacaaaacctcctacccctgtgaggttgtttcaaggattaaatgagttgagatgggtaagcatctaacaaagatccagattatttagtatgcatcccctgaattattgctaacataattttaatgattggggaattttatctgtggctgccagtccctacgagagagctgcctgggtcacatgtcagatagctcaagctttgaatcactgaaacgaaacggtccacttccctgtccctttaggaacaaggcttcgaggtctgtggcaagcctcagcaggcatttggagttcaaggtctgttctctttctgtgccatagaggtggggagacaaggtagggtgttgcttcttgcctggagcgcagatgctaccagaaaccaacacaaccaaagttgcccgggagcccccagaagcagcagagtggccatcaactgccaaggggccagggtaggccacagaggcctggggcccaggagggatggtctgtggggagaaaggggattattgtgaacatcaacgctggggataatgtgccctgaagacagcagcatatcacgtttggacggttggtggaccccatctggtcccactcataaggagaacagaggccctggggtgtgctgggacttgcctgaggcctcagaccgggactgggtgctcctccgcacctcctatgagggagggtgtccgtgtctgtgaggacagctcagcagggctgggaacctgggggcagtgctgggggacatgtgtgagactagcgtgtgtgggccttgctcggcttgccctggtgccctgagaaaaacctggtatttgaaaatacacatggactgctggaaggtcaggaaatccagggttttgttctgaggcagtggaagtgttaccgtgagcctgtgttggcctctctcctcactccacctgcagccaattcagccacactgcctttgcatggaacccagggttgcaggccgcgtgtgtagatgctgatttaggcccaagcactcagctgtcagcaggaaggaccatagtgttttcttctagttttagatatgcactcgttctgtgttttaaagtcacagctgtgagccaatatgggaagaagtgaagtggcctctaggagggactgagcaccctgtccttggaggtatgcaagcccaggctacacccttcctgtctgggatgatatggctgggggtgggctttgtgctgcgtggaccatggcaagcctttccatctctgagaggtagtggtccttcccgtgccttctgttaaagataattttttaaaaaaaggcataactcatatatattacatgtacacatgtcaaagattttatttaactcagtaattgagagtgctgctaagattaacagccagttcaaaagagaaatcacaatgaaccataaatctgtatggagtaaaggaaagttgaaactggctggggtttttttttttttttttttttttgaggagaaaggtcaattgaatcttattcgtataatatgcacatccatagacaagaattattttgcattaactctacaacttagttgtaaaaatagctcaaaggcagtgaaagactagaatcagataattggaagggtgcaccctaagcaatgcatagttctattttctttctttttttttttgagacagagtttccctcttgtcacacaggctggagcgcagtggtgcaatcttggctcattgcaacctctgcctcccgggttcaagtgattctcctgactcagcctcctgagtagctgggattacaggcgcatgccaccacaactggctaatttttgtatttttagtagatacagggtttcactgtgttggccaggttggtctcatactcctgacctcaggtgatccacccgcctcggcctcccaaaatgttgggattacaggcgtcagccaccacgcccggccccaatgcatagttttttactgaagacaaccagaatctctgttgcttattccaaatttccttccaccacttgtccatccagcagagccacttttaaaataggacacaggcagaaatttaaaggagtcaatatctcatggtgaaaagtgaatcctgagggttagagcatccaccaggtgccctaggtaagggccagccactctgggaggcagcccggggcactcactgtcctctcagtagtaaatgaaatcactcaggccatgtctgctacccagagagcctgagtgtcctcaaatgcttgttctgcctctccatccactcctgcagacacctcagtggctgcatcccaaaccgctgaactttgcttctctttctccaacccccaattccacccacatccaaaactgctctgccccctattcccatctcagctgagggtactatcatccaccctgtggccacatccaggaatgtgtgtatcacctgggctctgaggatgacatcagctcttctaagtcaacagaatgtcgggtctgttctaaaagtctcatctgacaaggagatctttaaggctttactcccttaaaggctttactcccatcatgatgggataaccatcatgatggatttcagtgtcattctgtctttttcttcggaatgattcctgggactcgccttgtttgcaacatgtgcattgaaatatcttttcaacataactttgttcttaattgtgtttacttcctttctctgtgaatctcagtgattcctggaagctgtggttggtgggggatggggtgggaggactttggtagtataaaagagtacctgcaatgaatgttctaagaaactggagtgttggggtcctccagcccttggctggtaaactctccactccttcctctttgcaacacaattctcataactggcaaaggtgtgcatgtaaaatttgtgactgtagtctgaggttttttttccctgtacaattccgccttcccccctgtaagcctgtaccaggagaggtctcagctgccttggaggcggtgagacacgtgggtgctcactgtggccctcaagggtgaggctggcactggggcatctggggccagaagtcctcctttagtcccaagtctctgccactcaagtgcatcagtgagaggtcctcatagaaaatctactgtgggcacaaagctgccaggctgatgggggtggggagcaaacgaacacccttttccccttttacaccagaggaaagagacttagactgaggaacttgcctgctgccagacagctgggaggtggtagaaccgggcttacagcccagggtttccactctaggaactcttctcccttcctctgatgacactaactcgcaggccatgatcaatgagcaacgatgtaggcaggcactgacgaggcacagcaggaaggcagctcagtgcccatgacggccaggaactgggtaccatttcctcagcaaaatgggatagtaactcccacactgcagctacgcacttgggcagtggttcacaaggccagcagccacaacatcaccccagaccagcagcagctgcagcattacccccagcacttgttaaaagatgcaaattcaggccaggtgtggtggctcgtgcctgtaatcccagtactttgggaagccaaggcgggtgggtcacctgaggtcaggagttcgagaccagcctggccaatgtggtgaaaccctgtctctactaaaaatacaaaaaatgacccgggcatggttgtgggcgcctgtaatcccagctacccaggagaccgaggcaggagaatcacttgaacccgggaggcagaggttgcagtcagccgagattgtgccattacactccagcctgggcaacaagagcgaaactctgtttcaataaataaataaaaatgcaaattgtatgccccttccttcaggcctatgggaccaaaaactgggatggggcccaataaaatgttttaaccagcccttcggtggttacagaaggatagagccagaatagactaaccactgtaacaaacattacctatacttgggaggctttgaaaaatgtttatttagccgggtgcggtggctcacgcctgtaatcccaacactttgggaggctgaggcgggcggatcacgaggtcaggagattgagaccagcctggctaacacagtgaaaccccgtctctactaaaaatacaaaaaattagccaggtgtggtggcaggtgcctgtagtcccagctactctggaggctgaggcagtagaatttcttgaacccaggaggcggggcttgcagtaagtcgagatcacgccactgcactccagcctgggtgacagagtgagactccatctcaaaaaaaaaaaaaaaggaaagaaaaatgtttatttttttgctcatgccacagtctctggtagttgctgggaactagggtgggggattctctgctccacacagtctttcatggacccaggttcctttcctgttgtgggtccagcctcctgtagctgttggaggcatctctagtcagctggtggttggggaagaggtgaggatcagggagggaagatggagagtactctgcttgttctcacattctgctggccagaactcacaagccacctgaaatgatgcaaaggtctagctgtgtgtgtaggagaaagaagagaggccagatattggaagacagcagtggtctgtgccccaggccccatggtttagggaagtgaaccttggcactggatttcctggctttctaaatctccctttatagggaacttagggcccagtctgtggtgggtggatttgcctggttcacagcctctggtcagccttctttctgctccacagggcggcctggagatggtgggctccttgtcacactggttggggatgtgggctccatggggccagagatgtgtgtgctctgtgttcagattaagggacagacggcacatgaattccttcagtgccctccagatttggtcactggggaggggtaggctgagcagtagctcttgggtctgtagtagtgtgaccctggaaggactgtccagctgaaaacaagagcctggggcgtggggaggggaggggttactcagggttccatgagacctgggtttaagtcctggatccatcattagcagctatgtgaacttatgcctcactttcctcaaatatgaacttgagataatgaaattaccttcctcataatactgttctaagaattgaatgaggaaaggtttacaattcggccctggttgttccactggggagggaacagagattgggggcacagggctcccctggcctgggggagtctggctcactcaagttctcagtcatttgcaaggcaaggaccctgcttctccttgctctgggtccgagtagtctcaagcccagtgggcagggcctgtggtgtggatggactcgtctgcagtgagtcaggcagcaggcagagctggcaggctgtgtggtctctagtgggtaccaggggacctgggagggccttgtgggaggttgtccacggtgtgagccagtttgccatctggggtcctggagttccctcccgccctttgagttaaaaagagtcagtcctgggctgagacttaattgcgctagtgctgagtgaccttgtgtcaggggaaatcggatggggcaaagtgttttttaattagcaggactcactgacctttccttcactgtcagcaacttctcacagggaggcagagcaaggggggctggagccccgcatctctctaatggagcctatgtccaacaaggaggtggatggctggattcagggccctgggaggacttcatgtgggaagcagacctcaggaagggcccttagtgatggtgtgggccagggttctcacctccttagtctcctgtcctgtccatctccgcagatcctaggcaaaagaagcggagaaacactcaagccactggggtggttagggcacactggtggcaactgtttaaaaccttaactaaaacaaggttaagcaaaaggagtttacaggctctcatagatgggaaggatgtgggagggtcacagactgagaggaaccagggctgtggctgctggaaggagcctcaccaccgccagtgtgtttcctccccgtcgtcggcatctctgcttctctctgcacgccagcagctctctcttagggcacgcagacctttcctctgcaggggaacacgagtgccggcagccccgagttagtgactatcatagaaactcagtgtatttctctcttgtttatcattccgagtcctgagtcacaggcttgtccagcactcaagactttttcttttctctattttttgaaacggattctcgctctgtcccccaggctggagtgcagtggcccgattttgggtgcaagcgattctcctgcctcaacctcccgagtagctgggactacaggtgtgcgccaccacatccagctaatttttgtatttttagtagagacggagtttcactatgttggccaggctggtttcaaactcctgacctcccgccggcctcagcctcccaaagtgctgggattacaggcatgagccaccacgcctggccaagattttttcttttaaacctggagtatggagatgctcactaggcagacagaatcagccaccacagcccactccctcagccagtattactttgactaagttagtgaggaaccaggccccagattaagaagcagaactcacactgtcatctgctgtgtgcctggctggctcatgcataccttgtctatctaatgtggaccaaagccctgtggcacaccctgctggttacccccagtggttaccctggcacagaggaggaaagggagtcgtgggagggagaaggacttccctgggaggtctctgggctggcaagttgggtgacacaggtccggttggctgcaagcctgggctctgctgttgtaatcataaatgtgtgtgtgtgtacagttgtttacaatgtcagcatgggtgtccttgtttgttagagatacatgccactgctcccatcatgaggaaaatcccaagccctccccatgatttttgccagtttctggggactcatgctcctggcagcccatgtgtccccaactcctgtgtcctttagggacctctgttgagccctgcctctattctggcagaattagagaaaattctttaaaaaaacaataaagtttaaattcatttaaaaaaataataaaaaatctcacagcatgagttttgatgagatttggggcaaggtgggccacaaccttgggttgtatggccacctccccctcttcttcccctgttgtctctgcagctcagaaaccccaatttcctggcctgtgttatgtggaggagctgagctcaccccctacagcttcatctccaaacctagcaaggatcctgcccagatcaggagatcctccttttaacagaagttatttacactccttagaaagcagtgggggtggaacgattctttttcctgatgcagagatgtaaaactgggacattgctacacataatattttaaacctgtcttccctcttaccaacgaacacatcactagcaccatctatgccaatacatttctcaacatcaatttcagtggctgtattacattttatcctacggatgtgctctcatttataatctaaaccacttttattgaacacatcagttattctgaaattttcagtgttatgatggatgttgcagtaattattcttatatatgcacagaacccccagaggacatgactactgaaggctgtgctggcaggatcacaggtaaggatctagcaaattgtcccagcttcattgactgagctttcatccttgttgcactactttgagctgccattttgatcatataataatgatttagtagagctcttttttggttcaacctacctgttcttgtatcagaactgaaatgtttgattttataaatttgaatagtggcacaatatagagttcactattcctcaatattttcaaggctgtttcttatctgttcattcttttggttaacttgggaattattttatcaagtctctctacttcccaatttcctttcacctttggctcgaaatgatattcaatgtatacattaacttgagttacattttgctgcataatgcttgagttacattttgagtattacgtgttactcataatacatattgagttacattttgctgcataatacattatccccaagtttaacaccttaaagcagcacatatatatctcatacccttctgagggtcaggaatctagaagcagcttagctgggtgactgtggctctgggtctctcatgaggctgcagtgaaactgttggccagggctggaggatcccttccaacctcactccatgactgttggtgggaggcttcagttctccacctggttctcacaatataatttcccccagagtgagttatcagagagagtgtgcaaccagtaatctgttagaatatgtcacgtctgtcatatttgattggtcactcagaccaaccctaatagatgcgagagtgactatgcaagggtgtgagttccaggaggaaagcatcattggaaccatcttggagactggctaatacacagataaatggcacatctgacaatatggcatctttctgagtgtcagtgtggtgtgttcctatatgaacttaatgctattaaacttaattaaattgtaggtatgctctcagtgaagatttttacttttacattacaggtttccacactgttaaattcattccaagtatttcatacatgctgttcctattatgaaaggatcttttttttcacatggcattttctaagtagttgttgcattcatataggagatgctattgattttgacacccataatttttcagtggagacaaggcagaaactactccagactctcacctgctgttgctgatccttacatggtggctgtgccaggctcagccgcgctgagatgacagggctgtctggccatcattggtcatatggacttcagatttgaaaggattttatgtagaagcagagtgcctgataggactctccgggacccccatttctgccctgcttggctcccactggcaaggctggctcagttcctgtcaccttctcctggactttggccagagtccactggctgtttcccctgcctcctgctctcccagtgccctctccacaccagtgccagagctgcttctaagagatgcctcaaagcccgcttccagcttaggaaccccagggaacatggatggtttctccattgccacttcctagccttcctggcataggaaggtctggtttgcctgcaggtccctctctgggggggtccctgctccatagatgctgaggctccagaagtctgttcttttatatcacatttgaaaacctttgaaatgcattatagttgagtcatatgaattatgtaagtatatcctactcattgtataaaacaacacagaattgt

SEQ ID NO: 22464 - DNA, 808 bp, Homo sapiens
  misc_feature 1..808: note = ENST00000481124
  source 1..808: mol_type = unassigned DNA; mol_type = unassigned DNA
cgccgctcggacggcccgagtcgcgccctcccgccccgcgccgcggaacttgctctaacttcctcggccgagccgggccgcgccgccgctgccgccgccgcgcgcggattctgcttctcagaagatgcactattatagatactctaacgccaaggtcagctgctggtacaagtacctccttttcagctacaacatcatcttctggaaccagtgctgtggcgcatatggccctgaagactgggacctcaacgtctacttcaattgcagcggtgccagctacagccgagagaagtgcggggtccccttctcctgctgcgtgccagatcctgcgcaaaaagttgtgaacacacagtgtggatatgatgtcaggattcagctgaagagcaagtgggatgagtccatcttcacgaaaggctgcatccaggcgctggaaagctggctcccgcggaacatttacattgtggctggcgtcttcatcgccatctcgctgttgcagatatttggcatcttcctggcaaggacgctgatctcagacatcgaggcagtgaaggccggccatcacttctgaggagcagagttgagggagccgagctgagccacgctgggaggccagagcctttctctgccatcagccctacgtccagagggagaggagccgacacccccagagccagtgccccatcttaagcatcagcgtgacgtgacctctctgtttctgcttgctggtgctgaagaccaagggtcccccttgttacctgcccaaacttgtgactgcatccctctggagtctacccagagacagagaatg

SEQ ID NO: 22465 - DNA, 855 bp, Homo sapiens
  misc_feature 1..855: note = ENST00000372157
  source 1..855: mol_type = unassigned DNA; mol_type = unassigned DNA
acttcctcggccgagccgggccgcgccgccgctgccgccgccgcgcgcggattctgcttctcagaagatgcactattatagatactctaacgccaaggtcagctgctggtacaagtacctccttttcagctacaacatcatcttctggttggctggagttgtcttccttggagtcgggctgtgggcatggagcgaaaagtgctgccctgctttctctgtctctttcagggtgtgctgtccgacctcaccaaagtgacccggatgcatggaatcgaccctgtggtgctggtcctgatggtgggcgtggtgatgttcaccctggggttcgccggctgcgtgggggctctgcgggagaatatctgcttgctcaactttttctgtggcaccatcgtgctcatcttcttcctggagctggctgtggccgtgctggccttcctgttccaggactgggtgagggaccggttccgggagttcttcgagagcaacatcaagtcctaccgggacgatatcgatctgcaaaacctcatcgactcccttcagaaagctaaccagtgctgtggcgcatatggccctgaagactgggacctcaacgtctacttcaattgcagcggtgccagctacagccgagagaagtgcggggtccccttctcctgctgcgtgccagatcctgcgcaaaaagttgtgaacacacagtgtggatatgatgtcaggattcagctgaagagcaagtgggatgagtccatcttcacgaaaggctgcatccaggcgctggaaagctggctcccgcggaacatttacattgtggctggcgtcttcatcgccatctcgctgttgcagatatttggcatcttcctg

SEQ ID NO: 22466 - DNA, 959 bp, Homo sapiens
  misc_feature 1..959: note = ENST00000469149
  source 1..959: mol_type = unassigned DNA
cggccgagccgggccgcgccgccgctgccgccgccgcgcgcggattctgcttctcagaagatgcactattatagatactctaacgccaaggtcagctgctggtacaagtacctccttttcagctacaacatcatcttctggttggctggagttgtcttccttggagtcgggctgtgggcatggagcgaaaagggtgtgctgtccgacctcaccaaagtgacccggatgcatggaatcgaccctgtggtgctggtcctgatggtgggcgtggtgatgttcaccctggggttcgccggctgcgtgggggctctgcgggagaatatctgcttgctcaactttttctgtggcaccatcgtgctcatcttcttcctggagctggctgtggccgtgctggccttcctgttccaggactgggtgagggaccggttccgggagttcttcgagagcaacatcaagtcctaccgggacgatatcgatctgcaaaacctcatcgactcccttcagaaagctgtaagcacctccccagcgggcccccgatagagcatgcacctccctgtgctgcctggagctgagtctagcaggggcatcaggccttctctgtgggttgtctgcctgcagcttggcagacagcagggaggccgtggaacaagccactccacctctggtctgttccactttgccggcttgtggttgcctggtgggccagccctttcccattgggattgggcaggcaagtccagctgtacccgaggccacccaccccccacgtgcccggccctcctctttcggccccagatctttccaatcctgcccaatagccataccagctgcaatcctccttaggcgctgcataccgtaaggcacagcttcttccccccggctcatgactcaccatctgacgctattcctatccccttcctccccgggaccttttccccttcctccctgggaccttttcc

SEQ ID NO: 22467 - DNA, 5476 bp, Homo sapiens
  misc_feature 1..5476: note = ENST00000372164
  source 1..5476: mol_type = unassigned DNA
ggccgagccgggccgcgccgccgctgccgccgccgcgcgcggattctgcttctcagaagatgcactattatagatactctaacgccaaggtcagctgctggtacaagtacctccttttcagctacaacatcatcttctggggtgtgctgtccgacctcaccaaagtgacccggatgcatggaatcgaccctgtggtgctggtcctgatggtgggcgtggtgatgttcaccctggggttcgccggctgcgtgggggctctgcgggagaatatctgcttgctcaactttttctgtggcaccatcgtgctcatcttcttcctggagctggctgtggccgtgctggccttcctgttccaggactgggtgagggaccggttccgggagttcttcgagagcaacatcaagtcctaccgggacgatatcgatctgcaaaacctcatcgactcccttcagaaagctaaccagtgctgtggcgcatatggccctgaagactgggacctcaacgtctacttcaattgcagcggtgccagctacagccgagagaagtgcggggtccccttctcctgctgcgtgccagatcctgcgcaaaaagttgtgaacacacagtgtggatatgatgtcaggattcagctgaagagcaagtgggatgagtccatcttcacgaaaggctgcatccaggcgctggaaagctggctcccgcggaacatttacattgtggctggcgtcttcatcgccatctcgctgttgcagatatttggcatcttcctggcaaggacgctgatctcagacatcgaggcagtgaaggccggccatcacttctgaggagcagagttgagggagccgagctgagccacgctgggaggccagagcctttctctgccatcagccctacgtccagagggagaggagccgacacccccagagccagtgccccatcttaagcatcagcgtgacgtgacctctctgtttctgcttgctggtgctgaagaccaagggtcccccttgttacctgcccaaacttgtgactgcatccctctggagtctacccagagacagagaatgtgtctttatgtgggagtggtgactctgaaagacagagagggctcctgtggctgccaggagggcttgactcagaccccctgcagctcaagcatgtctgcaggacaccctggtcccctctccactggcatccagacatctgctttgggtcatccacatctgtgggtgggccgtgggtagagggacccacaggcgtggacagggcatctctctccatcaagcaaagcagcatgggggcctgcccgtaacgggaggcggacgtggccccgctgggcctctgagtgccagcgcagtctgctgggacatgcacatatcaggggttgtttgcaggatcctcagccatgttcaagtgaagtaagcctgagccagtgcgtggactggtgccacgggagtgccttgtccactgtccccctgtgtccaccagctattctcctggcgccggaactgcctctggtcttgatagcattaagccctgatggcgccggtggcgcggtgggcatggttcttcactgagagccggctctccttttcttaaagtgtgtaaatagtttatttataggggtaagaatgttctcacaccatttcacttcctcttcctctcctccagcattctcctctgagcagccttagatagtgtccatggctggagccgaccctttgagtccccttgagtgtcttaagaaccagcccacaacagcctctctttctcctccacatactgcagcctccctccatgcatcccacatacaagcactcccccactccccagcgtggcctcactgtcttctggtcttggtgctactgaaattgtcacccagaatttgaatcctgaccctccccactgcaagcccagggagccccagcccaagatggccagcctgaaactgttggccagggctcctcttgtggccatgtacccagggctggctggcctgccatttgcctctccccggagacagccgttcttctgcaaccacaccccgtgcctagccacaaccccaggctgcagctgctcagaagctccaggcattttgtttctggtgaccgcccctaatgggatatcggtgatcactggtccacccttcctgtcagggcttttctggggctgctcttggaaatgaagtcttaagtactgaataactcccctggggatagctggggcatttgtctagctgggctactttctaacactttgccatagctcagaccacttctcatcgttcagggatggactgcaaccttaatttacttgccggagtgtacattctagtgtggtgtatactggtggctgttgatgatgatttttttttttttacacaattctctgtagactaggagaagaatgcttgtgtttttcggaagtgtgatgcttctctttgactgccaaactcttttatggaatatatctttatattaatgctgttttggtcatttttgtttggggtcactattgagatattgctaagcatctcagtggtaaacgcggctgccagaggaaccaagggatagggtatgtagaccttacagaaggatggatggtaaaggcagtccatcatcagcacaatctgacttacatttcattgagtaattttttttttttttaagattctgtatggcagcactttcagttgcccttgtgtgccggccacagccgcacaagttggcttgtggtttatcccccgctataagtgagagctggagaaacttcaactccataggtctagaggaaacattgttttaggttatttctgtccacccctgtgcgatactatttattgatccaagcagaagagcttggggacactgagtcgaagtggggacatgggattgaagcctgggcactgctgctgcatgagctgtgtgtcctgggtgtgccggcctttctgtgaagggggttggtggcagtgcccacctcactagatgcctctgacccagcctcccctgggggagtgggtggccacagaccctccctgccagagctcctggaaggctcctgcaggcctgacccatctattcctgtagacctggtttaggatgaagtctcggtgcgatttttgcagagttgggtttatctttcaactatagacccttctggctgttctcagccatatcatgtgactctgaatagttggatgaggaatggaaagaaagcaaggatgagagccggtcacgtggcagtctccgcccagcatcggctgtccgcacagaggcacagggcaggcctcctgtgcactccccacctagcactggcctgtcctgaatccccgccttccctggttggaggccagctgtggcatttgcaccctcttctcacctcaccatgcacatgctaactttaaagccttggggtctttcctgtaccccctcctcaaccctggtccaccccctctcaggatcttgtcaacgttatttttcctgtcccgtcttcctatcgctggccttcctttcccatcctaaaaacttgccgaggccctatggctccctccctttctttcccaggcagcttcttatctgggctgtctgtaccccttcctttgcaccacccaccatgccccacgtagctgaaagctgcttatcccaattgtcaactctggccttcttcagcctctgtagcaccagacactgcacctcctgaatgtcctctgcttctctgcttcagaggcccaggctcgccagttctctgacctctcccatatgtctgcttaggactctgctgcagctgtcctcaccagcctccggggaatcccactacccacagggcagggctgtgggctgggctgaaaaaccatctgcatggtccacaagaagcctggcactgggtttccccatgaataacaatgaaaattaatggatgcacaaccttcctggaacgtggaatttctctgggagattccatgcagaggccactggggaggtggcaggcatgcatgtgactgtaggtggctgcagtgttggaaggctcccagcagagcagagagggtgtcagtctcatcagggaacccacctgatggcttctcagccagcagtctcagaggaacatagacgactgctgagaaaggagggaggcagcagtggtcccagcacctgaggcatcctgctgtcatgggaaggtctccgcccaaatgtcagatgcatcagcctgtcacccgctggtccagagctttcagctgtactggtagggggtgggtggtggagtgctgaatgaccttcacaggtgggcctttccagctctagggtcttacgggtgtcggtccacagaaccacggtttttaggttgtgtgtccggggctatgggaacctgtcccccatgatggatcttggtagagacacttccctctgtcatcgtgcccaggaggatgctgcaggtgactacctgcagccctgttctcattcatttggatgccctccagaaatctggggagccatacacctttagagccttttttgctccttatcaagttggcaaggcttggccaattcctgttcaaggctgcattaaaggcatgttcaccatcctggctaatacggtgaaaccccttctctactaaaaatacaaaaaaattagccgggcttggtggcgggtgcctgtagtcccagctactccggaggctgaggcaggggaatggtgtgaacccaggaggcggagcttgcagtgagccgagatcacaccactgcactccagcctgggctcaaaaaagaaaaaaaaaaaaaaaaaaaggcccgttcattctcaaatgcttttggcgtctccagggtgcctcaggaaaacatgaagtgggcattgtagaacttggggctactgtgtaactttggaagaaaaagttaagggtacttttaagtggatactgttttgatgaaattgccaacttcagggagcccagcttggagaaggaggacgtgagtattccttacaaggctccgaaacaattctttcttcacttagttttctttctgtgctctgcatcttatattccagcagggtcttccaatgcatggtttaataactactagaactggccaggtgcagtggctcacgcctgtaatcccagaactttgggaggctaagacaggcagatcacttgaggccaggagttcgagaccagcctggacaacatggtgatacccagtttctactaaaaatacaaaaattagtcgggcatggtgatgtgcacctgtagtcccagctgctcgggaggctgaggcaggagaatcgcttgaacccgggagacagaggttgcaacgagccaagatcgagccactgcgctccggcctgggtgacaggagactccatctcaaaaaataaaattaaaaaaaaactactacaataaattatcaccttggactgtataaaacaacttttaaactagtctttttaaaaagtacacttaaataaaaatctaaacataagagaatgtaaa

SEQ ID NO: 22468 - DNA, 1095 bp, Homo sapiens
  misc_feature 1..1095: note = ENST00000372158
  source 1..1095: mol_type = unassigned DNA; mol_type = unassigned DNA
ctgccgccgccgcgcgcgggacttggggtggagtcgaaagcagggagccctgtgagttgcgttacatccttactattcaaagtgccatccacagacctgctgatgggcagcatgagcatcacctgggagcttgctgcgctgtagaatcttgaggggtctccatccagatcagctgaatcagagtttgcattgttaacaagattctgcttctcagaagatgcactattatagatactctaacgccaaggtcagctgctggtacaagtacctccttttcagctacaacatcatcttctggttggctggagttgtcttccttggagtcgggctgtgggcatggagcgaaaagggtgtgctgtccgacctcaccaaagtgacccggatgcatggaatcgaccctgtggtgctggtcctgatggtgggcgtggtgatgttcaccctggggttcgccggctgcgtgggggctctgcgggagaatatctgcttgctcaactttttctgtggcaccatcgtgctcatcttcttcctggagctggctgtggccgtgctggccttcctgttccaggactgggtgagggaccggttccgggagttcttcgagagcaacatcaagtcctaccgggacgatatcgatctgcaaaacctcatcgactcccttcagaaagctaaccagtgctgtggcgcatatggccctgaagactgggacctcaacgtctacttcaattgcagcggtgccagctacagccgagagaagtgcggggtccccttctcctgctgcgtgccagatcctgcgcaaaaagttgtgaacacacagtgtggatatgatgtcaggattcagctgaagagcaagtgggatgagtccatcttcacgaaaggctgcatccaggcgctggaaagctggctcccgcggaacatttacattgtggctggcgtcttcatcgccatctcgctgttgcagatatttggcatcttcctggcaaggacgctgatctcagacatcgaggcagtgaaggccggccatcacttctgaggagcagagttgagggagccgagctgagccacgctgggaggccagagcctttctctgccatcagc

SEQ ID NO: 22469 - DNA, 1037 bp, Homo sapiens
  misc_feature 1..1037: note = ENST00000341863
  source 1..1037: mol_type = unassigned DNA; mol_type = unassigned DNA
gccgccgccgcgcgcggattctgcttctcagaagatgcactattatagatactctaacgccaaggtcagctgctggtacaagtacctccttttcagctacaacatcatcttctggttggctggagttgtcttccttggagtcgggctgtgggcatggagcgaaaagggtgtgctgtccgacctcaccaaagtgacccggatgcatggaatcgaccctgtggtgctggtcctgatggtgggcgtggtgatgttcaccctggggttcgccggctgcgtgggggctctgcgggagaatatctgcttgctcaactttaaccagtgctgtggcgcatatggccctgaagactgggacctcaacgtctacttcaattgcagcggtgccagctacagccgagagaagtgcggggtccccttctcctgctgcgtgccagatcctgcgcaaaaagttgtgaacacacagtgtggatatgatgtcaggattcagctgaagagcaagtgggatgagtccatcttcacgaaaggctgcatccaggcgctggaaagctggctcccgcggaacatttacattgtggctggcgtcttcatcgccatctcgctgttgcagatatttggcatcttcctggcaaggacgctgatctcagacatcgaggcagtgaaggccggccatcacttctgaggagcagagttgagggagccgagctgagccacgctgggaggccagagcctttctctgccatcagccctacgtccagagggagaggagccgacacccccagagccagtgccccatcttaagcatcagcgtgacgtgacctctctgtttctgcttgctggtgctgaagaccaagggtcccccttgttacctgcccaaacttgtgactgcatccctctggagtctacccagagacagagaatgtgtctttatgtgggagtggtgactctgaaagacagagagggctcctgtggctgccaggagggcttgactcagaccccctgcagctcaagcatgtctgcaggacaccctggtcccctctcca

SEQ ID NO: 22470 - DNA, 1380 bp, Homo sapiens
  misc_feature 1..1380: note = ENST00000372156
  source 1..1380: mol_type = unassigned DNA; mol_type = unassigned DNA
gggcaggctggggttgaaactcttcaccccttgcggtctgtactgcctcccaactgagcagccagggagaaggcctagagcctgtgcctttcagctagatagctggaggaactggctcctccctccttaggctgtgctggcctgagctgggagcctgagagctggggcagttgtctctaaagtggcttctgggattctggtaagaggacttggggtggagtcgaaagcagggagccctgtgagttgagacgaactcttgcaatgttgccttggctggtctcgaactcatcttctgggttcaagctgtccgtctgcctcggactcccaaagtgctaggattacagcgttacatccttactattcaaagtgccatccacagacctgctgatgggcagcatgagcatcacctgggagcttgctgcgctgtagaatcttgaggggtctccatccagatcagctgaatcagagtttgcattgttaacaagattctgcttctcagaagatgcactattatagatactctaacgccaaggtcagctgctggtacaagtacctccttttcagctacaacatcatcttctggttggctggagttgtcttccttggagtcgggctgtgggcatggagcgaaaagggtgtgctgtccgacctcaccaaagtgacccggatgcatggaatcgaccctgtggtgctggtcctgatggtgggcgtggtgatgttcaccctggggttcgccggctgcgtgggggctctgcgggagaatatctgcttgctcaactttttctgtggcaccatcgtgctcatcttcttcctggagctggctgtggccgtgctggccttcctgttccaggactgggtgagggaccggttccgggagttcttcgagagcaacatcaagtcctaccgggacgatatcgatctgcaaaacctcatcgactcccttcagaaagctaaccagtgctgtggcgcatatggccctgaagactgggacctcaacgtctacttcaattgcagcggtgccagctacagccgagagaagtgcggggtccccttctcctgctgcgtgccagatcctgcgcaaaaagttgtgaacacacagtgtggatatgatgtcaggattcagctgaagagcaagtgggatgagtccatcttcacgaaaggctgcatccaggcgctggaaagctggctcccgcggaacatttacattgtggctggcgtcttcatcgccatctcgctgttgcagatatttggcatcttcctggcaaggacgctgatctcagacatcgaggcagtgaaggccggccatcacttctgaggagcagagttgagggagccgagctgagccacgctgggaggccagagcctttctctgccatcagc

SEQ ID NO: 22471 - DNA, 2588 bp, Homo sapiens
  misc_feature 1..2588: note = ENST00000265450
  source 1..2588: mol_type = unassigned DNA; mol_type = unassigned DNA
attacctctgtaaagagcctgtctacaaatacagtcaccttctgaagtcctgggggttaggacttcagtgtatggattttgaggacacaatttagctcctaacacctctaaaattaggggctaatactccatcatgttgccatggaggaggctgataggtgtgagggggctggggccgattgccctgtgtggggtgggcagggctggggtgtgtgctgggatggttactgacaccccaccggggttagcagtggagggagctggttggctggcgactgttgcctgctggctctgtctcctggagctgagcttactggtgggatgcccgctccgagaagcacccttcttctcttcttaggagactctggacccccttctccaggtttctctccctttagaggcacattttcctccaagccttcaagccccttctctttctccagatgtggatggtggggaagggtatcttgagaaagttgggctttaaatctctggagacctgaaaggaaacagccagggagcctttggtcagacaggtggtgcgatggcacagtgcccagcgaggggcagaggctgagaggagctgacgagcatctcctggagagtcctccttgcctgcctcctggatccctcgttcccaccctgctttgccctgctccttaccagagctcactaggggatcaggtggggacatcgtgtgtgccaaaggctcagacccctgtggtgttttcctgcagctgaagagcaagtgggatgagtccatcttcacgaaaggctgcatccaggcgctggaaagctggctcccgcggaacatttacattgtggctggcgtcttcatcgccatctcgctgttgcagatatttggcatcttcctggcaaggacgctgatctcagacatcgaggcagtgaaggccggccatcacttctgaggagcagagttgagggagccgagctgagccacgctgggaggccagagcctttctctgccatcagccctacgtccagagggagaggagccgacacccccagagccagtgccccatcttaagcatcagcgtgacgtgacctctctgtttctgcttgctggtgctgaagaccaagggtcccccttgttacctgcccaaacttgtgactgcatccctctggagtctacccagagacagagaatgtgtctttatgtgggagtggtgactctgaaagacagagagggctcctgtggctgccaggagggcttgactcagaccccctgcagctcaagcatgtctgcaggacaccctggtcccctctccactggcatccagacatctgctttgggtcatccacatctgtgggtgggccgtgggtagagggacccacaggcgtggacagggcatctctctccatcaagcaaagcagcatgggggcctgcccgtaacgggaggcggacgtggccccgctgggcctctgagtgccagcgcagtctgctgggacatgcacatatcaggggttgtttgcaggatcctcagccatgttcaagtgaagtaagcctgagccagtgcgtggactggtgccacgggagtgccttgtccactgtccccctgtgtccaccagctattctcctggcgccggaactgcctctggtcttgatagcattaagccctgatggcgccggtggcgcggtgggcatggttcttcactgagagccggctctccttttcttaaagtgtgtaaatagtttatttataggggtaagaatgttctcacaccatttcacttcctcttcctctcctccagcattctcctctgagcagccttagatagtgtccatggctggagccgaccctttgagtccccttgagtgtcttaagaaccagcccacaacagcctctctttctcctccacatactgcagcctccctccatgcatcccacatacaagcactcccccactccccagcgtggcctcactgtcttctggtcttggtgctactgaaattgtcacccagaatttgaatcctgaccctccccactgcaagcccagggagccccagcccaagatggccagcctgaaactgttggccagggctcctcttgtggccatgtacccagggctggctggcctgccatttgcctctccccggagacagccgttcttctgcaaccacaccccgtgcctagccacaaccccaggctgcagctgctcagaagctccaggcattttgtttctggtgaccgcccctaatgggatatcggtgatcactggtccacccttcctgtcagggcttttctggggctgctcttggaaatgaagtcttaagtactgaataactcccctggggatagctggggcatttgtctagctgggctactttctaacactttgccatagctcagaccacttctcatcgttcagggatggactgcaaccttaatttacttgccggagtgtacattctagtgtggtgtatactggtggctgttgatgatgatttttttttttttacacaattctctgtagactaggagaagaatgcttgtgtttttcggaagtgtgatgcttctctttgactgccaaactcttttatggaatatatctttatattaatgctg

SEQ ID NO: 22472 - DNA, 2436 bp, Homo sapiens
  misc_feature 1..2436: note = ENST00000616406
  source 1..2436: mol_type = unassigned DNA; mol_type = unassigned DNA
cgcagattctgcttctcagaagatgcactattatagatactctaacgccaaggtcagctgctggtacaagtacctccttttcagctacaacatcatcttctggggtgtgctgtccgacctcaccaaagtgacccggatgcatggaatcgaccctgtggtgctggtcctgatggtgggcgtggtgatgttcaccctggggttcgccggctgcgtgggggctctgcgggagaatatctgcttgctcaactttttctgtggcaccatcgtgctcatcttcttcctggagctggctgtggccgtgctggccttcctgttccaggactgggtgagggaccggttccgggagttcttcgagagcaacatcaagtcctaccgggacgatatcgatctgcaaaacctcatcgactcccttcagaaagctaaccagtgctgtggcgcatatggccctgaagactgggacctcaacgtctacttcaattgcagcggtgccagctacagccgagagaagtgcggggtccccttctcctgctgcgtgccagatcctgcgcaaaaagttgtgaacacacagtgtggatatgatgtcaggattcagctgaagagcaagtgggatgagtccatcttcacgaaaggctgcatccaggcgctggaaagctggctcccgcggaacatttacattgtggctggcgtcttcatcgccatctcgctgttgcagatatttggcatcttcctggcaaggacgctgatctcagacatcgaggcagtgaaggccggccatcacttctgaggagcagagttgagggagccgagctgagccacgctgggaggccagagcctttctctgccatcagccctacgtccagagggagaggagccgacacccccagagccagtgccccatcttaagcatcagcgtgacgtgacctctctgtttctgcttgctggtgctgaagaccaagggtcccccttgttacctgcccaaacttgtgactgcatccctctggagtctacccagagacagagaatgtgtctttatgtgggagtggtgactctgaaagacagagagggctcctgtggctgccaggagggcttgactcagaccccctgcagctcaagcatgtctgcaggacaccctggtcccctctccactggcatccagacatctgctttgggtcatccacatctgtgggtgggccgtgggtagagggacccacaggcgtggacagggcatctctctccatcaagcaaagcagcatgggggcctgcccgtaacgggaggcggacgtggccccgctgggcctctgagtgccagcgcagtctgctgggacatgcacatatcaggggttgtttgcaggatcctcagccatgttcaagtgaagtaagcctgagccagtgcgtggactggtgccacgggagtgccttgtccactgtccccctgtgtccaccagctattctcctggcgccggaactgcctctggtcttgatagcattaagccctgatggcgccggtggcgcggtgggcatggttcttcactgagagccggctctccttttcttaaagtgtgtaaatagtttatttataggggtaagaatgttctcacaccatttcacttcctcttcctctcctccagcattctcctctgagcagccttagatagtgtccatggctggagccgaccctttgagtccccttgagtgtcttaagaaccagcccacaacagcctctctttctcctccacatactgcagcctccctccatgcatcccacatacaagcactcccccactccccagcgtggcctcactgtcttctggtcttggtgctactgaaattgtcacccagaatttgaatcctgaccctccccactgcaagcccagggagccccagcccaagatggccagcctgaaactgttggccagggctcctcttgtggccatgtacccagggctggctggcctgccatttgcctctccccggagacagccgttcttctgcaaccacaccccgtgcctagccacaaccccaggctgcagctgctcagaagctccaggcattttgtttctggtgaccgcccctaatgggatatcggtgatcactggtccacccttcctgtcagggcttttctggggctgctcttggaaatgaagtcttaagtactgaataactcccctggggatagctggggcatttgtctagctgggctactttctaacactttgccatagctcagaccacttctcatcgttcagggatggactgcaaccttaatttacttgccggagtgtacattctagtgtggtgtatactggtggctgttgatgatgatttttttttttttacacaattctctgtagactaggagaagaatgcttgtgtttttcggaagtgtgatgcttctctttgactgccaaactcttttatggaatatatctttatatt

SEQ ID NO: 22473 - DNA, 1698 bp, Homo sapiens
  misc_feature 1..1698: note = ENST00000373290
  source 1..1698: mol_type = unassigned DNA; mol_type = unassigned DNA
cggagagaacgccggtggcggggctggtagcccggcagccgcaggtggggccacgagcgctggctgagggaccgagccggagagccccggagcccccgtaacccgcgcggggagcgcccaggatgccgcgcggggactcggagcaggtgcgctactgcgcgcgcttctcctacctctggctcaagttttcacttatcatctattccaccgtgttctggctgattggggccctggtcctgtctgtgggcatctatgcagaggttgagcggcagaaatataaaacccttgaaagtgccttcctggctccagccatcatcctcatcctcctgggcgtcgtcatgttcatggtctccttcattggtgtgctggcgtccctccgtgacaacctgtaccttctccaagcattcatgtacatccttgggatctgcctcatcatggagctcattggtggcgtggtggccttgaccttccggaaccagaccattgacttcctgaacgacaacattcgaagaggaattgagaactactatgatgatctggacttcaaaaacatcatggactttgttcagaaaaagttcaagtgctgtggcggggaggactaccgagattggagcaagaatcagtaccacgactgcagtgcccctggacccctggcctgtggggtgccctacacctgctgcatcaggaacacgacagaagttgtcaacaccatgtgtggctacaaaactatcgacaaggagcgtttcagtgtgcaggatgtcatctacgtgcggggctgcaccaacgccgtgatcatctggttcatggacaactacaccatcatggcgggcatcctcctgggcatcctgcttccccagttcctgggggtgctgctgacgctgctgtacatcacccgggtggaggacatcatcatggagcactctgtcactgatgggctcctggggcccggtgccaagcccagcgtggaggcggcaggcacgggatgctgcttgtgctaccccaattagggcccagcctgccatggcagctccaacaaggaccgtctgggatagcacctctcagtcaacatcgtggggctggacagggctgcggcccctctgcccacactcagtactgaccaaagccagggctgtgtgtgcctgtgtgtaggtcccacggcctctgcctccccagggagcagagcctgggcctcccctaagaggctttccccgaggcagctctggaatctgtgcccacctggggcctggggaacaaggccctcctttctccaggcctgggctacgggggagggagagcctgaggctctgctcagggcccatttcatctctggcagtgccttggcggtggtattcaaggcagttttgtagcacctgtaattggggagagggagtgtgcccctcggggcaggagggaagggcatctggggaagggcaggagggaagagctgtccatgcagccacgcccatggccaggttggcctcttctcagcctcccaggtgccttgagccctcttgcaagggcggctgcttccttgagcctagtttttttacgtgatttttgtaacattcatttttttgtacagataacaggagtttctgactaatcaaagctggtatttccccgcatgtcttattcttgcccttcccccaaccagtttgttaatcaaacaataaaaacatgtttttttttttttttttt

SEQ ID NO: 22474 - DNA, 616 bp, Homo sapiens
  misc_feature 1..616: note = ENST00000478112
  source 1..616: mol_type = unassigned DNA; mol_type = unassigned DNA
gagaacgccggtggcggggctggtagcccggcagccgcaggtggggccacgagcgctggctgagggaccgagccggagagccccggagcccccgtaacccgcgcggggagcgcccaggatgccgcgcggggactcggagcaggtgcgctactgcgcgcgcttctcctacctctggctcaagttttcacttatcatctattccaccgtgttctggctgattggggccctggtcctgtctgtgggcatctatgcagaggttgagcggcagaaatataaaacccttgaaagtgccttcctggctccagccatcatcctcatcctcctgggcgtcgtcatgttcatggtctccttcattggtgtgctggcgtccctccgtgacaacctgtaccttctccaagcagtgagtggaccacaccacccctcagccgggactccccaggagagctggggcgcctgcccctgtgcccttgggcagctcagtttcttttgtccctgcctcaaaccacctcctttagagagctccttagatcagcccatctgaccacactggcccaagaatgcccaggccacctcccctcctgcatgtaaaagctgatttgaatactgttcttactta

SEQ ID NO: 22475 - DNA, 605 bp, Homo sapiens
  misc_feature 1..605: note = ENST00000475069
  source 1..605: mol_type = unassigned DNA; mol_type = unassigned DNA
cttcattggtgtgctggcgtccctccgtgacaacctgtaccttctccaagcattcatgtacatccttgggatctgcctcatcatggagctcattggtggcgtggtggccttgaccttccggaaccagaccattgacttcctgaacgacaacattcgaagaggaattgagaactactatgatgatctggacttcaaaaacatcatggactttgttcagaaaaagttcaagtgctgtggcggggaggactaccgagattggagcaagaatcagtaccacgactgcagtgcccctggacccctggcctgtggggtgccctacacctgctgcatcaggaacacgacagaagttgtcaacaccatgtgtggctacaaaactatcgacaaggagcgtttcagtgtgcaggatgtcatctacgtgcggggctgcaccaacgccgtgatcatctggttcatggacaactacaccatcatggcgggcatcctcctgggcatcctgcttccccaggtgggcaggccgtgggttcagagaaagtgtgacttggtgattgcagaagggcagagaaggtgcagaggggaagagcgaagaggcttttttcatagaagtc

SEQ ID NO: 22476 - DNA, 575 bp, Homo sapiens
  misc_feature 1..575: note = ENST00000452130
  source 1..575: mol_type = unassigned DNA; mol_type = unassigned DNA
ctccaagcattcatgtacatccttgggatctgcctcatcatggagctcattggtggcgtggtggccttgaccttccggaaccagaccattgacttcctgaacgacaacattcgaagaggaattgagaactactatgatgatctggacttcaaaaacatcatggactttgttcagaaaaagttcaagtgctgtggcggggaggactaccgagattggagcaagaatcagtaccacgactgcagtgcccctggacccctggcctgtggggtgccctacacctgctgcatcaggaacacgacagaagttgtcaacaccatgtgtggctacaaaactatcgacaaggagcgtttcagtgtgcaggatgtcatctacgtgcggggctgcaccaacgccgtgatcatctggttcatggacaactacaccatcatggcgggcatcctcctgggcatcctgcttccccagataacaggagtttctgactaatcaaagctggtatttccccgcatgtcttattcttgcccttcccccaaccagtttgttaatcaaacaataaaaacatgttttttttttttttt

SEQ ID NO: 22477 - DNA, 709 bp, Homo sapiens
  misc_feature 1..709: note = ENST00000490083
  source 1..709: mol_type = unassigned DNA; mol_type = unassigned DNA
ctgccatgttcctcccggcagggattgtcccagccctagccgagggggaccgagtgctgcagtgatgaggagaacagcccatgagggaggtcaggagacctgaattccagtcctggcaagaccccacccagcctgctctgtgacctcactccctccccaagtctcgagctcctcatctgtaaaacaagaggctggatggtggaggagtgtggagaggggctctggagggcaaagggaagattccagcgtgggcccatccctgggcggtagaaagagcactgggcctggaaccaggacagccagaccattgacttcctgaacgacaacattcgaagaggaattgagaactactatgatgatctggacttcaaaaacatcatggactttgttcagaaaaagttcaagtgctgtggcggggaggactaccgagattggagcaagaatcagtaccacgactgcagtgcccctggacccctggcctgtggggtgccctacacctgctgcatcaggaacacgacagaagttgtcaacaccatgtgtggctacaaaactatcgacaaggagcgtttcagtgtgcaggatgtcatctacgtgcggggctgcaccaacgccgtgatcatctggttcatggacaactacaccatcatggcgggcatcctcctgggcatcctgcttccccagttcctgggggtgctgctgacgctgctgt

SEQ ID NO: 22478 - DNA, 693 bp, Homo sapiens
  misc_feature 1..693: note = ENST00000486093
  source 1..693: mol_type = unassigned DNA; mol_type = unassigned DNA
attgtcccagccctagccgagggggaccgagtgctgcagtgatgaggagaacagcccatgagggagaccattgacttcctgaacgacaacattcgaagaggaattgagaactactatgatgatctggacttcaaaaacatcatggactttgttcagaaaaagttcaagtgctgtggcggggaggactaccgagattggagcaagaatcagtaccacgactgcagtgcccctggacccctggcctgtggggtgccctacacctgctgcatcaggaacacgacagaagttgtcaacaccatgtgtggctacaaaactatcgacaaggagcgtttcagtgtgcaggatgtcatctacgtgcggggctgcaccaacgccgtgatcatctggttcatggacaactacaccatcatggcgggcatcctcctgggcatcctgcttccccagttcctgggggtgctgctgacgctgctgtacatcacccgggtggaggacatcatcatggagcactctgtcactgatgggctcctggggcccggtgccaagcccagcgtggaggcggcaggcacgggatgctgcttgtgctaccccaattagggcccagcctgccatggcagctccaacaaggaccgtctgggatagcacctctcagtcaacatcgtggggctggacagggctgcggcccctctgcccaca

SEQ ID NO: 22479 - DNA, 834 bp, Homo sapiens
  misc_feature 1..834: note = ENST00000459981
  source 1..834: mol_type = unassigned DNA; mol_type = unassigned DNA
gaggctggatggtggaggagtgtggagaggggctctggagggcaaagggaagattccagcgtgggcccatccctgggcggtagaaagagcactgggcctggaaccaggacagccaggtctcagctcaggcatggcggcatcagagctgtgtgtccccaagcacggccccagcctctcagggcctgggctgtctggtctgcaaagggagtggagtgaattactcctgctgggacatagcacaggcactcaggcatcagatgaacactggaggcacggggaggatgtgtggaccattgacttcctgaacgacaacattcgaagaggaattgagaactactatgatgatctggacttcaaaaacatcatggactttgttcagaaaaagttcaagtgctgtggcggggaggactaccgagattggagcaagaatcagtaccacgactgcagtgcccctggacccctggcctgtggggtgccctacacctgctgcatcaggaacacgacagaagttgtcaacaccatgtgtggctacaaaactatcgacaaggagcgtttcagtgtgcaggatgtcatctacgtgcggggctgcaccaacgccgtgatcatctggttcatggacaactacaccatcatggcgggcatcctcctgggcatcctgcttccccagttcctgggggtgctgctgacgctgctgtacatcacccgggtggaggacatcatcatggagcactctgtcactgatgggctcctggggcccggtgccaagcccagcgtggaggcggcaggcacgggatgctgcttgtgctaccccaattagggcccagcctgccatgg

SEQ ID NO: 22480 - DNA, 674 bp, Homo sapiens
  misc_feature 1..674: note = ENST00000470508
  source 1..674: mol_type = unassigned DNA; mol_type = unassigned DNA
cagaatctagggtcaccttctcatgctgcatatgggaaactgaggatcacagcggttgagggactagcctggaccttgtgtacatggcagagtcggggctgtggctcctgccagccgaggtcctctgctgggctgacccagctccttcccatgcagcgtttcagtgtgcaggatgtcatctacgtgcggggctgcaccaacgccgtgatcatctggttcatggacaactacaccatcatggcgggcatcctcctgggcatcctgcttccccagttcctgggggtgctgctgacgctgctgtacatcacccgggtggaggacatcatcatggagcactctgtcactgatgggctcctggggcccggtgccaagcccagcgtggaggcggcaggcacgggatgctgcttgtgctaccccaattagggcccagcctgccatggcagctccaacaaggaccgtctgggatagcacctctcagtcaacatcgtggggctggacagggctgcggcccctctgcccacactcagtactgaccaaagccagggctgtgtgtgcctgtgtgtaggtcccacggcctctgcctccccagggagcagagcctgggcctcccctaagaggctttccccgaggcagctctggaatctgtgcccacctggggcctggggaacaaggcc

SEQ ID NO: 22481 - DNA, 726 bp, Homo sapiens
  misc_feature 1..726: note = ENST00000533786
  source 1..726: mol_type = unassigned DNA; mol_type = unassigned DNA
tttcttatctgcaagtcagaggagggtgagttccccaggctttcaacagagtgtatccagaagctactgtcaggaggacactgtaagagaaccttggcacctctgggcccaaagggaaagacaccagtggaaagaggtgagcatctcctggaccaccctcaagcttcaggtgagctgagcttctaacactaccatcaaagcaactggaaccccttgaatttgatttctggagacgcgagcataatccttttgcagacatctcaacgctggctctccaggtggagcaccatggaaggcgactgtctgagctgcatgaagtatctgatgtttgtattcaatttcttcatatttctgggcggggcctgcctgctggccatcggcatctgggtcatggtggaccccaccggcttccgggagatcgtggctgccaatcctctgctcctcacgggcgcctacatcctcctggccatggggggcctgctctttctgctcggcttcctgggctgctgcggggccgtccgtgagaacaagtgtctgctgctatttttcttcctgttcatcctgatcatcttcctggcagagctctcagcagccatcctggccttcatcttcagggaaaatctcacccgagaattcttcaccaaggagctcaccaagcactaccagggcaataacgacacagacgtcttctctgccacctggaactcggtcatgatcacagtgagt

SEQ ID NO: 22482 - DNA, 549 bp, Homo sapiens
  misc_feature 1..549: note = ENST00000533202
  source 1..549: mol_type = unassigned DNA; mol_type = unassigned DNA
aggcgaggggcagcccgcagaggagacgcgcttctcggcagcaacggcgtctggagccgggaggggcggagagtgtatccagaagctactgtcaggaggacactgtaagagaaccttggcacctctgggcccaaagggaaagacaccagtggaaagaggtgagcatctcctggaccaccctcaagcttcaggtgagctgagcttctaacactaccatcaaagcaactggaaccccttgaatttgatttctggagacgcgagcataatccttttgcagacatctcaacgctggctctccaggtggagcaccatggaaggcgactgtctgagctgcatgaagtatctgatgtttgtattcaatttcttcatatttctgggcggggcctgcctgctggccatcggcatctgggtcatggtggaccccaccggcttccgggagatcgtggctgccaatcctctgctcctcacgggcgcctacatcctcctggccatggggggcctgctctttctgctcggcttcctgggctgctgcggggccgtccgtgagaa

SEQ ID NO: 22483 - DNA, 840 bp, Homo sapiens
  misc_feature 1..840: note = ENST00000533080
  source 1..840: mol_type = unassigned DNA; mol_type = unassigned DNA
ccccggtcccggccccgagccccgagcgagcgccgccgcctcgcgctgcgggtccccggacgcgccgccaccgccgggaaggcagccggcgccgggcaagttgcgagcgcgcccctccgaccaggaaagtttccccccggccgccggcgggatttggcgcggggtccggcagccgccgctggaagagtgtatccagaagctactgtcaggaggacactgtaagagaaccttggcacctctgggcccaaagggaaagacaccagtggaaagaggtgagcatctcctggaccaccctcaagcttcaggtgagctgagcttctaacactaccatcaaagcaactggaaccccttgaatttgatttctggagacgcgagcataatccttttgcagacatctcaacgctggctctccaggtggagcaccatggaaggcgactgtctgagctgcatgaagtatctgatgtttgtattcaatttcttcatatttttcttcctgttcatcctgatcatcttcctggcagagctctcagcagccatcctggccttcatcttcagggaaaatctcacccgagaattcttcaccaaggagctcaccaagcactaccagggcaataacgacacagacgtcttctctgccacctggaactcggtcatgatcacatttggttgctgcggggtcaacgggcctgaagactttaagtttgcatctgtgtttcgactcctgaccctggatagtgaagaggtgccggaggcctgctgccggagggaaccccaaagtcgggacggggtcctgctgagccgggaggagtgcctcctgggaaggagcctattcctaaacaa

SEQ ID NO: 22484 - DNA, 3316 bp, Homo sapiens
  misc_feature 1..3316: note = ENST00000520358
  source 1..3316: mol_type = unassigned DNA; mol_type = unassigned DNA
cggccccgagccccgagcgagcgccgccgcctcgcgctgcgggtccccggacgcgccgccaccgccgggaaggcagccggcgccgggcaagttgcgagcgcgcccctccgaccaggaaagtttccccccggccgccggcgggatttggcgcggggtccggcagccgccgctggaagagtgtatccagaagctactgtcaggaggacactgtaagagaaccttggcacctctgggcccaaagggaaagacaccagtggaaagaggtgagcatctcctggaccaccctcaagcttcaggtgagctgagcttctaacactaccatcaaagcaactggaaccccttgaatttgatttctggagacgcgagcataatccttttgcagacatctcaacgctggctctccaggtggagcaccatggaaggcgactgtctgagctgcatgaagtatctgatgtttgtattcaatttcttcatatttctgggcggggcctgcctgctggccatcggcatctgggtcatggtggaccccaccggcttccgggagatcgtggctgccaatcctctgctcctcacgggcgcctacatcctcctggccatggggggcctgctctttctgctcggcttcctgggctgctgcggggccgtccgtgagaacaagtgtctgctgctatttttcttcctgttcatcctgatcatcttcctggcagagctctcagcagccatcctggccttcatcttcagggaaaatctcacccgagaattcttcaccaaggagctcaccaagcactaccagggcaataacgacacagacgtcttctctgccacctggaactcggtcatgatcacatttggttgctgcggggtcaacgggcctgaagactttaagtttgcatctgtgtttcgactcctgaccctggatagtgaagaggtgccggaggcctgctgccggagggaaccccaaagtcgggacggggtcctgctgagccgggaggagtgcctcctgggaaggagcctattcctaaacaagcagggctgttacacggtgatcctcaacaccttcgagacctacgtctacttggccggagcccttgccatcggggtactggccatcgagcttttcgccatgatctttgccatgtgcctcttccggggcatccagtagagggtatggcctgaagcctgaagactcgccccacccaccactgcccagcacccagtgtcctcccgtgcccctccccgctgtcctcttggccccaggggagaagatgaggccatcagagatggccaggagaagggccaggggaatagagctatttttttaacaaaacaaaatgaagacaaaaatatggactgatgtatcctcgcctggactcagggcaggtgccgtgggttctccagagaccccagcaactggcccaggatgcaggctgctctagagaccaaaggaacaccaggcccagcgccctctttggtccagccagaccctgggccctctctcctcactgcaccaggacctgatgccaagaaagtgaggatttaggcaacaaggaggcaaaagcaaatctcagagaagtcatcaaagcccaggggctgcacggagattcagctgccatgtctttgaggactcggaacccacagcgcaatccctggtccactggaggatggactgttccccccttcaggccggggccaagagtgagctgctaacacggcatccaagaatggcccagctggtaggatccttgctttccccatctgttggaccaaataatctcaaaggcccagagaggacagtgaccatccacagacacacagcacaggcgtgacagttctgaaaagaagctgagttgtctccaggctgctgtcactgcatccaggactctgtcagctctgctgcccacatgcacccctggcctcagcatcccggttcccccagacaagagagggcaagtcagccaggaactgcctcctccctgctctacagctaagaaaacaccattccatgacttcccaccgcgccctcgctcctacctccccacacctctctctgagtccccaggaacacacagaggtgcacatcacattcccttgtccacactgcccgcctctcccacatgccacccccttccctgtccttccccaactccccagctccaagagtggaagaaatccccaagatcatctgggtctccctctccacacccagaactgaggcttggatatcttcttcaacatccttgccaagacttctccaccctcttgcatacctccagggacagagagcttactacctcccaaggcagcctcctgcctttggactgctctgactttagcatcagcttaatacacagaagaggtttctgtttttctgtggctctgtccatggcatcccacttgcccactctccttcctggagtgttgaggtcacacattgactcccctgagccctcttctctccaggctaaagaatcccgaaggcatcgaggccatttctgctgcaacaaggtttcctgtctcttcactgtccgcacatttcttagtattccctccaggcttgggcagggagactcgcagatgcacacccacaagtattcagttctcaaactctagacgagtgttggcaactggattgcaagatgctcctaccctgatagatcaggggtggctgctggaggctgtgctggggatctgaggtttggtctgggctcagtgggagacggcagtgcaatcctgatgagtgatgtctgccaggcaccgtaagtttgattagtgatgtctgccacgggcagggatggaaggagcagtgtgatgtctgctctcttctctcccctctgtccctcttcaggaagaaagagctcattctgtctcacaagccaccggcatcctgtatcagcttccagcctcccctcaggctttccagtcaccagggacactcggagccacagcctagagccccgtgttccctggcctgtgcgtctgcccccttctgagatgcagccagaagctctgtgcctgctgcaaagattcaggtggaccctcctctaatctcctcctgctgtgcccgccagtccttgccctcccaccaggtctctgagctcagtgttaccaaattcgccctttaacagcttgctctggcaaccccataaatgacacctgaggtccgtagaagctaagctcctgagacccagggggacctgccactggtaccgcggcccagcctggggcctgggggctgcccctcttgaaccacccacatgcttagccccagctttttggaagaggcaaatggctggtctgaggatgacacacaaaaaca

SEQ ID NO: 22485 - DNA, 871 bp, Homo sapiens
  misc_feature 1..871: note = ENST00000520999
  source 1..871: mol_type = unassigned DNA; mol_type = unassigned DNA
cgccgggaaggcagccggcgccgggcaagttgcgagcgcgcccctccgaccaggaaagtttccccccggccgccggcgggatttggcgcggggtccggcagccgccgctggaagagtgtatccagaagctactgtcaggaggacactgtaagagaaccttggcacctctgggcccaaagggaaagacaccagtggaaagaggtgagcatctcctggaccaccctcaagcttcaggtgagctgagcttctaacactaccatcaaagcaactggaaccccttgaatttgatttctggagacgcgagcataatccttttgcagacatctcaacgctggctctccagctgggccgataaaagaaatatacacaagcctcgctgacgggagagtctgtcctgctgatgcccgaagaactgcccaggtggagcaccatggaaggcgactgtctgagctgcatgaagtatctgatgtttgtattcaatttcttcatatttctgggcggggcctgcctgctggccatcggcatctgggtcatggtggaccccaccggcttccgggagatcgtggctgccaatcctctgctcctcacgggcgcctacatcctcctggccatggggggcctgctctttctgctcggcttcctgggctgctgcggggccgtccgtgagaacaagtgtctgctgctatttttcttcctgttcatcctgatcatcttcctggcagagctctcagcagccatcctggccttcatcttcagggaaaatctcacccgagaattcttcaccaaggagctcaccaagcactaccagggcaataacgacacagacgtcttctctgccacctggaactcggtcatgatcacagtgagtgac

SEQ ID NO: 22486 - DNA, 565 bp, Homo sapiens
  misc_feature 1..565: note = ENST00000520837
  source 1..565: mol_type = unassigned DNA; mol_type = unassigned DNA
agaaccaagaagcatttgtctgctgaggcccaagactgggtagaggtggtgagcatcgtcccccgtccgccaccacagcatgcaacaggctcctgctatgctcctggggctgctccagtctgacagctacagaagagggtgagcatctcctggaccaccctcaagcttcaggtgagctgagcttctaacactaccatcaaagcaactggaaccccttgaatttgatttctggagacgcgagcataatccttttgcagacatctcaacgctggctctccagctgggccgataaaagaaatatacacaagcctcgctgacgggagagtctgtcctgctgatgcccgaagaactgcccaggtggagcaccatggaaggcgactgtctgagctgcatgaagtatctgatgtttgtattcaatttcttcatatttctgggcggggcctgcctgctggccatcggcatctgggtcatggtggaccccaccggcttccgggagatcgtggctgccaatcctctgctcctcacgggcgcctacatcctcctggccatggggggcctgctcttt

SEQ ID NO: 22487 - DNA, 1184 bp, Homo sapiens
  misc_feature 1..1184: note = ENST00000518429
  source 1..1184: mol_type = unassigned DNA; mol_type = unassigned DNA
gtggagcaccatggaaggcgactgtctgagctgcatgaagtatctgatgtttgtattcaatttcttcatatttctgggcggggcctgcctgctggccatcggcatctgggtcatggtggaccccaccggcttccgggagatcgtggctgccaatcctctgctcctcacgggcgcctacatcctcctggccatggggggcctgctctttctgctcggcttcctgggctgctgcggggccgtccgtgagaacaagtgtctgctgctatttttcttcctgttcatcctgatcatcttcctggcagagctctcagcagccatcctggccttcatcttcagggaaaatctcacccgagaattcttcaccaaggagctcaccaagcactaccagggcaataacgacacagacgtcttctctgccacctggaactcggtcatgatcacatttggttgctgcggggtcaacgggcctgaagactttaagtttgcatctgtgtttcgactcctgaccctggatagtgaagaggtgccggaggcctgctgccggagggaaccccaaagtcgggacggggtcctgctgagccgggaggagtgcctcctgggaaggagcctattcctaaacaagcagggctgttacacggtgatcctcaacaccttcgagacctacgtctacttggccggagcccttgccatcggggtactggccatcgaggaagaaagagctcattctgtctcacaagccaccggcatcctgtatcagcttccagcctcccctcaggctttccagtcaccagggacactcggagccacagcctagagccccgtgttccctggcctgtgcgtctgcccccttctgagatgcagccagaagctctgtgcctgctgcaaagattcaggtggaccctcctctaatctcctcctgctgtgcccgccagtccttgccctcccaccaggtctctgagctcagtgttaccaaattcgccctttaacagcttgctctggcaaccccataaatgacacctgaggtccgtagaagctaagctcctgagacccagggggacctgccactggtaccgcggcccagcctggggcctgggggctgcccctcttgaaccacccacatgcttagccccagctttttggaagaggcaaatggctggtctgaggatgacacacaaaaacaaaaa

SEQ ID NO: 22488 - DNA, 709 bp, Homo sapiens
  misc_feature 1..709: note = ENST00000519051
  source 1..709: mol_type = unassigned DNA; mol_type = unassigned DNA
ttaaaagcaattcaaggtgcggctgggactcactggctctcgccgcaggtgaattcctgcctggctcacctagtgcttgatgcctctgaccctggggctggctcaggggagtggtgggtcagaagtgcctaacctccctttctgcctgtttctcctcccaactcctccactggcccgagcagctgggcggggcctgcctgctggccatcggcatctgggtcatggtggaccccaccggcttccgggagatcgtggctgccaatcctctgctcctcacgggcgcctacatcctcctggccatggggggcctgctctttctgctcggcttcctgggctgctgcggggccgtccgtgagaacaagtgtctgctgctatttttcttcctgttcatcctgatcatcttcctggcagagctctcagcagccatcctggccttcatcttcagggaaaatctcacccgagaattcttcaccaaggagctcaccaagcactaccagggcaataacgacacagacgtcttctctgccacctggaactcggtcatgatcacatttggttgctgcggggtcaacgggcctgaagactttaagtttgcatctgtgtttcgactcctgaccctggatagtgaagaggtgccggaggcctgctgccggagggaaccccaaagtcgggacggggtcctgctgagccgggaggagtgcctcctggg

SEQ ID NO: 22489 - DNA, 981 bp, Homo sapiens
  misc_feature 1..981: note = ENST00000520245
  source 1..981: mol_type = unassigned DNA; mol_type = unassigned DNA
actcaggattctcgcagcccgtacaacctacccagaaggaaatttacccagagtgggctcaaacgggtttcatcagcgatctccttccagggtggctgagtagggttgttcaggttgcacactgtacgaggggcctctctaagggtaccatttgcatggaaggtatatatttgtttattcttttcatattttgatctcaatcctgttgactccaaggaggaatcactggtgtgtttgttatgaaaaatgtctgatagcagtggagtgccttaatcttacaaaatgagtatactgcgtcactggtgtgacagatggacggatgcattggccagtggccgccccatcccctgcctgccctctgggctcacaaggctgttcctctccctgcagttcttcctgttcatcctgatcatcttcctggcagagctctcagcagccatcctggccttcatcttcagggaaaatctcacccgagaattcttcaccaaggagctcaccaagcactaccagggcaataacgacacagacgtcttctctgccacctggaactcggtcatgatcacatttggttgctgcggggtcaacgggcctgaagactttaagtttgcatctgtgtttcgactcctgaccctggatagtgaagaggtgccggaggcctgctgccggagggaaccccaaagtcgggacggggtcctgctgagccgggaggagtgcctcctgggaaggagcctattcctaaacaagcagggctgttacacggtgatcctcaacaccttcgagacctacgtctacttggccggagcccttgccatcggggtactggccatcgagcttttcgccatgatctttgccatgtgcctcttccggggcatccagtagagggtatggcctgaagcctgaagactcgccccacccaccactgcccagcacccagtgtcctcccgtgcccctccccgctgtcctcttggccccaggggagaa

SEQ ID NO: 22490 - DNA, 827 bp, Homo sapiens
  misc_feature 1..827: note = ENST00000517621
  source 1..827: mol_type = unassigned DNA; mol_type = unassigned DNA
ctttcccatggtcacacagtggtgacaggtggagcccgcccacacccagtcttctgatgccactcctttgcagaggctgtatgtccttctctgtccccgcccctgtgtcctcctcctgcccaccagaaccttctctgggatctccccctagtttggttgctgcggggtcaacgggcctgaagactttaagtttgcatctgtgtttcgactcctgaccctggatagtgaagaggtgccggaggcctgctgccggagggaaccccaaagtcgggacggggtcctgctgagccgggaggagtgcctcctgggaaggagcctattcctaaacaagcaggttctcagcctgggcccaaagaatatgcaggctcctataaaggaaggaaagttctcccactttgaaaatacgtgtcattcaaaggctgttacacggtgatcctcaacaccttcgagacctacgtctacttggccggagcccttgccatcggggtactggccatcgagcttttcgccatgatctttgccatgtgcctcttccggggcatccagtagagggtatggcctgaagcctgaagactcgccccacccaccactgcccagcacccagtgtcctcccgtgcccctccccgctgtcctcttggccccaggggagaagatgaggccatcagagatggccaggagaagggccaggggaatagagctatttttttaacaaaacaaaatgaagacaaaaatatggactgatgtatcctcgcctggactcagggcaggtgccgtgggttctccagagaccccagcaactggcccaggatgcaggctgctctagagac

SEQ ID NO: 22491 - DNA, 700 bp, Homo sapiens
  misc_feature 1..700: note = ENST00000521990
  source 1..700: mol_type = unassigned DNA; mol_type = unassigned DNA
tggtcacacagtggtgacaggtggagcccgcccacacccagtcttctgatgccactcctttgcagaggctgtatgtccttctctgtccccgcccctgtgtcctcctcctgcccaccagaaccttctctgggatctccccctagtttggttgctgcggggtcaacgggcctgaagactttaagtttgcatctgtgtttcgactcctgaccctggatagtgaagaggtgccggaggcctgctgccggagggaaccccaaagtcgggacggggtcctgctgagccgggaggagtgcctcctgggaaggagcctattcctaaacaagcagggctgttacacggtgatcctcaacaccttcgagacctacgtctacttggccggagcccttgccatcggggtactggccatcgagcttttcgccatgatctttgccatgtgcctcttccggggcatccagtagagggtatggcctgaagcctgaagactcgccccacccaccactgcccagcacccagtgtcctcccgtgcccctccccgctgtcctcttggccccaggggagaagatgaggccatcagagatggccaggagaagggccaggggaatagagctatttttttaacaaaacaaaatgaagacaaaaatatggactgatgtatcctcgcctggactcagggcaggtgccgtgggttctccagagaccc

SEQ ID NO: 22492 - DNA, 817 bp, Homo sapiens
  misc_feature 1..817: note = ENST00000520278
  source 1..817: mol_type = unassigned DNA; mol_type = unassigned DNA
atatttatgggaaatttcccaatattccaatcactgtagttgcaacattagacatggcctgcacgctgtcagttctctgtcccaccttaggggccgggtggcaaagagggtctttggtgcaatgctgccaagtcgctgtttctgggtctcctgccctgcaccccctccccactgtcctgtctcagcagccgtgtgatagggtgagagctctggggacacctgccatgaaccctagtccacatgctggactctgactccaggactctcaaccctggccatagcttgacctctcatccctccctcccagggctgttacacggtgatcctcaacaccttcgagacctacgtctacttggccggagcccttgccatcggggtactggccatcgagcttttcgccatgatctttgccatgtgcctcttccggggcatccagtagagggtatggcctgaagcctgaagactcgccccacccaccactgcccagcacccagtgtcctcccgtgcccctccccgctgtcctcttggccccaggggagaagatgaggccatcagagatggccaggagaagggccaggggaatagagctatttttttaacaaaacaaaatgaagacaaaaatatggactgatgtatcctcgcctggactcagggcaggtgccgtgggttctccagagaccccagcaactggcccaggatgcaggctgctctagagaccaaaggaacaccaggcccagcgccctctttggtccagccagaccctgggccctctctcctcactgcaccaggacctgatgccaagaaagtgaggatttag

SEQ ID NO: 22493 - DNA, 4229 bp, Homo sapiens
  misc_feature 1..4229: note = ENST00000340160
  source 1..4229: mol_type = unassigned DNA; mol_type = unassigned DNA
agtgtatccagaagctactgtcaggaggacactgtaagagaaccttggcacctctgggcccaaagggaaagacaccagtggaaagaggtgagcatctcctggaccaccctcaagcttcaggtgagctgagcttctaacactaccatcaaagcaactggaaccccttgaatttgatttctggagacgcgagcataatccttttgcagacatctcaacgctggctctccaggtggagcaccatggaaggcgactgtctgagctgcatgaagtatctgatgtttgtattcaatttcttcatatttctgggcggggcctgcctgctggccatcggcatctgggtcatggtggaccccaccggcttccgggagatcgtggctgccaatcctctgctcctcacgggcgcctacatcctcctggccatggggggcctgctctttctgctcggcttcctgggctgctgcggggccgtccgtgagaacaagtgtctgctgctatttttcttcctgttcatcctgatcatcttcctggcagagctctcagcagccatcctggccttcatcttcagggaaaatctcacccgagaattcttcaccaaggagctcaccaagcactaccagggcaataacgacacagacgtcttctctgccacctggaactcggtcatgatcacatttggttgctgcggggtcaacgggcctgaagactttaagtttgcatctgtgtttcgactcctgaccctggatagtgaagaggtgccggaggcctgctgccggagggaaccccaaagtcgggacggggtcctgctgagccgggaggagtgcctcctgggaaggagcctattcctaaacaagcagggctgttacacggtgatcctcaacaccttcgagacctacgtctacttggccggagcccttgccatcggggtactggccatcgagcttttcgccatgatctttgccatgtgcctcttccggggcatccagtagagggtatggcctgaagcctgaagactcgccccacccaccactgcccagcacccagtgtcctcccgtgcccctccccgctgtcctcttggccccaggggagaagatgaggccatcagagatggccaggagaagggccaggggaatagagctatttttttaacaaaacaaaatgaagacaaaaatatggactgatgtatcctcgcctggactcagggcaggtgccgtgggttctccagagaccccagcaactggcccaggatgcaggctgctctagagaccaaaggaacaccaggcccagcgccctctttggtccagccagaccctgggccctctctcctcactgcaccaggacctgatgccaagaaagtgaggatttaggcaacaaggaggcaaaagcaaatctcagagaagtcatcaaagcccaggggctgcacggagattcagctgccatgtctttgaggactcggaacccacagcgcaatccctggtccactggaggatggactgttccccccttcaggccggggccaagagtgagctgctaacacggcatccaagaatggcccagctggtaggatccttgctttccccatctgttggaccaaataatctcaaaggcccagagaggacagtgaccatccacagacacacagcacaggcgtgacagttctgaaaagaagctgagttgtctccaggctgctgtcactgcatccaggactctgtcagctctgctgcccacatgcacccctggcctcagcatcccggttcccccagacaagagagggcaagtcagccaggaactgcctcctccctgctctacagctaagaaaacaccattccatgacttcccaccgcgccctcgctcctacctccccacacctctctctgagtccccaggaacacacagaggtgcacatcacattcccttgtccacactgcccgcctctcccacatgccacccccttccctgtccttccccaactccccagctccaagagtggaagaaatccccaagatcatctgggtctccctctccacacccagaactgaggcttggatatcttcttcaacatccttgccaagacttctccaccctcttgcatacctccagggacagagagcttactacctcccaaggcagcctcctgcctttggactgctctgactttagcatcagcttaatacacagaagaggtttctgtttttctgtggctctgtccatggcatcccacttgcccactctccttcctggagtgttgaggtcacacattgactcccctgagccctcttctctccaggctaaagaatcccgaaggcatcgaggccatttctgctgcaacaaggtttcctgtctcttcactgtccgcacatttcttagtattccctccaggcttgggcagggagactcgcagatgcacacccacaagtattcagttctcaaactctagacgagtgttggcaactggattgcaagatgctcctaccctgatagatcaggggtggctgctggaggctgtgctggggatctgaggtttggtctgggctcagtgggagacggcagtgcaatcctgatgagtgatgtctgccaggcaccgtaagtttgattagtgatgtctgccacgggcagggatggaaggagcagtgtgatgtctgctctcttctctcccctctgtccctcttcaggaagaaagagctcattctgtctcacaagccaccggcatcctgtatcagcttccagcctcccctcaggctttccagtcaccagggacactcggagccacagcctagagccccgtgttccctggcctgtgcgtctgcccccttctgagatgcagccagaagctctgtgcctgctgcaaagattcaggtggaccctcctctaatctcctcctgctgtgcccgccagtccttgccctcccaccaggtctctgagctcagtgttaccaaattcgccctttaacagcttgctctggcaaccccataaatgacacctgaggtccgtagaagctaagctcctgagacccagggggacctgccactggtaccgcggcccagcctggggcctgggggctgcccctcttgaaccacccacatgcttagccccagctttttggaagaggcaaatggctggtctgaggatgacacacaaaaacaaaaacaaaaaacaaaaaacccatgctgggcaggactgaggcaaattgcacagctttatggctctaatccaggggcatcccaggcttctggggcccacagaagtcagagggaggacccaagagaaagggctggtcatgaagggaaatctggctaaggtgggttcaagggcagacacaagactgcccctcagcagctttctacaaatgtgccaaggaaccctcaatcagccctgattcagctcgccagccagccactggccaccctcttaggctggaaagggaagacaggcagtttctgctcctgttggcattcgctcaggctggtagctatttgcaagactgcctgaggccattccttggaggcaaggcaaagaaagctcagcccaaatcaggcttgagcctccctccagagcacagggagaaacagggtttagctggcttggtccagatacaacccacagcaggttctggtggtggctggggttgtgggggaggggtgggcagggatacctctttgtttcttttcaccccgaaatacaacagcccataacagagacttcctcggaccccactaacagggcaaggaacaagaagactacaccgctcatcacaaaccctgcctgtatcgaaagccactttcctgctctgaagctactgcctcttagagaaagggaatagctctttatgggctgggggtgagggcccctccccagggtccctgttaatttctggccttggtgctcaggcctgtccacagcctcccttgtctatgtctctatccatgcttaaggggcccggacaggatttcccaaaccagccgaggccccagcacccgccgtctccccagaagccccctcctccttcccccatgggtcatatgttgaaagtctattttaaaaactatgttccttgccgtagattgcagagctaatttatcacgtttctctcctgtgagaccccccttttatatgatatatccagaggaagttttgtaatataaaacaggacgcccacactgatggttttgcactggtttttgtgaatgtttcttacaaaaagaaaaaggaacaaagaataaatagtgaccgtg

SEQ ID NO: 22494 - DNA, 3177 bp, Homo sapiens
  misc_feature 1..3177: note = ENST00000369516
  source 1..3177: mol_type = unassigned DNA; mol_type = unassigned DNA
ggggactggggatcccgccgccgggccgcagcatggggcgcttccgcgggggcctgcggtgcatcaagtacctgctgcttggcttcaacctgctcttctggctggctggatcggccgtcattgcttttggactatggtttcggttcggaggtgccataaaggagttatcatcagaggacaagtccccagagtatttctatgtggggctgtatgttctggttggagccggggccctgatgatggccgtggggttcttcgggtgctgcggagccatgcgggagtcgcaatgtgtgcttggatcattttttacctgcctcctggtgatatttgctgctgaagtaaccactggagtatttgcttttataggcaagggggtagctatccgacatgttcagaccatgtatgaagaggcttacaatgattaccttaaagacaggggaaaaggcaatgggacactcatcaccttccactcaacatttcagtgctgtggaaaagaaagctccgaacaggtccaacctacatgcccaaaggagcttctaggacacaagaattgcatcgatgaaattgagaccataatcagtgttaagctccagctcattggaattgtcggtattggaattgcaggtctgacgatctttggcatgatattcagcatggtcctctgctgtgcgatacgaaactcacgagatgtgatatgaagctacttctacatgaaaattgcaatctaaagctttcataccaaatgtcacaggagctgtctcccagctcatttttaacactgaaatgacattaggatctaaaataatttgctgtcaattgtacatttgcatgagtacgtatgtttggctcattactggtttaccccttgagtgaatgcctgtttatgatgactgagagcatattcatgtgtgatctgcgtgtttctggaatatgctttatacgtaatgaaatctgtttgctgggaattcctgattcttgttatataagaagaacaacctatttcgctcccagaaaaaaaagatcaaagagctttcagaaactttgagaacttggctatttagaaaaagtgataatgggtcagtttctcagactgtagccattgaaaattagatgcagagaattcagagatttcttcttaatggaagtaataagctgtaagaattgagagatcacaatggagtgttaaaactgactgtgtctaagttgggtgtaagggtttcctgggtttttttatatacatgctctccccagaatacagtaaaccacagttttagaactaaacacatctgtaaaactaaatatagcatggaaaatccaatttgaataagtcatgctttcctagaatttaaaaataaaaaagtcttcctctggaaagagaagtcacacagacaatcatgtgccctataaaagtgagtgtttataggactaaaaaacttttaacaactttttaaggaaatatttttgttcttatacaaaaacatgtaaatattgctttattactttcattttctgaccctgctgtaaactactgcaaccctcacatcctcaaagggacttttatgtcaaactcttctgtttctccaaatataaggaaaaaagactaaagcaagagatctggcagttgaaaattgtgggaaagagaatttgtatgggcactgtatctatgaaatacctcataacttacgtttacatgttttcctaactttttgtatttttcttgtatagccacctagagaattcttcatagattaagaactacagttttcaccacttaacataagtaaaacaaagtccttcataatttaaccattagcatctttggccaaaccaaaataaagaaaagcatcttctcctagttgtgtgtgggcaacagaaacaagttaaggaaacaaaaatacttatatatacacagaacaaaaataatgttctttttatgcaaatcccctgtgaaaataaaattttcaatgtttttttggtcttaacgcttcattttaacttagtaaacccaaatttaggatttacattggcaaatttttcagtgatttttaacgtgttacatttagtaaaccatagattttttaaaaactacattttgtaaggccacacataagtgaaaatacggaaggctttggaaacccccagatgaacttctatacatgtgaaaacacaagtctttgagtgtgcactaaaagtgtcacactcccaaaaaactcacaaaacattttgctaaaaagatatgactgcttgaaatagtctctctcccatggagaaccacatttctctttctgccatacttgctactgctactgattttggaggaaatttttctagaagaacaaaggtcatatttgaggcaagctaaaaacttaattatacatggctactttactgtgtctgtagctaaagaaaaattattttacaaaaattacttcatgaaatatagtttgtaccccagtagttgagaaatgtgaccttttaggcaaagaacaggcagtccatctctcttagctttagtttatctctctgcctgaagacaggaaacaggcccaagtgcatactcgggttctttccaactcagaatcatctctgattccacaaaagtgagtttagtttcctatctgaattaacaactttaaaggagactataatagttaaaagtggaagaatagaaataaataaatttaaaatgaaattaattaaagtagaagagaagggttctgttccatgtacgattaatgtgccccttttggagataagctttccaaaatatgcgtatgagtaaaattagagaattccaccactaagcaacaatagattttatatgtgtgtgtggatatatatacacacacacacagaaagatgaatatatatatatatatatctgtatagacacacatataatatatatagatatataatccctatatatcttgaatctacaaatatctttatatgtatataatttgaatatatacatgtatgtatatacagatgtgtgtgtatatatatatatacatacacatatacataaattttcagctatttctgttcccctgaactaatttgagattagacccaaacatgcttttaaatgtctcatgccaaggcactgaattaagacttcttaatgttgaaatattttaagtgatttcatattaaattttctatatactgaaa

SEQ ID NO: 22495 - DNA, 793 bp, Homo sapiens
  misc_feature 1..793: note = ENST00000369515
  source 1..793: mol_type = unassigned DNA; mol_type = unassigned DNA
ggagcctgccgctccccgcgctcgtagcgcgggcctggggactggggatcccgccgccgggccgcagcatggggcgcttccgcgggggcctgcggtgcatcaagtacctgctgcttggcttcaacctgctcttctggctggctggatcggccgtcattgcttttggactatggtttcggttcggaggtgccataaaggagttatcatcagaggacaagtccccagagtatttctatgtggggctgtatgttctggttggagccggggccctgatgatggccgtggggttcttcgggtgctgcggagccatgcgggagtcgcaatgtgtgcttggatcagctatccgacatgttcagaccatgtatgaagaggcttacaatgattaccttaaagacaggggaaaaggcaatgggacactcatcaccttccactcaacatttcagtgctgtggaaaagaaagctccgaacaggtccaacctacatgcccaaaggagcttctaggacacaagaattgcatcgatgaaattgagaccataatcagtgttaagctccagctcattggaattgtcggtattggaattgcaggtctgacgatctttggcatgatattcagcatggtcctctgctgtgcgatacgaaactcacgagatgtgatatgaagctacttctacatgaaaattgcaatctaaagctttcataccaaatgtcacaggagctgtctcccagctcatttttaacactgaaatgacattaggatctaaaataatttgctgtcaattgtacatttgcatga

SEQ ID NO: 22496 - DNA, 464 bp, Homo sapiens
  misc_feature 1..464: note = ENST00000491992
  source 1..464: mol_type = unassigned DNA; mol_type = unassigned DNA
atgaagggtcacaggagatggctacactcccttctggaacattcagtgggactgtgctgtccgtggagtgctcagagctacatgcagttaatcacagaaggcttacagaggagatgggccaggccagagttattctgattttttagacactgtgatatgaagaagtagctgtgaattcctgggccaggtgttttcagtttcagtgctgtggaaaagaaagctccgaacaggtccaacctacatgcccaaaggagcttctaggacacaagaattgcatcgatgaaattgagaccataatcagtgttaagctccagctcattggaattgtcggtattggaattgcaggtctgacgatctttggcatgatattcagcatggtcctctgctgtgcgatacgaaactcacgagatgtgatatgaagctacttctacatgaaaattgcaatctaaagctttcataccaaa

SEQ ID NO: 22497 - DNA, 671 bp, Homo sapiens
  misc_feature 1..671: note = ENST00000433172
  source 1..671: mol_type = unassigned DNA; mol_type = unassigned DNA
ggcctgcggtgcatcaagtacctgctgcttggcttcaacctgctcttctggctggctggatcggccgtcattgcttttggactatggtttcggttcggaggtgccataaaggagttatcatcagaggacaagtccccagagtatttctatgtggggctgtatgttctggttggagccggggccctgatgatggccgtggggttcttcgggtgctgcggagccatgcgggagtcgcaatgtgtgcttggatcattttttacctgcctcctggtgatatttgctgctgaagtaaccactggagtatttgcttttataggcaagggggtagctatccgacatgttcagaccatgtatgaagaggcttacaatgattaccttaaagacaggggaaaaggcaatgggacactcatcaccttccactcaacatttcagtgctgtggaaaagaaagctccgaacaggtccaacctacatgcccaaaggagcttctaggacacaagatctttggcatgatattcagcatggtcctctgctgtgcgatacgaaactcacgagatgtgatatgaagctacttctacatgaaaattgcaatctaaagctttcataccaaatgtcacaggagctgtctcccagctcatttttaacactgaaatgacattaggatctaaaataa

SEQ ID NO: 22498 - DNA, 3242 bp, Homo sapiens
  misc_feature 1..3242: note = ENST00000508798
  source 1..3242: mol_type = unassigned DNA; mol_type = unassigned DNA
tgcccgaagcccggggacgaaccgacggaccgaccgcctggcgcacggacgcgggcgctcgctttgtgttcggggctagcgtcggcgaggcttgagcttgcagcgcgcggcttccctgctttctcgcggccaccccggctccggcggcctcggcgcgcgaggggctggaggtgcgggagccgctctccgccggtcggtccccgcgcggctgagcccaggccgccagcgccgcggccccgtgcggtgtccctgagctcctgctccccgccgggctgctccgagcaacggtgcttcggagctccaaactcgggctgccggggcaagtgtcttcatgaacccagaggatgtccgggaagcactacaagggtcctgaagtcagttgttgcatcaaatacttcatatttggcttcaatgtcatattttggtttttgggaataacatttcttggaattggactgtgggcatggaatgaaaaaggagttctgtccaacatctcttccatcaccgatctcggcggctttgacccagtttggctcttccttgtggtgggaggagtgatgttcattttgggatttgcagggtgcattggagcgctacgggaaaacactttccttctcaagtttttttctgtgttcctgggaattattttcttcctggagctcactgccggagttctagcatttgttttcaaagactggatcaaagaccagctgtatttctttataaacaacaacatcagagcatatcgggatgacattgatttgcaaaacctcatagacttcacccaggaatatattccaatgcaagtcgagagcgatgtggcgttccattctcctgctgcactaaagatcccgcagaagatgtcatcaacactcagtgtggctatgatgccaggcaaaaaccagaagttgaccagcagattgtaatctacacgaaaggctgtgtgccccagtttgagaagtggttgcaggacaatttaaccatcgttgctggtattttcataggcattgcattgctgcagatatttgggatatgcctggcccagaatttggttagcgatatcgaagctgtcagggcgagctggtagaccccctgcaaccgctgctgcaagacactggacagacccagctttcgggaccctcccgcgtgccgaactgatcttcgagctgcatggacctaatcacagatgcagcctgcagtctcgcctaatggagctgccattaggggagtgtaaaactgggaaatgctgctcactgacagaattaaaaaaaaaaataaccagtatgaaagtcgttgcgccgtgaatctctactgtagccatgaatttatggacagttagatgcttaccaaaaaagaaaaaaagggagggtaggggacccagatgtacttgaatgtgcagaaaatacattcttgtcctcatcttccgtaattggagggctgggagaggcagctttgctcttcaccacaccttggacggaccaccttctttctgttccatggcctgaaggagtgcatctcctcaaagactcagcccctcacctgggagggcagtggtttgtgggcatccctccatgtacattttaggaaacacttgcaactctcatctgaagaagaaaacaactcatctttgggttcagattttgtgatggtattcagcaagtcacttgggcgagcacacttggtctatcctggaaagtctccttataagagaagttgtgtatttcatgtgcaccgagcaagggcattggaagacgtcatgaggctgtattttagcaggactgatcgtttttctaagtagacctgagctttgtttatcagtgaaattcaaggagaaaatgaggttaatgaagaggtatcagttaaatatccccttcttctcaccctgccaaaattagcagttggatttttggaaactctggaatattctgggtcattttgttttgtatgtttgttgtttttcgtcttccaaaggtgaaagctatgatacagttccacttaaattttagtgttttcttactcagctcaagcattaatttttgattaagtcttaatctgcatgacctgtgaatctgaatccatcatctccctttcctgccagcttttctacaaacattgaaatatgttatttggtcagcacttatttcctaggttcacagccttgggaggttgtggcatgtcctcccagtctggctgggaagagaccagctgtaccatccaaatgcttccctggtcttgatgatctcttccagagtcgatctgagtggccttttctgcaccctccccttctttctctttgaatggaattaaacccaatttggaaacaacattgacccagtcaaaagcttctaatggtttctttttcttcctccagttttagtttgcttttattaaaaaaagaaaatagtgcatggccatagctccttcagttctcttattgcagactaaccatcaggatggtatcaaagcacaaatactttggaggggaatgcgttgaactggggcaagtactctgtaacacaaagtgggaaaccacttcctggtgctgccgctcctgcccccactttaggtgggagggacgagttttgccctctagattttaatccagctggtgtccaccggatgttgccctcctggggagcagatatcagtctgtggaactctgggaaaaccacaggcacatttttcggtgcggacagatttgccagcacataactgggcagccagctagaatactttgtggaaattaagcgaggttttccatttcagccccatggtgcatggtggtggccgatgaatgtgtcagtctgctcagagaaaggacaaaaaggaaattattttcaaaactgtgttcactgtttgggtgtgtgtatggctctgcatgtgtgtgtttttgtctctgtataggtagaggtattcacatcttactccgactgtaaggttgtcttacttcatctctgcccccaccacagttgccattttgtaatgtccttccaacatggagaagacacgagctctctccagttggcatcatttgtcttttttgttgattgcctcattctccagtgaactccatctggccaattgattcagaatcaggcaagatccctgccctttggcacatccactgaaaggccaaacagcaagtccgagtgagttttaaatattaattaatcaccctttattttttacacttgagagtgattgtaataaaggctgtcattaataaacttggttctacctta

SEQ ID NO: 22499 - DNA, 3365 bp, Homo sapiens
  misc_feature 1..3365: note = ENST00000305798
  source 1..3365: mol_type = unassigned DNA; mol_type = unassigned DNA
gcgaacgggcgggcgagcaagcgagcggcgtctccaccagcatctgccgcggccgcctttgcccgaagcccggggacgaaccgacggaccgaccgcctggcgcacggacgcgggcgctcgctttgtgttcggggctagcgtcggcgaggcttgagcttgcagcgcgcggcttccctgctttctcgcggccaccccggctccggcggcctcggcgcgcgaggggctggaggtgcgggagccgctctccgccggtcggtccccgcgcggctgagcccaggccgccagcgccgcggccccgtgcggtgtccctgagctcctgctccccgccgggctgctccgagcaacggtgcttcggagctccaaactcgggctgccggggcaagtgtcttcatgaacccagaggatgtccgggaagcactacaagggtcctgaagtcagttgttgcatcaaatacttcatatttggcttcaatgtcatattttggtttttgggaataacatttcttggaattggactgtgggcatggaatgaaaaaggagttctgtccaacatctcttccatcaccgatctcggcggctttgacccagtttggctcttccttgtggtgggaggagtgatgttcattttgggatttgcagggtgcattggagcgctacgggaaaacactttccttctcaagtttttttctgtgttcctgggaattattttcttcctggagctcactgccggagttctagcatttgttttcaaagactggatcaaagaccagctgtatttctttataaacaacaacatcagagcatatcgggatgacattgatttgcaaaacctcatagacttcacccaggaatattggcagtgctgtggggcttttggagctgatgattggaacctaaatatttacttcaattgcacagattccaatgcaagtcgagagcgatgtggcgttccattctcctgctgcactaaagatcccgcagaagatgtcatcaacactcagtgtggctatgatgccaggcaaaaaccagaagttgaccagcagattgtaatctacacgaaaggctgtgtgccccagtttgagaagtggttgcaggacaatttaaccatcgttgctggtattttcataggcattgcattgctgcagatatttgggatatgcctggcccagaatttggttagcgatatcgaagctgtcagggcgagctggtagaccccctgcaaccgctgctgcaagacactggacagacccagctttcgggaccctcccgcgtgccgaactgatcttcgagctgcatggacctaatcacagatgcagcctgcagtctcgcctaatggagctgccattaggggagtgtaaaactgggaaatgctgctcactgacagaattaaaaaaaaaaataaccagtatgaaagtcgttgcgccgtgaatctctactgtagccatgaatttatggacagttagatgcttaccaaaaaagaaaaaaagggagggtaggggacccagatgtacttgaatgtgcagaaaatacattcttgtcctcatcttccgtaattggagggctgggagaggcagctttgctcttcaccacaccttggacggaccaccttctttctgttccatggcctgaaggagtgcatctcctcaaagactcagcccctcacctgggagggcagtggtttgtgggcatccctccatgtacattttaggaaacacttgcaactctcatctgaagaagaaaacaactcatctttgggttcagattttgtgatggtattcagcaagtcacttgggcgagcacacttggtctatcctggaaagtctccttataagagaagttgtgtatttcatgtgcaccgagcaagggcattggaagacgtcatgaggctgtattttagcaggactgatcgtttttctaagtagacctgagctttgtttatcagtgaaattcaaggagaaaatgaggttaatgaagaggtatcagttaaatatccccttcttctcaccctgccaaaattagcagttggatttttggaaactctggaatattctgggtcattttgttttgtatgtttgttgtttttcgtcttccaaaggtgaaagctatgatacagttccacttaaattttagtgttttcttactcagctcaagcattaatttttgattaagtcttaatctgcatgacctgtgaatctgaatccatcatctccctttcctgccagcttttctacaaacattgaaatatgttatttggtcagcacttatttcctaggttcacagccttgggaggttgtggcatgtcctcccagtctggctgggaagagaccagctgtaccatccaaatgcttccctggtcttgatgatctcttccagagtcgatctgagtggccttttctgcaccctccccttctttctctttgaatggaattaaacccaatttggaaacaacattgacccagtcaaaagcttctaatggtttctttttcttcctccagttttagtttgcttttattaaaaaaagaaaatagtgcatggccatagctccttcagttctcttattgcagactaaccatcaggatggtatcaaagcacaaatactttggaggggaatgcgttgaactggggcaagtactctgtaacacaaagtgggaaaccacttcctggtgctgccgctcctgcccccactttaggtgggagggacgagttttgccctctagattttaatccagctggtgtccaccggatgttgccctcctggggagcagatatcagtctgtggaactctgggaaaaccacaggcacatttttcggtgcggacagatttgccagcacataactgggcagccagctagaatactttgtggaaattaagcgaggttttccatttcagccccatggtgcatggtggtggccgatgaatgtgtcagtctgctcagagaaaggacaaaaaggaaattattttcaaaactgtgttcactgtttgggtgtgtgtatggctctgcatgtgtgtgtttttgtctctgtataggtagaggtattcacatcttactccgactgtaaggttgtcttacttcatctctgcccccaccacagttgccattttgtaatgtccttccaacatggagaagacacgagctctctccagttggcatcatttgtcttttttgttgattgcctcattctccagtgaactccatctggccaattgattcagaatcaggcaagatccctgccctttggcacatccactgaaaggccaaacagcaagtccgagtgagttttaaatattaattaatcaccctttattttttacacttgagagtgattgtaataaaggctgtcattaataaacttggttctacctta

SEQ ID NO: 22500 - DNA, 1191 bp, Homo sapiens
  misc_feature 1..1191: note = ENST00000505184
  source 1..1191: mol_type = unassigned DNA; mol_type = unassigned DNA
gttgccgcggctggtctgtgccatgctcagcgtgtatcttcttgcaccatctcgggctttgtgtaggatgcagatgccgtggtatatggtcctgtaattgcacgtaaataacgtttcctgcacgctctcctcttcagctggaaagcgctcccttttttgggaataacatttcttggaattggactgtgggcatggaatgaaaaaggagttctgtccaacatctcttccatcaccgatctcggcggctttgacccagtttggctcttccttgtggtgggaggagtgatgttcattttgggatttgcagggtgcattggagcgctacgggaaaacactttccttctcaagtttttttctgtgttcctgggaattattttcttcctggagctcactgccggagttctagcatttgttttcaaagactggatcaaagaccagctgtatttctttataaacaacaacatcagagcatatcgggatgacattgatttgcaaaacctcatagacttcacccaggaatattggcagtgctgtggggcttttggagctgatgattggaacctaaatatttacttcaattgcacagattccaatgcaagtcgagagcgatgtggcgttccattctcctgctgcactaaagatcccgcagaagatgtcatcaacactcagtgtggctatgatgccaggcaaaaaccagaagttgaccagcagattgtaatctacacgaaaggctgtgtgccccagtttgagaagtggttgcaggacaatttaaccatcgttgctggtattttcataggcattgcattgctgcagatatttgggatatgcctggcccagaatttggttagcgatatcgaagctgtcagggcgagctggtagaccccctgcaaccgctgctgcaagacactggacagacccagctttcgggaccctcccgcgtgccgaactgatcttcgagctgcatggacctaatcacagatgcagcctgcagtctcgcctaatggagctgccattaggggagtgtaaaactgggaaatgctgctcactgacagaattaaaaaaaaaaataaccagtatgaaagtcgttgcgccgtgaatctctactgtagccatgaatttatggacagttagatgcttaccaaaaaagaaaaaaagggagggtaggggacccagatgtacttgaatgtgcag

SEQ ID NO: 22501 - DNA, 4062 bp, Homo sapiens
  misc_feature 1..4062: note = ENST00000511753
  source 1..4062: mol_type = unassigned DNA; mol_type = unassigned DNA
ctggtcttacagataagttcacaagcagctggttctctcttgtggatacatgggaccacagtggctgtagctagtttcctaagactccatctgccttatctgccagatccttcctttgccacacacacacacacagtgtctctctctctctccctccctctctcatacacacacaaccaaatgcttcattcttcacctagtcagaaacctggggagcccccaggagagctctgtccctgattgccacctgccaacctgccagtcttcttggcttgaggcatctcagtgctccagtgctcagctcaccttgccagctttcctgtagcctgattgggtcctggtcatactcatctgttgccactatttcatcagtttcggcctccatgccccaaaatgtgggatccttttttttttttttttagatggagtttcactcttgttgcccaggctggagtgcaatggtgtgatctcggctcactgcaacctctgcctcctggattcaagcgattctcctgcctcagcctcccgggtagctgggattacaggagcctaccaccgtgcctggctaattttttcatttttagtagagatggggtttcaccatgttggccaggctggtctcaaactcccgacctcaggtgatccacccgcctcagcctcccaaagtgctgggattacaggcgtgagccaccatacctggctgggatcctctgaattgtattttttttttttaagtaaagatggggtttcaccatgttggccaggctggtcttgaactccggacctcaagtgatccaccttgctcagcctcccagaatgctgggattacaggcatgagccactgcacctgctcagtccccttaattgtgatttactttaatatagtttcatttatagtggtggcccctttaatatagtttatcatttcttacagttgaagagtccagtgttaactgaacaggcagaaaactacacatttctctaaatcagcaccttaatttataaagtctcatgttggaaatgaagagaattgtgttgtttcttggcttttaagacttggaaaatatcttaaatggcctctctccatttaggacaaacaataaaaacttgcctggaataatcttcgaacagaaggtatgagataagtagtaagtaaacgtccacaggactccaaatagctctaaagatctgattcccctaggagacttgctgagggaaaatctaggaactaagatactgcaaaatggaaatagaccttcttggttgaccgaggctctagggtgaagcctgtgagtcagtgtctgcacctttggaaatagaggaaattagctcaacagggcttggggcatgtaggtatctgccaaatattttatatgaattgaatttggactcaatttttggtatgtataatatgtaacatgaagagaaaatttaccaggggaactggaaaatgcacttaacttttatggaggtgagaacaaaaactgaattaaaatctttccctgacttggtgtttcctgtgtatgctcatgcatgctagctataattttgtcatttctgtactgtgataattcataattcatatttacatgcttaaggtggggcctaatacagggcagggcgttatttacactgtagggtaggcattgagcagaagtggtgtgatattttttctgttcatttttctagattggggaaagtttaaattgaaattattggcatcactgatgataattaagaactgtttaaattccatttctggcgaattcctgaaggatatataatcaggaactctagggaaacctgaagggctgagctggagggtctagaattggggccttaacctgggagtccaaaaactttgccaaacacttatttccaccttccactcctcctcccgtgcccaccctcacagagcagtacttggcaccctagacaaatactgccagatctacagacatctaatgtctgcagatacccactccctgcctagcctccctaatcacataagactgggacatcttcgaaggcaaggataccccttgttcttactcatccttgtttctgcaaagcccacctacctcagggcctgactcattgtgggtcattcagtagatgtttgctgaatgaataaacattgtttgtcttttgttcttttaatgagtaactgctgtttcctttgcacccctccccaatacatttttctcttggctggcagctccttgtctgcttgctgaagatagaaccgcagaccacctgagcaccccctgcctcctcagctgctcactgttcttctgcatgtggccttcaggacctctgcccagcagttgtggcccatgtcaccctctctgctgttgtcaccagaaatttacccgcactgtaccctctggtccttcacagctcatttctcataatctattttaacaacaaagtttgagaaggttaagaatacaggatggtaggaggtggaaaaaacagtgggcgtgagcagtaagtcgatatgactaagctgagactcttctgagtcttctagatggaaggggaatttctccagagttacgggcagttaccacgttgcctcatggtcttgagcccctcttttaaaacccctgttgtctacattaagcggaagtctccccttggctgcattttgatgtcacttaaaatgttgctggggcccatgcttcctagaggaaggcaagcacagctagcattcccaggaaagccctcaactcaggggtttcattttgtttttatgatgggaaataactttcatttcgcggtcactgcccaccccactacttcctctttgaccccttcatctaagatgaacacatctgttattttaccctgtatagcaggtgcaaaagagaattaaaatggtgtctgaatccataaaaggaatatattgcatagagaatcaaggccacagtaacaagtgacaggcgatcttaaaatattggaataatctatctttcaagttacagaagcttactagagataggggcaggtcattgttacaagcatctggcagtacattaatcatgagaaattaattaggccttaatgtgggtctaatgagaaatccttattatccatgtttgcttatgggctttgttggttaattatcaaatggaacactagagaccctaaaatgtgattataaaatgatttttaaaagtcctttcttggagtgtaatattctattaatgaatcagcagaaactgaagattatctgctttggagatgtgtaacaatccaatgtaattacaaacctgtttagagaggaaccatttagctatatatgatcaaaatagcccttataactgttctctgtgtatgtgtcttttatcttagttttctgtgttcctgggaattattttcttcctggagctcactgccggagttctagcatttgttttcaaagactggatcaaagaccagctgtatttctttataaacaacaacatcagagcatatcgggatgacattgatttgcaaaacctcatagacttcacccaggaatattggcagtgctgtggggcttttggagctgatgattggaacctaaatatttacttcaattgcacagattccaatgcaagtcgagagcgatgtggcgttccattctcctgctgcactaaagatcccgcagaagatgtcatcaacactcagtgtggctatgatgccaggcaaaaaccagaagttgaccagcagattgtaatctacacgaaaggctgtgtgccccagtttgagaagtggttgcaggacaatttaaccatcgttgctggtattttcataggcattgcattgctgcagatatttgggatatgcctggcccagaatttggttagcgatatcgaagctgtcagggcgagctggtagaccccctgcaaccgctgctgcaagacactggacagacccagctttcgggaccctcccgcgtgccgaactgatcttcgagctgcatggacctaatcacagatgcagcctgcagtctcgcctaatggagctgccattaggggagtgtaaaactgggaaatgctgctcactgacagaatt

SEQ ID NO: 22502 - DNA, 605 bp, Homo sapiens
  misc_feature 1..605: note = ENST00000515440
  source 1..605: mol_type = unassigned DNA; mol_type = unassigned DNA
aagtcagttgttgcatcaaatacttcatatttggcttcaatgtcatattttggtttttgggaataacatttcttggaattggactgtgggcatggaatgaaaaaggagttctgtccaacatctcttccatcaccgatctcggcggctttgacccagtttggctcttccttgtggtgggaggagtgatgttcattttgggatttgcagggtgcattggagcgctacgggaaaacactttccttctcaagtttgacaaacaataaaaacttgcctggaataatcttcgaacagaaggtatgagataagtattttctgtgttcctgggaattattttcttcctggagctcactgccggagttctagcatttgttttcaaagactggatcaaagaccagctgtatttctttataaacaacaacatcagagcatatcgggatgacattgatttgcaaaacctcatagacttcacccaggaatattggcagtgctgtggggcttttggagctgatgattggaacctaaatatttacttcaattgcacagattccaatgcaagtcgagagcgatgtggcgttccattctcctgctgcactaaagatcccgca

SEQ ID NO: 22503 - DNA, 539 bp, Homo sapiens
  misc_feature 1..539: note = ENST00000509168
  source 1..539: mol_type = unassigned DNA; mol_type = unassigned DNA
attgctaataataacaccagtgggggaaacttgaagaaagaggtatttgtcaccaaatgtttttgggaataacatttcttggaattggactgtgggcatggaatgaaaaaggagttctgtccaacatctcttccatcaccgatctcggcggctttgacccagtttggctcttccttgtggtgggaggagtgatgttcattttgggatttgcagggtgcattggagcgctacgggaaaacactttccttctcaagtttttttctgtgttcctgggaattattttcttcctggagctcactgccggagttctagcatttgttttcaaagactggatcaaagaccagctgtatttctttataaacaacaacatcagagcatatcgggatgacattgatttgcaaaacctcatagacttcacccaggaatattggcagtgctgtggggcttttggagctgatgattggaacctaaatatttacttcaattgcacagattccaatgcaagtcgagagcgatgtggcgttccattctcctgctgc

SEQ ID NO: 22504 - DNA, 574 bp, Homo sapiens
  misc_feature 1..574: note = ENST00000515287
  source 1..574: mol_type = unassigned DNA; mol_type = unassigned DNA
tttgtgtaggatgcagatgccgtggtatatggtcctgtaattgcacgtaaataacgtttcctgcacgctctcctcttcagctggaaagcgctccctgtgcgtaatggactgtttttgggaataacatttcttggaattggactgtgggcatggaatgaaaaaggagttctgtccaacatctcttccatcaccgatctcggcggctttgacccagtttggctcttccttgtggtgggaggagtgatgttcattttgggatttgcagggtgcattggagcgctacgggaaaacactttccttctcaagtttttttctgtgttcctgggaattattttcttcctggagctcactgccggagttctagcatttgttttcaaagactggatcaaagaccagctgtatttctttataaacaacaacatcagagcatatcgggatgacattgatttgcaaaacctcatagacttcacccaggaatattggcagtgctgtggggcttttggagctgatgattggaacctaaatatttacttcaattgcacagattccaatgcaagtcgagagcgatgtggcg

SEQ ID NO: 22505 - DNA, 710 bp, Homo sapiens
  misc_feature 1..710: note = ENST00000511651
  source 1..710: mol_type = unassigned DNA; mol_type = unassigned DNA
gcaccatctcgggctttgtgtaggatgcagatgccgtggtatatggtcctgtaattgcacgtaaataacgtttcctgcacgctctcctcttcagctggaaagcgctccctgaggacttaaatgcattggacagtggacaaagaccatttaaatggattacaaaaagcagacttcaccaggcagagcggcctctaacttcttcagtaatgttgccatttaccatgtgtctgttggggatcaggtccgtcgctaggcacccttcgtgcttttaggacattgccgtggaaggaaggggagaaaccttgatagggcccttggatgaagcactgcagcttatgctaagaagatcaaggccctgttagactggaaacattcattgtaagacctagtgccataagtttttgggaataacatttcttggaattggactgtgggcatggaatgaaaaaggagttctgtccaacatctcttccatcaccgatctcggcggctttgacccagtttggctcttccttgtggtgggaggagtgatgttcattttgggatttgcagggtgcattggagcgctacgggaaaacactttccttctcaagtttttttctgtgttcctgggaattattttcttcctggagctcactgccggagttctagcatttgttttcaaagactggatcaaagaccagctgtatttctttataaacaacaacatc

SEQ ID NO: 22506 - DNA, 581 bp, Homo sapiens
  misc_feature 1..581: note = ENST00000511800
  source 1..581: mol_type = unassigned DNA; mol_type = unassigned DNA
accatctcgggctttgtgtaggatgcagatgccgtggtatatggtcctgtaattgcacgtaaataacgtttcctgcacgctctcctcttcagctggaaagcgctcccttttttgggaataacatttcttggaattggactgtgggcatggaatgaaaaaggagttctgtccaacatctcttccatcaccgatctcggcggctttgacccagtttggctcttccttgtggtgggaggagtgatgttcattttgggatttgcagggtgcattggagcgctacgggaaaacactttccttctcaagtttttgaagagtccagtgttaactgaacaggcagaaaactacacatttctctaaatcagcaccttaatttataaagtctcatgttggaaatgaagagaattgtgttgtttcttggcttttaagacttggaaaatatcttaaatggcctctctccatttaggacaaacaataaaaacttgcctggaataatcttcgaacagaagttttctgtgttcctgggaattattttcttcctggagctcactgccggagttctagcatttgttttcaaagactgg

SEQ ID NO: 22507 - DNA, 540 bp, Homo sapiens
  misc_feature 1..540: note = ENST00000507167
  source 1..540: mol_type = unassigned DNA; mol_type = unassigned DNA
tccgagcaacggtgcttcggagctccaaactcgggctgccggggcaagtgtcttcatgaacccagaggatgtccgggaagcactacaagggtcctgaagtcagttgttgcatcaaatacttcatatttggcttcaatgtcatattttggtttttgggaataacatttcttggaattggactgtgggcatggaatgaaaaaggagttctgtccaacatctcttccatcaccgatctcggcggctttgacccagtttggctcttccttgtggtgggaggagtgatgttcattttgggatttgcagggtgcattggagcgctacgggaaaacactttccttctcaagtttgtaagtattccactctctactctcagattgagagccaaaactttaccttccatcaggaggtcaccctatctacaggcaagacagtgagctgtaccaaaggcactggccaaagtagggcccaggtcattattttcttttgagagagctctctagccctgattcccagttgtgcctccttaataagtacaacacc

SEQ ID NO: 22508 - DNA, 2206 bp, Homo sapiens
  misc_feature 1..2206: note = ENST00000373020
  source 1..2206: mol_type = unassigned DNA; mol_type = unassigned DNA
agttgtggacgctcgtaagttttcggcagtttccggggagactcggggactccgcgtctcgctctctgtgttccaatcgcccggtgcggtggtgcagggtctcgggctagtcatggcgtccccgtctcggagactgcagactaaaccagtcattacttgtttcaagagcgttctgctaatctacacttttattttctggatcactggcgttatccttcttgcagttggcatttggggcaaggtgagcctggagaattacttttctcttttaaatgagaaggccaccaatgtccccttcgtgctcattgctactggtaccgtcattattcttttgggcacctttggttgttttgctacctgccgagcttctgcatggatgctaaaactgtatgcaatgtttctgactctcgtttttttggtcgaactggtcgctgccatcgtaggatttgttttcagacatgagattaagaacagctttaagaataattatgagaaggctttgaagcagtataactctacaggagattatagaagccatgcagtagacaagatccaaaatacgttgcattgttgtggtgtcaccgattatagagattggacagatactaattattactcagaaaaaggatttcctaagagttgctgtaaacttgaagattgtactccacagagagatgcagacaaagtaaacaatgaaggttgttttataaaggtgatgaccattatagagtcagaaatgggagtcgttgcaggaatttcctttggagttgcttgcttccaactgattggaatctttctcgcctactgcctctctcgtgccataacaaataaccagtatgagatagtgtaacccaatgtatctgtgggcctattcctctctacctttaaggacatttagggtcccccctgtgaattagaaagttgcttggctggagaactgacaacactacttactgatagaccaaaaaactacaccagtaggttgattcaatcaagatgtatgtagacctaaaactacaccaataggctgattcaatcaagatccgtgctcgcagtgggctgattcaatcaagatgtatgtttgctatgttctaagtccaccttctatcccattcatgttagatcgttgaaaccctgtatccctctgaaacactggaagagctagtaaattgtaaatgaagtaatactgtgttcctcttgactgttatttttcttagtagggggcctttggaaggcactgtgaatttgctattttgatgtagtgttacaagatggaaaattgattcctctgactttgctattgatgtagtgtgatagaaaattcacccctctgaactggctccttcccagtcaaggttatctggtttgattgtataatttgcaccaagaagttaaaatgttttatgactctctgttctgctgacaggcagagagtcacattgtgtaatttaatttcagtcagtcaatagatggcatccctcatcagggttgccagatggtgataacagtgtaaggccttgggtctaaggcatccacgactggaagggactactgatgttctgtgatacatcaggtttcagcacacaacttacatttctttgcctccaaattgaggcatttattatgatgttcatactttccctcttgtttgaaagtttctaattattaaatggtgtcggaattgttgtattttccttaggaattcagtggaacttatcttcattaaatttagctggtaccaggttgatatgacttgtcaatattatggtcaactttaagtcttagttttcgtttgtgcctttgattaataagtataactcttatacaataaatactgctttcctctaaaaagatcgtgtttaaattaacttgtagaaaatctgctggaatggttgttgttttccactgagaaagctaagccctacatttctattcagagtactgtttttagatgtgaaatataagcctgcggccttaactctgtattaaaaaaaatgtttttgtttaaaaaaaactgttcccataggtgcagcaaaccaccatggcacatgtatacctatgtaacaaacctgcacattctgcacatgtatcccagaacttaatgtaaacaaaaaaatcttaaagtgcaaatattaaaaaaaactgttctctgtgaaaaaaattatattccatgttataaagtagcatatgactagtgttctcctag

SEQ ID NO: 22509 - DNA, 1025 bp, Homo sapiens
  misc_feature 1..1025: note = ENST00000496771
  source 1..1025: mol_type = unassigned DNA; mol_type = unassigned DNA
gtccccgtctcggagactgcagactaaaccagtcattacttgtttcaagagcgttctgctaatctacacttttattttctgggtgagagacgaaggcgcctggggccggcaggggatcccgggcttttagttgtggggggtgtgaccctgagcggcgggagctcaggtcgggaacggtgtggggtttgggcggccatcgcgcctgggaccccgacgccggcgaccagtgactgggccccgaacaaagagctcaggcatctcgccggcgctggggtcggagtgcgggacgaaggcagccgagaggctgagctgggacccagacgtaccagcgttcgagttcgatacgggaggcgaggtggggccttaagcccccagagcacgcagacggtgaccctggacctttgcaaaggcaagcaaggcttgcccggcccctttgagggctcacttgcataatagtgtctttcttttcactgcttcgtaagagaggagtgtttcgcagatcactggcgttatccttcttgcagttggcatttggggcaaggtgagcctggagaattacttttctcttttaaatgagaaggccaccaatgtccccttcgtgctcattgctactggtaccgtcattattcttttgggcacctttggttgttttgctacctgccgagcttctgcatggatgctaaaactgtatgcaatgtttctgactctcgtttttttggtcgaactggtcgctgccatcgtaggatttgttttcagacatgagattaagaacagctttaagaataattatgagaaggctttgaagcagtataactctacaggagattatagaagccatgcagtagacaagatccaaaatacgttgcattgttgtggtgtcaccgattatagagattggacagatactaattattactcagaaaaaggatttcctaagagttgctgtaaacttgaagattgtactccacagagagatgcagacaaagtaaacaatgaaggttgttttataaaggtgatgaccatta

SEQ ID NO: 22510 - DNA, 820 bp, Homo sapiens
  misc_feature 1..820: note = ENST00000494424
  source 1..820: mol_type = unassigned DNA; mol_type = unassigned DNA
agctcttcagtagtttctgaacatctagacggtaggatgtagaatagggcaccaggggccagggaggcccaatctcagagcgctgcgggctctgctggtgatagaaacaatatggtgaagttataaggagaggggaggggtggggggcgggaaagattccttaggatagaaaaaaaacaatgaagaaagctccacttgaagacctatgaaatttccgacactagaacctttgtatatagttttcggtaaccttcggcagggggcgctctgaaattgttgccactttccggacagcctcccatactttaccctctacaaaattgtacagtgtttccggcccttctcagttgtggacgctcatcactggcgttatccttcttgcagttggcatttggggcaaggtgagcctggagaattacttttctcttttaaatgagaaggccaccaatgtccccttcgtgctcattgctactggtaccgtcattattcttttgggcacctttggttgttttgctacctgccgagcttctgcatggatgctaaaactgtatgcaatgtttctgactctcgtttttttggtcgaactggtcgctgccatcgtaggatttgttttcagacatgagattaagaacagctttaagaataattatgagaaggctttgaagcagtataactctacaggagattatagaagccatgcagtagacaagatccaaaatacgttgcattgttgtggtgtcaccgattatagagattggacagatactaattattactcagaaaaaggatttcctaagagttgctgtaaacttgaagattg

SEQ ID NO: 22511 - DNA, 3796 bp, Homo sapiens
  misc_feature 1..3796: note = ENST00000612152
  source 1..3796: mol_type = unassigned DNA; mol_type = unassigned DNA
ggcaccaggggccagggaggcccaatctcagagcgctgcgggctctgctggtgatagaaacaatatggtgaagttataaggagaggggaggggtggggggcgggaaagattccttaggatagaaaaaaaacaatgaagaaagctccacttgaagacctatgaaatttccgacactagaacctttgtatatagttttcggtaaccttcggcagggggcgctctgaaattgttgccactttccggacagcctcccatactttaccctctacaaaattgtacagtgtttccggcccttctcagttgtggacgctcatcactggcgttatccttcttgcagttggcatttggggcaaggtgagcctggagaattacttttctcttttaaatgagaaggccaccaatgtccccttcgtgctcattgctactggtaccgtcattattcttttgggcacctttggttgttttgctacctgccgagcttctgcatggatgctaaaactgtatgcaatgtttctgactctcgtttttttggtcgaactggtcgctgccatcgtaggatttgttttcagacatgagattaagaacagctttaagaataattatgagaaggctttgaagcagtataactctacaggagattatagaagccatgcagtagacaagatccaaaatacgttgcattgttgtggtgtcaccgattatagagattggacagatactaattattactcagaaaaaggatttcctaagagttgctgtaaacttgaagattgtactccacagagagatgcagacaaagtaaacaatgaactgattggaatctttctcgcctactgcctctctcgtgccataacaaataaccagtatgagatagtgtaacccaatgtatctgtgggcctattcctctctacctttaaggacatttagggtcccccctgtgaattagaaagttgcttggctggagaactgacaacactacttactgatagaccaaaaaactacaccagtaggttgattcaatcaagatgtatgtagacctaaaactacaccaataggctgattcaatcaagatccgtgctcgcagtgggctgattcaatcaagatgtatgtttgctatgttctaagtccaccttctatcccattcatgttagatcgttgaaaccctgtatccctctgaaacactggaagagctagtaaattgtaaatgaagtaatactgtgttcctcttgactgttatttttcttagtagggggcctttggaaggcactgtgaatttgctattttgatgtagtgttacaagatggaaaattgattcctctgactttgctattgatgtagtgtgatagaaaattcacccctctgaactggctccttcccagtcaaggttatctggtttgattgtataatttgcaccaagaagttaaaatgttttatgactctctgttctgctgacaggcagagagtcacattgtgtaatttaatttcagtcagtcaatagatggcatccctcatcagggttgccagatggtgataacagtgtaaggccttgggtctaaggcatccacgactggaagggactactgatgttctgtgatacatcaggtttcagcacacaacttacatttctttgcctccaaattgaggcatttattatgatgttcatactttccctcttgtttgaaagtttctaattattaaatggtgtcggaattgttgtattttccttaggaattcagtggaacttatcttcattaaatttagctggtaccaggttgatatgacttgtcaatattatggtcaactttaagtcttagttttcgtttgtgcctttgattaataagtataactcttatacaataaatactgctttcctctaaaaagatcgtgtttaaattaacttgtagaaaatctgctggaatggttgttgttttccactgagaaagctaagccctacatttctattcagagtactgtttttagatgtgaaatataagcctgcggccttaactctgtattaaaaaaaatgtttttgtttaaaaaaaactgttcccataggtgcagcaaaccaccatggcacatgtatacctatgtaacaaacctgcacattctgcacatgtatcccagaacttaatgtaaacaaaaaaatcttaaagtgcaaatattaaaaaaaactgttctctgtgaaaaaaattatattccatgttataaagtagcatatgactagtgttctcctagagatcagacttttttgattgtatagtttgcattaaaaagttgtacagggagggatgtaacctgtatcttcaggataatagggaaattaataaggaaaataataattactaaaatttgagttgaagtcagggaattatttctttggttttgagtctctttatacatccattagtagaacctgtctagtctgattgccacagtccttgaattgatggtaagggggagtcagttacagttagaaaaaaacctgggcaaaaactactagttaaatgatcatgaattttgagtatgtgttttaaaatgcttggagttattgcagaaaaatgatattctccattagaacatttgatgtgtgacttttgacataggataaggtgataagaaaattaagttgaaaaatagtgactcaagtacagcaaatcagatttttggctactgagattaaagaagcaaatatttaaaggattatcagcaattttcaaatacatatttttcactgcagtggttttgaagaatgttttaaggttatatttagagtttttaaaaaagttttccctcagccagccatggtggctcacatctgtaatcccagcactttgagaggctgaggcgggcggatcacctgaggtcaggagttctagaccagcctggccaacatggtaaaacaccgtctctaataaaaatgcaaaaattagctgggtgtggtggcaagcacctgtaatcccagctacttgggagactgaggcaggagaatcacttgaatccaggagtcagaggttgcagtgagccgagatcacaccactgcactccagcctgggcgataagagtgaacctgcatctcagaaaaaaaaaaaaagttttccctcattattaaaaaggaaaaattatagaaaattaaaatatagaatgtagaaagaggaaaaacaccacacatcactcgtcaggtggattggtttgtttatttttaagatgggtttattttggatagccagttagaaaacgcccttatagctgatgtgtgcttgtgcatactgaattgtatacttaattctgaaagtaatgaggaaacatttcacctaatgataactggtacaaaggaaagttcacgtgtctttaatagtttgctaattagactagctggttagaaagagggatcactagattggagagagagatccagtttccactggaggcagtaggtctgctcatttccatggtgacaatcctaatggcagagggagtgagtttcccttagtggcacaggctgggggttttgagcttttaagttttgttttatagaaatctggagaattttacattttacttcactatatatctatgtttaaaataattcatttttgatgtcccaaaattgatgtgggttgccttatttccaggcaccaggttgctcactgcaaggtgacattttgagaagcagaaatctctaggtatatcttaagtgtgaaaagcttgttagatttccatggcctattccaggtgggttgttgggtttatgttgtaagcatcaaacttttgtggaaataaatacctaatacaaggt

SEQ ID NO: 22512 - DNA, 900 bp, Homo sapiens
  misc_feature 1..900: note = ENST00000614008
  source 1..900: mol_type = unassigned DNA; mol_type = unassigned DNA
ggcaccaggggccagggaggcccaatctcagagcgctgcgggctctgctggtgatagaaacaatatggtgaagttataaggagaggggaggggtggggggcgggaaagattccttaggatagaaaaaaaacaatgaagaaagctccacttgaagacctatgaaatttccgacactagaacctttgtatatagttttcggtaaccttcggcagggggcgctctgaaattgttgccactttccggacagcctcccatactttaccctctacaaaattgtacagtgtttccggcccttctcagttgtggacgctcatcactggcgttatccttcttgcagttggcatttggggcaaggtgagcctggagaattacttttctcttttaaatgagaaggccaccaatgtccccttcgtgctcattgctactggtaccgtcattattcttttgggcacctttggttgttttgctacctgccgagcttctgcatggatgctaaaactgtatgcaatgtttctgactctcgtttttttggtcgaactggtcgctgccatcgtaggatttgttttcagacatgagattaagaacagctttaagaataattatgagaaggctttgaagcagtataactctacaggagattatagaagccatgcagtagacaagatccaaaatacgttgcattgttgtggtgtcaccgattatagagattggacagatactaattattactcagaaaaaggatttcctaagagttgctgtaaacttgaagattgtactccacagagagatgcagacaaagtaaacaatgaaggttgttttataaaggtgatgaccattatagagtcagaaatgggagtcgttgcaggaatttcctttggagttgcttgcttccaagacatt

SEQ ID NO: 22513 - DNA, 4161 bp, Homo sapiens
  misc_feature 1..4161: note = ENST00000581692
  source 1..4161: mol_type = unassigned DNA; mol_type = unassigned DNA
atgtgagaacattgttggggagggtgtaccatatcccagccccccagacttcggacagggggataggcaaggaaccctcaggaagtccggaggaatggaacgggtcacctccctggacagtggttttggccccagctgttccccaggggcatcagagtcgaggggcagggccagagcctctttcctgatctcagtctcaccggcctcttctctccagggggaattaaatggacaaaggggcctggttccatccaacttcctggagggccctgggcctgaggcaggcggcctggacagggaacccaggacaccccaggctgagagtcaggtcagtgaggagctgggctcccagcttggcagggcagtctaccctactggtggggtggtagggccagggcagtgttgcggcaggggtgcagctggggtggtcatgcaggtaagcactgtgtccagcgtgcagccgctaattgaccaccagaggggagccccaccaagcagctgccccccagtatgtgcccctctctgcagagggatgatagctgtgaccctgaccctcaggccatctcgccagctgccaacacctggtggctgacgcaggtgagggggccctgtggaaaaggacccctctgcctcacacctgtggccaatcaaagtccctgtttcaggacactcccaccctgggggtggtctccatacctcccaggtgcctttggaagccagttgcccagccaggcccagcttcctgggttctcgttccttgagcttgcctctccttggggtgagtggaatacaactaagcctccactctcagagggcagggagagagggtgaagaggccaagccccagccagaaaactcagggcttccatgtgtgaacacaaaggccttggagagtagggcccacccctgcgcagggccacctggtggccgggcggagaaggtgcgggtctgtcggtaacccatctcctctctttgttccctgtcctcagagaacgaggaggagaagagtccagtgctagatggagatagatatatgtagagagagcaacatgtaagtgggggactgcccccctgtgtgaccgtccacccccacttgaccataatcagacagtgctcctttgtctcaaatactggagctgacccagctttcccactgtagtccagggaatggcgaaggagagcttgccatgagccagatttgcatgaagagtcatccctccccctccctgctccccttgccttgcctttacccagggcagtgccagctgtcataggattacatgtcatcttagtgtgtgatgtcccatattagctgatgcttcctattctataacacatgtggtttatagaacatgacgtgacatccatattaggactcatcagtggtattatgatactgtgtggctatggtattataatatcataattattactggtgccagggtgacactgtaatgccaccagtaataataggcttcccacccttgtcctctgcattgtgacctgttagggtgatcagatgcatgatttacctccaactctcagttttctctacttgggggataaaaggggaggtttggccaggtgtggtggctcatgcctttaatactagctacttgggaggctgaggtgggagtcacttgagcccaggaggtcgaggctgcagtgagcggtgatcacgccactgcactccagcctgggtgacagagcaagactctgtctcaaaaataaaaaaataaaagggaagtttgagtagttcaaatccataaataaccccaaaccattattctctggggctcagaaacaccctccttttgtttccctaacaacctctccctcctggatgttgtggaaggagccctaagagggagtgggaagggcctggggctcgccagccggctattggctctggctggttgggggtagatgctttggcctctgtgggcagccctgccacatcactgcaggcctggggcgggggtggggcctcggttgtgcacccactttccttgcctctggcctgggctctatagttggttctggctgggagcctgccaggctccgggcagcaagtgggagtttgaggaagggaagacatgcaggctggcaagagctgacagagctgtgcaggtaccagaggtgaaggtgggaacataggtgtagggggctttctggtggcttctctgttctcccagctccctggccttagatcactaaggagcgccgtctgggcgggcttgaggcaaagggagtggagtcaggaggagattcagtaaggaaaaagatgctagagcctccagagcctgtggtgggggctgagtgatgcccccagctgtgagtccctctgggtccttggcctcccggcagtcctcttaggggcccttaagggagagtcccaatcttcctccccatggagtgggtactggctccacaccctgaaggcctgggggggccacatctgctgggtttggggagacgctctttctgtctatgaggggctgtagaagctaccttcctgggcagtgacagctgcttctaagcagtccttgtccttgcgctccatgtttttggagggaggtgacatgtgagaagttgggggcacccatcctgaggggcaggttccaagaactcttgggccctgtcagccctgcaccctggagggagaagggaaggggcctgcccagggtcacaggtgagcgatccagaaccgagactgcatcccctgggactcccagcttagtgctccctcggcatcaccctccccattcaccacctgtgctgtgtgtttctgacagtggtgggaggtgaggccctggttctcagcgtcagccatggttctgtgacatgggaggctgcaggccccttaggctgtggaaaaaatgggtcagggggtcaggagggaatcaggccctgaccttgctccttctgtctcacatttcaggactggggctgcaccacacaagggtccccagggcccccaggtgggccttgtacccccagctctggcagcgcccccaggattgaacgtggggagccccagggcagaagcgagaaggtgtggggtttcttctccaaggggaagcagctcctcaggaggctgggctctgggaagaaggagtgaagctgtggcccatcctgcaggcagaagaggccctgagaggcccccagatcactgtctctgctgagcagggaaggctcagactgggcccagagcccccgttcttctgcgttaacactgtggcattcagagggaatcaaagagccttggtgaaggtcagagctaaatggctccttaaggatgaactctctagagaagcaccttcctcctacaggaggggaaactgagcccacagtgagtatgtaacttgaccaaggtcactgagccaggactggacccaggaccctcgcgtcctggtccacccacctcgtctactagtgtcccacagtgctgcgctagtcccttctgccacccttcccagtcccaggacgggccctggagggagaaaggagcctgtgccccctgatggctctggctgtcctgatcctgtcttccctcccctgaaggaaagtttgcactggattttattggagccccatctccccagcgggcaggcgggcggagcctgtatatatgtatatactcagtgcctcagttcagcttcctccacctcgcttccactgcacaggcccaggaaggagaaaggccaagccaaagtgggccccaccctgcccccgtcgtgctccatccttccctgccggggcctgctggcccctgtaaggtcccgcccccaaagaccctggggccagcggggccgaaagcggagttgggtttgccttattttgctcattggattcaagttcttttgcatagttttcttctaacccctgttggagtccaggggctggagaaaaggacagatttatgcagctattttcatacattccctgttcagagtggggtaggggttctccgccgttacccgatccactccatcccccaccctctgaggggtgagtgtgtctttgcatgtttcctttgctgtggtgggagatagtttgactgaacccccaccttgaccttggtctccaggggtgtggaatggtgggggaatttgtttaaaaagacattttattataataaagtctattttcacaaaatct

SEQ ID NO: 22514 - DNA, 1553 bp, Homo sapiens
  misc_feature 1..1553: note = ENST00000581675
  source 1..1553: mol_type = unassigned DNA; mol_type = unassigned DNA
cgccgctccaagaaagctgagtcggaaggccctgcccagccctgtccaggcccccctaagctggtcccctctgctgacctgaaagctccccactccatggtggctgcatttgactacaacccccaggagagttcccccaatatggacgtggaggcagagctgcccttccgggcaggggatgtcattactgtgtttgggggcatggacgatgacggtttctactatggggaattaaatggacaaaggggcctggttccatccaacttcctggagggccctgggcctgaggcaggcggcctggacagggaacccaggacaccccaggctgagagtcaggactggggctgcaccacacaagggtccccagggcccccaggtgggccttgtacccccagctctggcagcgcccccaggattgaacgtggggagccccagggcagaagcgagaaggtgtggggtttcttctccaaggggaagcagctcctcaggaggctgggctctgggaagaaggagtgaagctgtggcccatcctgcaggcagaagaggccctgagaggcccccagatcactgtctctgctgagcagggaaggctcagactgggcccagagcccccgttcttctgcgttaacactgtggcattcagagggaatcaaagagccttggtgaaggtcagagctaaatggctccttaaggatgaactctctagagaagcaccttcctcctacaggaggggaaactgagcccacagtgagtatgtaacttgaccaaggtcactgagccaggactggacccaggaccctcgcgtcctggtccacccacctcgtctactagtgtcccacagtgctgcgctagtcccttctgccacccttcccagtcccaggacgggccctggagggagaaaggagcctgtgccccctgatggctctggctgtcctgatcctgtcttccctcccctgaaggaaagtttgcactggattttattggagccccatctccccagcgggcaggcgggcggagcctgtatatatgtatatactcagtgcctcagttcagcttcctccacctcgcttccactgcacaggcccaggaaggagaaaggccaagccaaagtgggccccaccctgcccccgtcgtgctccatccttccctgccggggcctgctggcccctgtaaggtcccgcccccaaagaccctggggccagcggggccgaaagcggagttgggtttgccttattttgctcattggattcaagttcttttgcatagttttcttctaacccctgttggagtccaggggctggagaaaaggacagatttatgcagctattttcatacattccctgttcagagtggggtaggggttctccgccgttacccgatccactccatcccccaccctctgaggggtgagtgtgtctttgcatgtttcctttgctgtggtgggagatagtttgactgaacccccaccttgaccttggtctccaggggtgtggaatggtgggggaatttgtttaaaaagacattttattataataaagtctattttcacaaaa

SEQ ID NO: 22515 - DNA, 7483 bp, Homo sapiens
  misc_feature 1..7483: note = ENST00000268893
  source 1..7483: mol_type = unassigned DNA; mol_type = unassigned DNA
ctcgaggctcctggactgtaagggacccctgcagtccccagagcagaggccagcaggggctgagactatgaggcaagcagcccatcgacccaggcctccttaggaccagcccagccacccagcaagcgaaagagcagcagcagagagcagagccggagataaaggaccacagcggaccactggggatcacccccagcagctcctgaagcctctggccgggctgaggggttgcgacagacggccagacccacagacactgacagacacacaacgacaccgatgcacacagctgcacgacactgacacactcagatacaaccagggacagcatcacatactgccacagccctgcaatacagacacccacacacacacacacaaacaactggcaactctgaaatgggcagacagtgacacacagcaccacccccctcaacacacagaagtgggggcacccatcttcccaacacatgagacagcattgacctgcacggacagacctggagacacacacacgcaccctcacccaggcgcagctgtcggtggcctctgcacatcctccctacccccacagggacaccctcgctcctccacatactcgcgcacacacacagctaccagcaaacatagctcacatacccctggctccagctccagcagccctggcgccttctgcagcctcctttgtgggtggggaagagctcagccaaccttggatggagcgtcggtgaagcaagagctcagaggggagaggggctggcctggcatgaccctcgccagtccccccacctggctgggtgatgtcccccggcccgggttctggggccccttggcagtaccatggagcaactgacaaccctcccacggcctggggaccctggagccatggagccatgggcactgcccacctggcatagctggactccaggtcgagggggtgaacctagcagtgcagccccaagcatcgctgatactcctccggcagctctgcagcttcaagaactgaggtctgaggagagttccaagcccaaaggagacgggagctccaggcccgtggggggaactgaccctgaaggagcagaggcttgtctgcccagcctgggccagcaagcatccagctctggacccgcctgccagaggccagaggatgaggaagtggaggctttcctgaaggccaagctgaatatgagctttggggacaggcccaatctggagctgctgagggccctgggggagctgcggcagcgctgtgccatccttaaggaggaaaaccagatgctgaggaagagcagcttccctgagacagaagagaaggtgcggaggctgaagaggaagaacgccgagctggcggtcattgccaagcgcctggaggagagggcccgaaagctgcaggaaacgaacctgagggtggagggtccccagtggctccacgtgcgggacttcgatcggctgctgcgcgagtcccagcgggaggtgctgcggctgcagaggcagatcgcgctgcgcaaccagcgggagacgctcccgctcccgccgtcctggcccccgggccctgctctccaggccagagcaggggcgcctgctcccggggccccgggagaggccacgccccaggaggatgcggacaacctacccgtgattctaggggagccagagaaagagcagagggtgcagcagctggaatcggagctcagcaagaagcggaagaaatgcgagagcctggagcaggaagcccggaaaaagcagaggcgatgtgaggagctggaactgcagctgagacaagcgcagaatgagaatgcccgcctggtggaggagaactcccggctcagtgggagagccacagagaaggagcaggtggagtgggagaatgcggagctgaggggccagctcctgggggtgacacaggagagggactcagcccttcgcaagagccagggcctgcagagcaagctggagagcctggagcaagtgctgaagcacatgcgggaggtggcccagcggcggcagcagctggaggtggagcatgaacaggctcggctcagcctacgggagaagcaggaggaggtccggagactgcagcaggcccaggctgaagcccagagggaacatgaaggagccgtgcagctgctggagtctaccttggattccatgcaggcccgggttcgagagctcgaagaacagtgccgcagccaaaccgagcagttcagcctcctggcacaggaactccaggctttccgcctgcacccgggccccttggatctgctcacatctgccctggactgtgggagccttggagactgcccaccacccccctgctgctgctccattccccagccttgccgggggtctggccccaaagaccttgacctcccgccgggctcccctgggcgctgcaccccaaagtcttccgagcctgcccctgccactctcactggggtccctcgaaggacagccaagaaggcagagtctctctccaactcctcccactccgagtccatccacaacagccccaagtcatgccctacacctgaggtggacacagccagtgaggtagaggagctggaggcagacagtgtctccctgctcccagctgcgccagagggcagccggggaggagccaggatccaggtcttcctagcacgttatagctacaacccctttgagggtcccaatgagaatccagaagcagagcttccgctgacagctggcgagtacatctacatctatggcaacatggatgaggatggcttttttgaaggagagctcatggatggccgaaggggcctggtcccttccaattttgtagagcgtgtgtcggatgatgacctcctgacctccctccctccagagctggccgatttgtcccacagctcaggccctgaactcagtttcctgagtgtaggtgggggtggcagcagtagcgggggccaaagcagtgtgggaaggagccagcccagacctgaggaggaggatgcaggggacgagctcagtctgagcccatcaccggagggcctgggcgagcctcctgccgtgccttacccccgccgtctggtggtcctcaagcagctggcccacagcgtggtgctggcctgggagccgcctcctgagcaagtggagctacacggcttccatatctgtgtgaatggggagctgcgacaggccctggggcctggggcgccacccaaggccgtgctggagaacctggacctgtgggccgggccccttcacatttctgtccaggccctgactagccggggcagctctgacccactgcgctgttgcttggcggtgggtgcccgggccggagtggtgcccagccagctgcgggtccatcggttgacagccacatctgctgagatcacctgggtgcccggcaatagcaacttggcccatgccatctacctcaatggggaagagtgcccacctgccagccccagtacctactgggccaccttctgccacttacggcctggcacaccctatcaggcccaagtggaggctcagctcccaccccaagggccctgggaaccaggctgggagaggctggagcagcgggctgccaccctgcagttcaccacactcccagcaggcccacctgatgcccctctggatgtgcagatcgagcctgggccctcccctgggatcttgatcatcagttggctcccagtcaccatcgatgctgctggcacatccaacggtgtccgggtcacaggctatgccatctacgctgatgggcagaagatcatggaggtggcctcacccacggcaggcagtgtactggtggagttgtcccagctgcagctgctgcaggtgtgtcgtgaggtggtcgtgcgcaccatgtcgccccacggggagtcggcggactccatcccggctcctatcactcccgccctggctccggccagcctgccagcccgagtctcctgcccctcaccgcacccaagcccagaggccagagcgccccttgcttcagcctccccagggcctggagaccccagctctcctctccagcaccctgctccccttggaactcaagagcctccaggagcaccccctgcaagcccttccagagagatggcaaaagggtcccacgaggaccctccagcaccttgctcccaggaggaggctggggcagcagtgctgggcacctcagaggagaggacagccagcacatctaccctgggtgagaaggaccctggccccgcagctccctcactggccaagcaggaggccgagtggactgcaggagaggcctgtccggcctccagctccacccagggagcacgggcccagcaggcgccaaataccgagatgtgccaaggaggagacccagggtctgggctgaggcccagggctgagaaggaggacacagcagagcttggggttcatctggtgaactccctcgtggaccacggccgcaactcagacctgtcagacatccaggaggaagaggaagaggaggaggaggaggaggaagaggagctgggttccaggacttgctccttccagaagcaggttgctggcaacagcatcagggagaatggggccaagtcccagcccgaccccttttgtgagactgacagcgatgaggagatcttggagcagatcctggagctgcccctccagcagttctgtagcaagaagctctttagcatcccggaggaggaggaagaggaagaggaggacgaggaggaggagaagtcaggggcaggctgttcttcccgagaccctggcccgcctgaacctgcattgctggggctgggctgtgacagtggtcagccccgaagacctggccagtgtcccttgtctcctgagtcctccagggctggagactgcctggaagacatgcctggattagttggtggaagcagccggaggagaggagggggctcccctgagaagcccccaagccgcaggcggcctccagatccccgagaacactgcagccgacttctcagcaacaatgggccccaggcctctggacgactgggccccacacgggagaggggtggcctccccgtaattgagggccccaggactggactagaggctagcgggagaggccggctgggcccttcccggaggtgctcccgtggccgggcgctggagcctggcctggccagctgcctttcccccaagtgcttggaaatcagcattgaatatgattcggaggatgagcaggaggcgggcagcgggggcatcagcatcaccagctcctgctaccctggagatggggaggcctggggcacagcaactgtaggaaggcccagggggcctccgaaggccaattcaggccccaagccctacccacgcctcccagcctgggagaaaggggaaccagagcggagaggccgcagtgcgacgggcagagccaaggagccactctcccgggcaacagagaccggagaggccagagggcaggacggctctgggcggaggggcccccagaagagaggtgtccgagtcctcaggccaagcactgcagagctagtccctgcgaggagcccctcagaaacactggcttaccagcacctacccgtcaggatctttgtggctctgtttgactatgaccccgtgtcaatgtcgcccaatcctgatgctggagaagaagagcttcccttccgagagggtcagatcctgaaggtgtttggggacaaggatgccgatggcttctaccagggcgaaggtgggggccggacaggctacattccctgcaacatggtggctgaggtggctgtggacagccctgctgggagacagcaactgctccagcggggttatttgtccccagatattctccttgagggctcagggaatggtccgtttgtgtactccacagcccacacaactgggcctcctcccaagccccgccgctccaagaaagctgagtcggaaggccctgcccagccctgtccaggcccccctaagctggtcccctctgctgacctgaaagctccccactccatggtggctgcatttgactacaacccccaggagagttcccccaatatggacgtggaggcagagctgcccttccgggcaggggatgtcattactgtgtttgggggcatggacgatgacggtttctactatggggaattaaatggacaaaggggcctggttccatccaacttcctggagggccctgggcctgaggcaggcggcctggacagggaacccaggacaccccaggctgagagtcagagaacgaggaggagaagagtccagtgctagatggagatagatatatgtagagagagcaacatgactggggctgcaccacacaagggtccccagggcccccaggtgggccttgtacccccagctctggcagcgcccccaggattgaacgtggggagccccagggcagaagcgagaaggtgtggggtttcttctccaaggggaagcagctcctcaggaggctgggctctgggaagaaggagtgaagctgtggcccatcctgcaggcagaagaggccctgagaggcccccagatcactgtctctgctgagcagggaaggctcagactgggcccagagcccccgttcttctgcgttaacactgtggcattcagagggaatcaaagagccttggtgaaggtcagagctaaatggctccttaaggatgaactctctagagaagcaccttcctcctacaggaggggaaactgagcccacagtgagtatgtaacttgaccaaggtcactgagccaggactggacccaggaccctcgcgtcctggtccacccacctcgtctactagtgtcccacagtgctgcgctagtcccttctgccacccttcccagtcccaggacgggccctggagggagaaaggagcctgtgccccctgatggctctggctgtcctgatcctgtcttccctcccctgaaggaaagtttgcactggattttattggagccccatctccccagcgggcaggcgggcggagcctgtatatatgtatatactcagtgcctcagttcagcttcctccacctcgcttccactgcacaggcccaggaaggagaaaggccaagccaaagtgggccccaccctgcccccgtcgtgctccatccttccctgccggggcctgctggcccctgtaaggtcccgcccccaaagaccctggggccagcggggccgaaagcggagttgggtttgccttattttgctcattggattcaagttcttttgcatagttttcttctaacccctgttggagtccaggggctggagaaaaggacagatttatgcagctattttcatacattccctgttcagagtggggtaggggttctccgccgttacccgatccactccatcccccaccctctgaggggtgagtgtgtctttgcatgtttcctttgctgtggtgggagatagtttgactgaacccccaccttgaccttggtctccaggggtgtggaatggtgggggaatttgtttaaaaagacattttattataataaagtctattttcacaaaa

SEQ ID NO: 22516 - DNA, 1504 bp, Homo sapiens
  misc_feature 1..1504: note = ENST00000578511
  source 1..1504: mol_type = unassigned DNA; mol_type = unassigned DNA
ccctgctgggagacagcaactgctccagcggggttatttgtccccagatattctccttgagggctcaggtatgacctgctgctgtccctcacccacctcccaccagcccccttccaactccacctgaccctgagcaattgttgtgtctggggtgctcccacttacccagactctagcagagccttggagcctgccttgaaccctgctgcgtagtggtcagactgtacgtgggctggccgcgtggagtgggcgtctgttgcagaggggaatacagccatgcagccaggaattttgggtcctggaggttgggtggggctcttgtcagggatgggagatgaatgcccttacgaaacaagctcagtaacctagcacggccctgagaggaaactccagagtcccagtcctgtctctcccacctcccctgcctcgctttctctctgcttttctggatcagggaatggtccgtttgtgtactccacagcccacacaactgggcctcctcccaagccccgccgctccaagaaagctgagtcggaaggccctgcccagccctgtccaggcccccctaagctggtcccctctgctgacctgaaagctccccactccatggtggctgcatttgactacaacccccaggagagttcccccaatatggacgtggaggcagagctgcccttccgggcaggggatgtcattactgtgtttgggggcatggacgatgacggtttctactatggggaattaaatggacaaaggggcctggttccatccaacttcctggagggccctgggcctgaggcaggcggcctggacagggaacccaggacaccccaggctgagagtcagagaacgaggaggagaagagtccagtgctagatggagatagatatatgtagagagagcaacatgactggggctgcaccacacaagggtccccagggcccccaggtgggccttgtacccccagctctggcagcgcccccaggattgaacgtggggagccccagggcagaagcgagaaggtgtggggtttcttctccaaggggaagcagctcctcaggaggctgggctctgggaagaaggagtgaagctgtggcccatcctgcaggcagaagaggccctgagaggcccccagatcactgtctctgctgagcagggaaggctcagactgggcccagagcccccgttcttctgcgttaacactgtggcattcagagggaatcaaagagccttggtgaaggtcagagctaaatggctccttaaggatgaactctctagagaagcaccttcctcctacaggaggggaaactgagcccacagtgagtatgtaacttgaccaaggtcactgagccaggactggacccaggaccctcgcgtcctggtccacccacctcgtctactagtgtcccacagtgctgcgctagtcccttctgccacccttcccagtcccaggacgggccctggagggagaaaggagcctgtgccccctgatggctctggctgt

SEQ ID NO: 22517 - DNA, 5947 bp, Homo sapiens
  misc_feature 1..5947: note = ENST00000343736
  source 1..5947: mol_type = unassigned DNA; mol_type = unassigned DNA
agcctcctttgtgggtggggaagagctcagccaaccttggatggagcgtcggtgaagcaagagctcagaggggagaggggctggcctggcatgaccctcgccagtccccccacctggctgggtgatgtcccccggcccgggttctggggccccttggcagtaccatggagcaactgacaaccctcccacggcctggggaccctggagccatggagccatgggcactgcccacctggcatagctggactccaggtcgagggggtgaacctagcagtgcagccccaagcatcgctgatactcctccggcagctctgcagcttcaagaactgaggtctgaggagagttccaagcccaaaggagacgggagctccaggcccgtggggggaactgaccctgaaggagcagaggcttgtctgcccagcctgggccagcaagcatccagctctggacccgcctgccagaggccagaggatgaggaagtggaggctttcctgaaggccaagctgaatatgagctttggggacaggcccaatctggagctgctgagggccctgggggagctgcggcagcgctgtgccatccttaaggaggaaaaccagatgctgaggaagagcagcttccctgagacagaagagaaggtgcggaggctgaagaggaagaacgccgagctggcggtcattgccaagcgcctggaggagagggcccgaaagctgcaggaaacgaacctgagggtggtgagtgcccccttgccccggccggggaccagcttggagttgtgtcggaaggccctagcccgccagcgagcccgggacctcagtgagacagccagtgcactgctggccaaggacaagcagattgctgccttgcagcgggagtgcagggagctgcaggccaggctcactctggtgggcaaggagggtccccagtggctccacgtgcgggacttcgatcggctgctgcgcgagtcccagcgggaggtgctgcggctgcagaggcagatcgcgctgcgcaaccagcgggagacgctcccgctcccgccgtcctggcccccgggccctgctctccaggccagagcaggggcgcctgctcccggggccccgggagaggccacgccccaggaggatgcggacaacctacccgtgattctaggggagccagagaaagagcagagggtgcagcagctggaatcggagctcagcaagaagcggaagaaatgcgagagcctggagcaggaagcccggaaaaagcagaggcgatgtgaggagctggaactgcagctgagacaagcgcagaatgagaatgcccgcctggtggaggagaactcccggctcagtgggagagccacagagaaggagcaggtggagtgggagaatgcggagctgaggggccagctcctgggggtgacacaggagagggactcagcccttcgcaagagccagggcctgcagagcaagctggagagcctggagcaagtgctgaagcacatgcgggaggtggcccagcggcggcagcagctggaggtggagcatgaacaggctcggctcagcctacgggagaagcaggaggaggtccggagactgcagcaggcccaggctgaagcccagagggaacatgaaggagccgtgcagctgctggagtctaccttggattccatgcaggcccgggttcgagagctcgaagaacagtgccgcagccaaaccgagcagttcagcctcctggcacaggaactccaggctttccgcctgcacccgggccccttggatctgctcacatctgccctggactgtgggagccttggagactgcccaccacccccctgctgctgctccattccccagccttgccgggggtctggccccaaagaccttgacctcccgccgggctcccctgggcgctgcaccccaaagtcttccgagcctgcccctgccactctcactggggtccctcgaaggacagccaagaaggcagagtctctctccaactcctcccactccgagtccatccacaacagccccaagtcatgccctacacctgaggtggacacagccagtgaggtagaggagctggaggcagacagtgtctccctgctcccagctgcgccagagggcagccggggaggagccaggatccaggtcttcctagcacgttatagctacaacccctttgagggtcccaatgagaatccagaagcagagcttccgctgacagctggcgagtacatctacatctatggcaacatggatgaggatggcttttttgaaggagagctcatggatggccgaaggggcctggtcccttccaattttgtagagcgtgtgtcggatgatgacctcctgacctccctccctccagagctggccgatttgtcccacagctcaggccctgaactcagtttcctgagtgtaggtgggggtggcagcagtagcgggggccaaagcagtgtgggaaggagccagcccagacctgaggaggaggatgcaggggacgagctcagtctgagcccatcaccggagggcctgggcgagcctcctgccgtgccttacccccgccgtctggtggtcctcaagcagctggcccacagcgtggtgctggcctgggagccgcctcctgagcaagtggagctacacggcttccatatctgtgtgaatggggagctgcgacaggccctggggcctggggcgccacccaaggccgtgctggagaacctggacctgtgggccgggccccttcacatttctgtccaggccctgactagccggggcagctctgacccactgcgctgttgcttggcggtgggtgcccgggccggagtggtgcccagccagctgcgggtccatcggttgacagccacatctgctgagatcacctgggtgcccggcaatagcaacttggcccatgccatctacctcaatggggaagagtgcccacctgccagccccagtacctactgggccaccttctgccacttacggcctggcacaccctatcaggcccaagtggaggctcagctcccaccccaagggccctgggaaccaggctgggagaggctggagcagcgggctgccaccctgcagttcaccacactcccagcaggcccacctgatgcccctctggatgtgcagatcgagcctgggccctcccctgggatcttgatcatcagttggctcccagtcaccatcgatgctgctggcacatccaacggtgtccgggtcacaggctatgccatctacgctgatgggcagaagatcatggaggtggcctcacccacggcaggcagtgtactggtggagttgtcccagctgcagctgctgcaggtgtgtcgtgaggtggtcgtgcgcaccatgtcgccccacggggagtcggcggactccatcccggctcctatcactcccgccctggctccggccagcctgccagcccgagtctcctgcccctcaccgcacccaagcccagaggccagagcgccccttgcttcagcctccccagggcctggagaccccagctctcctctccagcaccctgctccccttggaactcaagagcctccaggagcaccccctgcaagcccttccagagagatggcaaaagggtcccacgaggaccctccagcaccttgctcccaggaggaggctggggcagcagtgctgggcacctcagaggagaggacagccagcacatctaccctgggtgagaaggaccctggccccgcagctccctcactggccaagcaggaggccgagtggactgcaggagaggcctgtccggcctccagctccacccagggagcacgggcccagcaggcgccaaataccgagatgtgccaaggaggagacccagggtctgggctgaggcccagggctgagaaggaggacacagcagagcttggggttcatctggtgaactccctcgtggaccacggccgcaactcagacctgtcagacatccaggaggaagaggaagaggaggaggaggaggaggaagaggagctgggttccaggacttgctccttccagaagcaggttgctggcaacagcatcagggagaatggggccaagtcccagcccgaccccttttgtgagactgacagcgatgaggagatcttggagcagatcctggagctgcccctccagcagttctgtagcaagaagctctttagcatcccggaggaggaggaagaggaagaggaggacgaggaggaggagaagtcaggggcaggctgttcttcccgagaccctggcccgcctgaacctgcattgctggggctgggctgtgacagtggtcagccccgaagacctggccagtgtcccttgtctcctgagtcctccagggctggagactgcctggaagacatgcctggattagttggtggaagcagccggaggagaggagggggctcccctgagaagcccccaagccgcaggcggcctccagatccccgagaacactgcagccgacttctcagcaacaatgggccccaggcctctggacgactgggccccacacgggagaggggtggcctccccgtaattgagggccccaggactggactagaggctagcgggagaggccggctgggcccttcccggaggtgctcccgtggccgggcgctggagcctggcctggccagctgcctttcccccaagtgcttggaaatcagcattgaatatgattcggaggatgagcaggaggcgggcagcgggggcatcagcatcaccagctcctgctaccctggagatggggaggcctggggcacagcaactgtaggaaggcccagggggcctccgaaggccaattcaggccccaagccctacccacgcctcccagcctgggagaaaggggaaccagagcggagaggccgcagtgcgacgggcagagccaaggagccactctcccgggcaacagagaccggagaggccagagggcaggacggctctgggcggaggggcccccagaagagaggtgtccgagtcctcaggccaagcactgcagagctagtccctgcgaggagcccctcagaaacactggcttaccagcacctacccgtcaggatctttgtggctctgtttgactatgaccccgtgtcaatgtcgcccaatcctgatgctggagaagaagagcttcccttccgagagggtcagatcctgaaggtgtttggggacaaggatgccgatggcttctaccagggcgaaggtgggggccggacaggctacattccctgcaacatggtggctgaggtggctgtggacagccctgctgggagacagcaactgctccagcggggttatttgtccccagatattctccttgagggctcagggaatggtccgtttgtgtactccacagcccacacaactgggcctcctcccaagccccgccgctccaagaaagctgagtcggaaggccctgcccagccctgtccaggcccccctaagctggtcccctctgctgacctgaaagctccccactccatggtggctgcatttgactacaacccccaggagagttcccccaatatggacgtggaggcagagctgcccttccgggcaggggatgtcattactgtgtttgggggcatggacgatgacggtttctactatggggaattaaatggacaaaggggcctggttccatccaacttcctggagggccctgggcctgaggcaggcggcctggacagggaacccaggacaccccaggctgagagtcagagaacgaggaggagaagagtccagtgctagatggagatagatatatgtagagagagcaacatgactggggctgcaccacacaagggtccccagggcccccaggtgggccttgtacccccagctctggcagcgcccccaggattgaacgtggggagccccagggcagaagcgagaaggtgtggggtttcttctccaaggggaagcagctcctcaggaggctgggctctgggaagaaggag

SEQ ID NO: 22518 - DNA, 746 bp, Homo sapiens
  misc_feature 1..746: note = ENST00000577871
  source 1..746: mol_type = unassigned DNA; mol_type = unassigned DNA
tgcttttctggatcagggaatggtccgtttgtgtactccacagcccacacaactgggcctcctcccaagccccgccgctccaagaaagctgagtcggaaggccctgcccagccctgtccaggcccccctaagctggtcccctctgctgacctgaaagctccccactccatggtggctgcatttgactacaacccccaggagagttcccccaatatggacgtggaggcagagctgcccttccgggcaggggatgtcattactgtgtttgggggcatggacgatgacggtttctactatggggaattaaatggacaaaggggcctggttccatccaacttcctggagggccctgggcctgaggcaggcggcctggacagggaacccaggacaccccaggctgagagtcaggacactcccaccctgggggtggtctccatacctcccaggtgcctttggaagccagttgcccagccaggcccagcttcctgggttctcgttccttgagcttgcctctccttgggagaacgaggaggagaagagtccagtgctagatggagatagatatatgtagagagagcaacatgactggggctgcaccacacaagggtccccagggcccccaggtgggccttgtacccccagctctggcagcgcccccaggattgaacgtggggagccccagggcagaagcgagaaggtgtggggtttcttctccaaggggaagcagctcctcaggaggctgggct

SEQ ID NO: 22519 - DNA, 809 bp, Homo sapiens
  misc_feature 1..809: note = ENST00000580669
  source 1..809: mol_type = unassigned DNA; mol_type = unassigned DNA
gagccaaggagccactctcccgggcaacagagaccggagaggccagagggcaggacggctctgggcggaggggcccccagaagagaggtgtccgagtcctcaggccaagcactgcagagctagtccctgcgaggagcccctcagaaacactggcttaccagcacctacccgtcaggatctttgtggctctgtttgactatgaccccgtgtcaatgtcgcccaatcctgatgctggagaagaagagcttcccttccgagagggtcagatcctgaaggtgtttggggacaaggatgccgatggcttctaccagggcgaaggtgggggccggacaggctacattccctgcaacatggtggctgaggtggctgtggacagccctgctgggagacagcaactgctccagcggggttatttgtccccagatattctccttgagggctcagcccacacaactgggcctcctcccaagccccgccgctccaagaaagctgagtcggaaggccctgcccagccctgtccaggcccccctaagctggtcccctctgctgacctgaaagctccccactccatggtggctgcatttgactacaacccccaggagagttcccccaatatggacgtggaggcagagctgcccttccgggcaggggatgtcattactgtgtttgggggcatggacgatgacggtttctactatggggaattaaatggacaaaggggcctggttccatccaacttcctggagggccctgggcctgaggcaggcggcctggacagggaacccaggacaccccaggctgagagtcag

SEQ ID NO: 22520 - DNA, 887 bp, Homo sapiens
  misc_feature 1..887: note = ENST00000582679
  source 1..887: mol_type = unassigned DNA; mol_type = unassigned DNA
ggcagcagtgctgggcacctcagaggagaggacagccagcacatctaccctgggtgagaaggaccctggccccgcagctccctcactggccaagcaggaggccgagtggactgcaggagaggcctgtccggcctccagctccacccagggagcacgggcccagcaggcgccaaataccgagatgtgccaaggaggagacccagggtctgggctgaggcccagggctgagaaggaggacacagcagagcttggggttcatctggtgaactccctcgtggaccacggccgcaactcagacctgtcagacatccaggaggaagaggaagaggaggaggaggaggaggaagaggagctgggttccaggacttgctccttccagaagcaggttgctggcaacagcatcagggagaatggggccaaggcaacagagaccggagaggccagagggcaggacggctctgggcggaggggcccccagaagagaggtgtccgagtcctcaggccaagcactgcagagctagtccctgcgaggagcccctcagaaacactggcttaccagcacctacccgtcaggatctttgtggctctgtttgactatgaccccgtgtcaatgtcgcccaatcctgatgctggagaagaagagcttcccttccgagagggtcagatcctgaaggtgtttggggacaaggatgccgatggcttctaccagggcgaaggtgggggccggacaggctacattccctgcaacatggtggctgaggtggctgtggacagccctgctgggagacagcaactgctccagcggggttatttgtccccagatattctccttgagggctcagcccacacaactgggcctcctcccaagccccgccgctccaagaaag

SEQ ID NO: 22521 - DNA, 471 bp, Homo sapiens
  misc_feature 1..471: note = ENST00000578486
  source 1..471: mol_type = unassigned DNA; mol_type = unassigned DNA
gagcggagaggccgcagtgcgacgggcagagccaaggagccactctcccgggcaacagagaccggagaggccagagggcaggacggctctgggcggaggggcccccagaagagaggtgtccgagtcctcaggccaagcactgcagagctagtccctgcgaggagcccctcagaaacactggcttaccagcacctacccgtcaggatctttgtggctctgtttgactatgaccccgtgtcaatgtcgcccaatcctgatgctggagaagaagagcttcccttccgagagggtcagatcctgaaggtgactgattcgccatcagggctcagaattccaaacaccagctgggtcttccctcctccctcctttcctccactggaggtagcacagaatcatggtggagaacatggcttctagagcagatgacatgggtttggacctgactctgctgcttctagctgtgtaaccttg

SEQ ID NO: 22522 - DNA, 381 bp, Homo sapiens
  misc_feature 1..381: note = ENST00000585149
  source 1..381: mol_type = unassigned DNA; mol_type = unassigned DNA
gtggaggctcagctcccaccccaagggccctgggaaccaggctgggagaggctggagcagcgggctgccaccctgcagttcaccacactcccagcaggcccacctgatgcccctctggatgtgcagatcgagcctgggccctcccctgggatcttgatcatcagttggctcccagtcaccatcgatgctgctggcacatccaacggtgtccgggtcacaggctatgccatctacgctgatgggcagaaggtatagccctgcccactgtaccctgggagtgggggtgggtcccttcttgctatgctcagaggtctaggctctctggcttggcacggagatgcccagcccctggcatttgggtaccatgaggcagatgggtta

SEQ ID NO: 22523 - DNA, 409 bp, Homo sapiens
  misc_feature 1..409: note = ENST00000583624
  source 1..409: mol_type = unassigned DNA; mol_type = unassigned DNA
gggactcagcccttcgcaagagccagggcctgcagagcaagctggagagcctggagcaagtgctgaagcacatgcgggaggtggcccagcggcggcagcagctggaggtggagcatgaacaggctcggctcagcctacgggagaagcaggaggaggtccggagactgcagcaggtggggcggcagtgagggaagctggcaggctgctggacaccagctttgccactcactcattccacaagcatttactgtgtgcccggcactgtgctaggcgtcggggagactgtggggaacaaagaccaggtccctgagcagtcagcaaattagcatccaggagtgagctgatttcagacactgatgagcacagtggtggagaagaacagggtgatgtgacaaagtgactgggatgg

SEQ ID NO: 22524 - DNA, 3076 bp, Homo sapiens
  misc_feature 1..3076: note = ENST00000375173
  source 1..3076: mol_type = unassigned DNA; mol_type = unassigned DNA
gtcccccctggaaaagggaacaatcaaagaggaaaagaccacttaacaagggggttgggaggtagttggccagctttggaatagctggtgagagagagaaactttcattaccatctagttaccacctgttctctagatgggaaaaagaaaaaaaaagtcagtaaatactggaagcagacagttaccagaagtcacccccacaaaaaaataagctgggtggtgggggtggtggttagttgttgttgctagaagacagaagacttactatttggaaaccttccccgggttccacaggatctacgagattctagtcagcaaagggagcaatgcctgtccacgtgtgtgtgaatgtatgtgtttataatgatggcttttccttcctccccagagtgttcatactgtggagcccgctgggaccagtataaactctgctctactccccagtgccgccagctcgttttgacctgccctgcctgtcaaggacaaggattcacagcctgttgtgtcacatgtcaagacaaggggagcaggaaagtttcaggccctatgcaagacagctttaaagaggaatgcgagtgcacagcccgacggccacgcatacctagggaactcttgcagcatgtgcgacagcctgtgagcccagagccagggcctgatgctgatgaggatgggccagtgcttatgtgagcagcacctttggcattttcccaggccctcggtaaaagtaggtttggggtgactatacagagaaagcatggcaagactgcagaaacagagaaatcgggaacttcagttctggccgctgccaccgtggcagccgtctacacttcacagcgggaggggaggagtcacgttgtctaccacttacctgagacattctgatttggatgatgctagagcacagaaaataggtgagctgcatgggatcccaaagctgctgagggatagagcctgagcctggtggccacagcatatgccctttctgttccatgcagctggggctgttagtagtcattgcccttgtcagcagaccttctaccctggtggcaaacacatgaaagctgtggccctgggagtggcctcctaaaacaagccacttaggtcatctgccatctacccttaacctctgtctctcgcctgaggggaatctgcaagctgtgcattgggcttacctcctgcttttgtagaaataaccatcctttggtatacatggaggatagttccagaacgcctgagtatacaaaaacccaatgcatactcaagtcccacagtgggccctacagaacccacgtatgtgataaatcagccctccatgtacgcaggtttcgccccctgccaatactgtattttcaacctgtatggttgaaaaaaatccatatataagtgcagccatgcagttcaaacccatattgttcaagggtcaactgtatagtttattgaacagccacacccattcctttacacatgatctatggcagagttgaatagttgcaacagacactatgtggcctgcaaaatcggaaatttttactgtctggccttttacagaaaagtttgccagcccctgatctagaccagcagctcatctgatagaggcagaggtggccttaaagatgtggccttcttcattttctgttggtttggtttcgtttctatgagagatttcctctgatagctctgctttccccagcacttactctctgagcttttaaatgttctctctgggagcttcatataagctcggtgacatttgagccacagtttttagatcagcacctggaatacatgacacattcttactgaggtcatccagcactgccatggtggctgcccagtcttctggccagtgtgccaggcacatgtccctgtcacacaggttccaagaaacacatacgcagccatgcatagaccaacagatttaatattatattgcagttttcagcgatgcagaatgcagctgcaattgtgttttaaggagaagccaaatggggatggttgtccctgcaacatggtgccactcctgggccatgtgcagcctcagtggacactcttccatagcgctgaggccctggccccgcctccagttaccctgtactgcccactgccttacagttcagtgcgcaggccttcaccttttcatcaccagcctctctgctcagtgctctggagttcttgaccttgtcctttatcatgagatttgctgaaatcactaatgaaaataactcccaaaagcaacaaacaaaaatattagtttaactggcactgtggtatattaaaaggcacaagggcattgtggcttaacacttttgctggatcccaagagacgcacatgatgttaaaaagagatctggcagcagtactaatactacatttcagtgtaatcatcttggggtggtttggccaggatttcccaattccttgatatctggagtttcttcaccattgtccggcatcctgcggaggcttaatatacaggcgtaaggtcagcagcaatttgtctaataagtgatgagatcagtagctgaagtctctaagctgggccattactaaataccatagccatgttgatctggaaatttatccctctagtgtcttacctcacataagccatttgcccactgtgcaatatagaaaggtgttttcaaaagtatttggccgtagattttcacatccatcataaggttggcattcaataaggaaaaagttctaactccagtattaaattgtacataaatcccaaatgttcttaaagaacactcagggacatgtttgttgcctgggattggtaatgaaaggttggtttttgaaacttgaaatttcaccattggtttttttcctatcatttctgcatatccagcaaaaggaatctcatgttgactcctggcagagttcagtggcttcagtctgtctatctgttctgaggggaaaattgtgttctggatccagtaatcaatttggcaactttaatcgaggttttcaaaattccaaggagggttaataaagaatgataatcagttttatttgctaatagctaagacaaatttgtaataaagtgttttataatacttcaaaagca

SEQ ID NO: 22525 - DNA, 4320 bp, Homo sapiens
  misc_feature 1..4320: note = ENST00000341170
  source 1..4320: mol_type = unassigned DNA; mol_type = unassigned DNA
cgcagaaagtgccgccgctttggccactcagagcccccgggccgcggtcgtcgtacgcctgaaggcgggtcgtgccggcggccgctctagtctccgcctccgctcaggccggtcctccggggcttctcaatggtttcccggtggcctctcaatggttttcccggcggcccttgcgccgacgccaggagacttccggagcttggtgacgtcacgagcgagcttttctacccaaatacgcggcgggggaataggctcgagggcggtgagcagtgacaattgctaggcggagacagtgcagggaagagagaccttagaaaggatcaggactggcgggaggtatttaactgaaaggaatatctgcttcactgttgcaaccaaaccagatgccttcttccacttcaccagaccaaggagatgacctggagaactgcattttaagattttctgacctggatttaaaagatatgagtcttattaatcccagcagcagtcttaaagcagaattagatggcagtacaaaaaagaaatactcgtttgcaaagaaaaaggcctttgccctttttgtcaaaaccaaagaagttccaacaaaaaggagttttgaatgtaaagaaaaattgtggaaatgctgtcggcagctattcacagaccaaaccagcatccatagacatgtggcaacacaacatgctgatgaaatttatcaccagacagcttctattttaaagcaactggctgtgacattgagcacctcaaagagtctttcgtctgcagatgaaaagaaccctttaaaagagtgccttccacatagccatgacgtgtctgcttggctccctgatataagctgctttaaccctgatgagctgataagtggccagggcagtgaagaaggggaggtgctcctttattactgctaccatgacctggaggatccccaatggatctgtgcctggcagacagctctgtgtcagcacctgcacctcacaggcaagattcgaattgctgcagaaggaatcaatgggacagttggtggaagcaaattggctaccagactttatgtggaagtcatgctttccttcccattgtttaaggatgacctgtgtaaagatgattttaagaccagcaaaggaggagctcactgttttccagaattgcgtgttggtgtatttgaagaaatcgtgcccatggggatcagccccaaaaagatctcctacaagaagcctggaatccatttatccccaggtgaatttcataaagaagtagaaaagtttttatctcaggcaaatcaagaacaaagtgatactatccttcttgattgcagaaacttctatgaaagcaaaataggacgattccaaggctgcttagccccagacatcaggaaattcagttacttccctagctacgttgacaaaaatctagaacttttcagagagaagagagtgctgatgtactgtaccgggggcatccgctgtgagcggggttcagcctacctcaaagccaagggagtgtgcaaggaggtgttccagctcaagggtggcatccacaagtacctggaagagtttcctgatggcttttacaaagggaagttgtttgtttttgatgaacgctatgctctgtcctacaacagtgatgtggtgtcagagtgttcatactgtggagcccgctgggaccagtataaactctgctctactccccagtgccgccagctcgttttgacctgccctgcctgtcaaggacaaggattcacagcctgttgtgtcacatgtcaagacaaggggagcaggaaagtttcaggccctatgcaagacagctttaaagaggaatgcgagtgcacagcccgacggccacgcatacctagggaactcttgcagcatgtgcgacagcctgtgagcccagagccagggcctgatgctgatgaggatgggccagtgcttatgtgagcagcacctttggcattttcccaggccctcggtaaaagtaggtttggggtgactatacagagaaagcatggcaagactgcagaaacagagaaatcgggaacttcagttctggccgctgccaccgtggcagccgtctacacttcacagcgggaggggaggagtcacgttgtctaccacttacctgagacattctgatttggatgatgctagagcacagaaaataggtgagctgcatgggatcccaaagctgctgagggatagagcctgagcctggtggccacagcatatgccctttctgttccatgcagctggggctgttagtagtcattgcccttgtcagcagaccttctaccctggtggcaaacacatgaaagctgtggccctgggagtggcctcctaaaacaagccacttaggtcatctgccatctacccttaacctctgtctctcgcctgaggggaatctgcaagctgtgcattgggcttacctcctgcttttgtagaaataaccatcctttggtatacatggaggatagttccagaacgcctgagtatacaaaaacccaatgcatactcaagtcccacagtgggccctacagaacccacgtatgtgataaatcagccctccatgtacgcaggtttcgccccctgccaatactgtattttcaacctgtatggttgaaaaaaatccatatataagtgcagccatgcagttcaaacccatattgttcaagggtcaactgtatagtttattgaacagccacacccattcctttacacatgatctatggcagagttgaatagttgcaacagacactatgtggcctgcaaaatcggaaatttttactgtctggccttttacagaaaagtttgccagcccctgatctagaccagcagctcatctgatagaggcagaggtggccttaaagatgtggccttcttcattttctgttggtttggtttcgtttctatgagagatttcctctgatagctctgctttccccagcacttactctctgagcttttaaatgttctctctgggagcttcatataagctcggtgacatttgagccacagtttttagatcagcacctggaatacatgacacattcttactgaggtcatccagcactgccatggtggctgcccagtcttctggccagtgtgccaggcacatgtccctgtcacacaggttccaagaaacacatacgcagccatgcatagaccaacagatttaatattatattgcagttttcagcgatgcagaatgcagctgcaattgtgttttaaggagaagccaaatggggatggttgtccctgcaacatggtgccactcctgggccatgtgcagcctcagtggacactcttccatagcgctgaggccctggccccgcctccagttaccctgtactgcccactgccttacagttcagtgcgcaggccttcaccttttcatcaccagcctctctgctcagtgctctggagttcttgaccttgtcctttatcatgagatttgctgaaatcactaatgaaaataactcccaaaagcaacaaacaaaaatattagtttaactggcactgtggtatattaaaaggcacaagggcattgtggcttaacacttttgctggatcccaagagacgcacatgatgttaaaaagagatctggcagcagtactaatactacatttcagtgtaatcatcttggggtggtttggccaggatttcccaattccttgatatctggagtttcttcaccattgtccggcatcctgcggaggcttaatatacaggcgtaaggtcagcagcaatttgtctaataagtgatgagatcagtagctgaagtctctaagctgggccattactaaataccatagccatgttgatctggaaatttatccctctagtgtcttacctcacataagccatttgcccactgtgcaatatagaaaggtgttttcaaaagtatttggccgtagattttcacatccatcataaggttggcattcaataaggaaaaagttctaactccagtattaaattgtacataaatcccaaatgttcttaaagaacactcagggacatgtttgttgcctgggattggtaatgaaaggttggtttttgaaacttgaaatttcaccattggtttttttcctatcatttctgcatatccagcaaaaggaatctcatgttgactcctggcagagttcagtggcttcagtctgtctatctgttctgaggggaaaattgtgttctggatccagtaatcaatttggcaactttaatcgaggttttcaaaattccaaggagggttaataaagaatgataatcagttttatttgctaatagctaagacaaatttgtaataaagtgttttataatacttcaaaa

SEQ ID NO: 22526 - DNA, 1503 bp, Homo sapiens
  misc_feature 1..1503: note = ENST00000375172
  source 1..1503: mol_type = unassigned DNA; mol_type = unassigned DNA
aattgctaggcggagacagtgcagggaagagagaccttagaaaggatcaggactggcgggaggtatttaactgaaaggaatatctgcttcactgttgcaaccaaaccagatgccttcttccacttcaccagaccaaggagatgacctggagaactgcattttaagattttctgacctggatttaaaagatatgagtcttattaatcccagcagcagtcttaaagcagaattagatggcagtacaaaaaagaaatactcgtttgcaaagaaaaaggtagaattcttatgaatgtttcatgatcatgtatgtgtggttaacgcagatacatttggaagtcggttatcaaggttgctctccagctcaaggcctttgccctttttgtcaaaaccaaagaagttccaacaaaaaggagttttgaatgtaaagaaaaattgtggaaatgctgtcggcagctattcacagaccaaaccagcatccatagacatgtggcaacacaacatgctgatgaaatttatcaccagacagcttctattttaaagcaactggctgtgacattgagcacctcaaagagtctttcgtctgcagatgaaaagaaccctttaaaagagtgccttccacatagccatgacgtgtctgcttggctccctgatataagctgctttaaccctgatgagctgataagtggccagggcagtgaagaaggggaggtgctcctttattactgctaccatgacctggaggatccccaatggatctgtgcctggcagacagctctgtgtcagcacctgcacctcacaggcaagattcgaattgctgcagaaggaatcaatgggacagttggtggaagcaaattggctaccagactttatgtggaagtcatgctttccttcccattgtttaaggatgacctgtgtaaagatgattttaagaccagcaaaggaggagctcactgttttccagaattgcgtgttggtgtatttgaagaaatcgtgcccatggggatcagccccaaaaagatctcctacaagaagcctggaatccatttatccccaggtgaatttcataaagaagtagaaaagtttttatctcaggcaaatcaagaacaaagtgatactatccttcttgattgcagaaacttctatgaaagcaaaataggacgattccaaggctgcttagccccagacatcaggaaattcagttacttccctagctacgttgacaaaaatctagaacttttcagagagaagagagtgctgatgtactgtaccgggggcatccgctgtgagcggggttcagcctacctcaaagccaagggagtgtgcaaggaggtgttccagctcaagggtggcatccacaagtacctggaagagtttcctgatggcttttacaaagggaagttgtttgtttttgatgaacgctatgctctgtcctacaacagtgatgtggtgtcagagtgttcatactgtggagcccgctgggaccagtataaactctgctctact

SEQ ID NO: 22527 - DNA, 1612 bp, Homo sapiens
  misc_feature 1..1612: note = ENST00000375165
  source 1..1612: mol_type = unassigned DNA; mol_type = unassigned DNA
gaaaaaggtagaattcttatgaatgtttcatgatcatgtatgtgtggttaacgcagatacatttggaagtcggttatcaaggttgctctccagctcaaggcctttgccctttttgtcaaaaccaaagaagttccaacaaaaaggagttttgaatgtaaagaaaaattgtggaaatgctgtcggcagctattcacagaccaaaccagcatccatagacatgtggcaacacaacatgctgatgaaatttatcaccagacagcttctattttaaagcaactggctgtgacattgagcacctcaaagagtctttcgtctgcagatgaaaagaaccctttaaaagagtgccttccacatagccatgacgtgtctgcttggctccctgatataagctgctttaaccctgatgagctgataagtggccagggcagtgaagaaggggaggtgctcctttattactgctaccatgacctggaggatccccaatggatctgtgcctggcagacagctctgtgtcagcacctgcacctcacaggcaaggaatccatttatccccaggtgaatttcataaagaagtagaaaagtttttatctcaggcaaatcaagaacaaagtgatactatccttcttgattgcagaaacttctatgaaagcaaaataggacgattccaaggctgcttagccccagacatcaggaaattcagttacttccctagctacgttgacaaaaatctagaacttttcagagagaagagagtgctgatgtactgtaccgggggcatccgctgtgagcggggttcagcctacctcaaagccaagggagtgtgcaaggaggtgttccagctcaagggtggcatccacaagtacctggaagagtttcctgatggcttttacaaagggaagttgtttgtttttgatgaacgctatgctctgtcctacaacagtgatgtggtgtcaggtaggtcagcacaggctcagagcccaaactgaaatgaagcacattgtcagttcactattctagaaaaatgacacagggaagacaggccagtgctcattactgagcactgaataagcagggaaaataagtacattgtgccaccattttcccagctgtggagctgagagaaccctagcccaggagtcaggaggcctgggttgggatcctggcttcaccattgctagctggacaagcccattaacatggggatcatctcacctgccctgcctgcctgtctacctgccaagagctgtactactgggctaattcagggctcttaacctggaattggtacatagatttcagggattctgtgaatttggatggaaaaataattgtatctttgttttcaataacacctcactaaaatgaagcatttcctttagttatgaatgtaggcaacaaagtaccagttgtattaatgtacctgtgactttgtcttcagtaggattcacaatactttcatatcatgttctagttgcctcagatatctcaaaatagtatttatactcatcactgcttcaaaatgaaaatagttattaggcccaccactaagagttgatatataatgtgttaataaatggcacgtcttattatatattacagattttgaaaaaga

SEQ ID NO: 22528 - DNA, 584 bp, Homo sapiens
  misc_feature 1..584: note = ENST00000375163
  source 1..584: mol_type = unassigned DNA; mol_type = unassigned DNA
gaaaagaaccctttaaaagagtgccttccacatagccatgacgtgtctgcttggctccctgatataagctgctttaaccctgatgagctgataagtggccagggcagtgaagaaggggaggtgctcctttattactgctaccatgacctggaggatccccaatggatctgtgcctggcagacagctctgtgtcagcacctgcacctcacaggcaagattcgaattgctgcagaaggaatcaatgggacagttggtggaagcaaattggctaccagactttatgtggaagtcatgctttccttcccattgtttaaggatgacctgtgtaaagatgattttaagaccagcaaaggaggagctcactgttttccagaattgcgtgttggtgtatttgaagaaatcgtgcccatggggatcagccccaaaaagatctcctacaagaagcctggtatgcttgcttttagaagattgtgctttaattcacagggacaaaacttaatagacaaataagaaagctaggcactgtgatcagcagcagtcatgagtcctctctaaagcagctgtggggtggctaacacttggct

SEQ ID NO: 22529 - DNA, 500 bp, Homo sapiens
  misc_feature 1..500: note = ENST00000484708
  source 1..500: mol_type = unassigned DNA; mol_type = unassigned DNA
gtgctcctttattactgctaccatgacctggaggatccccaatggatctgtgcctggcagacagctctgtgtcagcacctgcacctcacaggcaagattcgaattgctgcagaaggaatcaatgggacagttggtggaagcaaattggctaccagactttatgtggaagtcatgctttccttcccattgtttaaggatgacctgtgtaaagatgattttaaggttacgagacagtacaatagaaggagtatgctcgtccccattctttcactgagtcaccatatgattttggaccagctagtgctctagacctcagtatcccttcttataaaataagaatgttacagctcatgcaatctgggactccaaatcttggacatattagctcacttgagagaccaccagcctggtcagcagatcactgtgtttttagtaaatctggaattgtaagattaacacttcataccacatgggggaataaagttgttgctctcacaggt

SEQ ID NO: 22530 - DNA, 491 bp, Homo sapiens
  misc_feature 1..491: note = ENST00000502782
  source 1..491: mol_type = unassigned DNA; mol_type = unassigned DNA
gccgaatacagcccgcacacgtcgcagctttaaataagtagggccgtggggcccggcgctcccttccatccttggacggaatgtatcttctcttcctacgccttcacctccgaggggaagaagatgcaagccagccccatccgtatcccaactgttagcaatgacatcgactgggatttctgcttccatatgtcacagcaaaccgagatcccagctcaccagcaaacagatgagttgtatcccactggtgggtgtggagagagtgaagaggaaactaaagctaaagagaaggagaaggccatagactgtatgtctcatcccaaagagaaattagcccaatcccagaagaaagtagctcagctgattaaggaaaaaatggcctcccagttcaggccaagaaacatgctacatcagccaagaatacactgttgacctggaaggcaaatacgacctcaaataaggagaaagaggaaatcctggaagctctggtc

SEQ ID NO: 22531 - DNA, 545 bp, Homo sapiens
  misc_feature 1..545: note = ENST00000506758
  source 1..545: mol_type = unassigned DNA; mol_type = unassigned DNA
attgtctccttggccggacctgggctgcggaaggaagaagatgcaagccagccccatccgtatcccaactgttagcaatgacatcgactgggatttctgcttccatatgtcacagcaaaccgagatcccagctcaccagcaaacagatgagttgtatcccactggtgggtgtggagagagtgaagaggaaactaaagctaaagagaaggagaaggccatagactgtatgtctcatcccaaagagaaattagcccaatcccagaagaaagtagctcagctgattaaggaaaaaatgaatactcaagcaaacaaggagctgattcgatgtgtcatcctttctcggattatttttggggaccatcactggaaatgtgcacgagctctggccaacctagcttatggctacttgacactgagaggcctcccagttcaggccaagaaacatgctacatcagccaagaatacactgttgacctggaaggcaaatacgacctcaaataaggagaaagaggaaatcctggaagctctggtcaagctgtactaca

SEQ ID NO: 22532 - DNA, 1353 bp, Homo sapiens
  misc_feature 1..1353: note = ENST00000505624
  source 1..1353: mol_type = unassigned DNA; mol_type = unassigned DNA
attgtctccttggccggacctgggctgcggaaggtaactggggacgtcgcaggctgtgcagctttcgcgaggcaccgctttggcgcccggaccgaggaagaagatgcaagccagccccatccgtatcccaactgttagcaatgacatcgactgggatttctgcttccatatgtcacagcaaaccgagatcccagctcaccagcaaacagatgagttgtatcccactggtgggtgtggagagagtgaagaggaaactaaagctaaagagaaggagaaggccatagactgtatgtctcatcccaaagagaaattagcccaatcccagaagaaagtagctcagctgattaaggaaaaaatgaatactcaagcaaacaaggagctgattcgatgtgtcatcctttctcggattatttttggggaccatcactggaaatgtgcacgagctctggccaacctagcttatggctacttgacactgagaggcctcccagttcaggccaagaaacatgctacatcagccaagaatacactgttgacctggaaggcaaatacgacctcaaataaggagaaagaggaaatcctggaagctctggtcaagctgtactacactctgggcgtggcctggctcctgcagaaccgtggcagagaagcctatttcaacctgcagaaggcagagagaaacatgaaggagctgaaagaattatataaaggaggtgtttgtgaattacaagtctctgagaacgacctaacacttgctttgggcagagcctccttggccatccacagactgaacctagctctggcatactttgaaaaggcaattggcgatgttattgctgccaagggtgataggacgtcagatctgatcagcctgtacgaggaagctgctcagatagagcagctgaggaggaaccacaaccaggccatccagtacttgcagcaggctcattctgtctgtgtttctttgttcactgaagtcagccccaaaactgcagaaatgagtgcgttactggccaaagcttatgccatgtctggagaggcccagcacagggatgctgttgagatatatttcataagaagtatcaatgcatatcgagcaacattgggctcagaggattttgaaacactgagcaccactgaagaattttgcaaatggcttgtccaaaatggagaaaaacaggacaagtagcagttcatccagatggagaagagaagccattcctggaagaaggaactctacatacaaaggcacagaagcatgacagagggcagtgtatggaggaatggtcttctgttatcaaattgaaaacctctatacaggatagccaacaataaagacaaccttgttgatga

SEQ ID NO: 22533 - DNA, 3410 bp, Homo sapiens
  misc_feature 1..3410: note = ENST00000508722
  source 1..3410: mol_type = unassigned DNA; mol_type = unassigned DNA
tgtctccttggccggacctgggctgcggaaggtaactggggacgtcgcaggctgtgcagctttcgcgaggcaccgctttggcgcccggaccgaggaagaagatgcaagccagccccatccgtatcccaactgttagcaatgacatcgactgggatttctgcttccatatgcctcccagttcaggccaagaaacatgctacatcagccaagaatacactgttgacctggaaggcaaatacgacctcaaataaggagaaagaggaaatcctggaagctctggtcaagctgtactacactctgggcgtggcctggctcctgcagaaccgtggcagagaagcctatttcaacctgcagaaggcagagagaaacatgaaggagctgaaagaattatataaaggaggtgtttgtgaattacaagtctctgagaacgacctaacacttgctttgggcagagcctccttggccatccacagactgaacctagctctggcatactttgaaaaggcaattggcgatgttattgctgccaagggtgataggacgtcagatctgatcagcctgtacgaggaagctgctcagatagagcagctgaggaggaaccacaaccaggccatccagtacttgcagcaggtcagtgggttggccagagcccaggctgggttgccttgtttggccccaggcttggttctcagggccagggaagcatgggcttctcagaagaacaagggctggaattgattctgttttaaccctgactttcctccagatccacctaagagcccttgatcaaaccttaaatgaccaggccagagaacactgactcaggtgggcgaatgtgctgtgtcattggctgtgcagacagcacttccccctccccctcttatctctgttggtgctgtaaaaaagaagcaaaatgtgagtctactccaaggaaaaaagatacagggacaaccgaacttaaatcttcagcaaaaacaaaaggcctttttaaatgaaaaatcatggtattttagggtaatgctgtcatttgtactttaaactagtctagctgattatatttccaaacctaaggttaaactaacaaaagggtgtttcacttggaggtaactaacttgacaaatgcccgggggaaaacaaaacaaaacataggaaggaatggtgagtctattatattagggtacttttatgtatcatgtacttgaagctgctaaattcaccttttctctctccgaaggagaatgctgcctgtggcttcaggtatctcccacagtgacaaacatcaaaatactggatatcctgtatcatagaaaaggtgcaatgcaatctaacagtatacatgaaaacagactctgaagaaaaggcattgcaaacaatctgacagtccacaattataaacatcacacagtggagagatgtcagagaatgctgctgtgaaggcagggagtccactgcttacagagaaagccagtctggtttttgtgttcaagactttctcaaagcagtggtcagatcagaatgaataaaacaataaatagcagtgtttcccaaaagcaccaaaagataagagttaaaatgtatggaatgctttttctacgttccctagaggatatatcgattcatttaatctgtacaatagctctatgaagtaggtaccattattattttatctcattttaaggatgagaaaactgacgcacagagttatagctaactcagctgacattgtatagctaagaaatagtaaagcagggatttgaactccacatctgaccctacagcctgtattcataacaactctgctctgtgtcttggctccaaagtcttctctgataacccctcagctctttgaaacacctcacagtatttggcctatgaaatattaagcacaggtggttcttttgtggctggtgggtgtggactcaatgtttttctctttctcttttctaagtgttactccttccattttagcacaaataatataaaatctaacacttttttagtgcttactatatgctgggtggtgttctaaccactttacatatattaaccattaatttatttaatatttacaacaactttttataacaaatactattcttattatccctgatttacatttacaagactgccttcaagactggagttcagtccagtgagactgagctaaggttatgactttatttttgctatgaaatctaataaaaattatactagccaacatttattgagaacttaccacgtgatgagcaccgtgccctgtgctttgcatataccatctcacttaatccttcccaaaccctaatcagtgggaattatatattccttctacgaatgaaggtgaaattacttgcacaagactcatagctaggaagtggcagagctgggactcaaactcacctctcatctaaatccacagtgaacactgtcattgggtgcttaccttgtcatgattttctttattccaggctcattctgtctgtgtttctttgttcactgaagtcagccccaaaactgcagaaatgagtgcgttactggccaaagcttatgccatgtctggagaggcccagcacaggggtaggtaaaagaggtagccttgaagttatttcccagtcacatgagggaagcacattggcaaacagcctatctaagattctaattagctatttattcctgtaatggaaaaattaggtgggtcacagtctcatacaaaatcaattacacattaatttaaacctgataatatacccccacattcgttggaatgtcagtaacaaataaatcatctgatttctacatcctctatttattttgaatctcagtgagattcaccttcttaactaatagatatcacacatactgtgaatgtggcctgtgcagtatcggttgataaggacatccagtgataaatgggtagagctttacctcctccactttcagtctccttgactcttttcctctggctgacaagagagaatgtttgttagcagaattttcttgacccatattcaatagttagatactgggggttgcagagaaagccaactgattaatttatgcttcaacaatagttctttgtctggcaaggtcatctttttgaaagtgggtggctttgggagagacacaaatgaaccaatgagggaggacaatgtatcattctgtgctggcttgatcagattaatggacactgatggattcagtggcctgtcaggaggaatttaggcttcatgaagaatataatttgatcattttaaaactgtctattttctttgcttataaaagtaacctttttgtgtatgttattttccagttagagagagggacagaattatagagaaagctttccatcctacttttttcaatgcttgtattccccatgtcattaaataaacattttttttcagtttgcaaaa

SEQ ID NO: 22534 - DNA, 348 bp, Homo sapiens
  misc_feature 1..348: note = ENST00000508377
  source 1..348: mol_type = unassigned DNA; mol_type = unassigned DNA
aggctgtgcagctttcgcgaggcaccgctttggcgcccggaccgaggaagaagatgcaagccagccccatccgtatcccaactgttagcaatgacatcgactgggatttctgcttccatatgtcacagcaaaccgagatcccagctcaccagcaaacagatgagttgtatcccactggtgggtgtggagagagtgaagaggaaactaaagctaaagagaaggagaaggccatagactgtatgtctcatcccaaagagaaattagcccaatcccagaagaaagtagctcagctgattaaggaaaaaatggtaaaacaaaaaactcactaaaattttgtttccatttaaa

SEQ ID NO: 22535 - DNA, 1225 bp, Homo sapiens
  misc_feature 1..1225: note = ENST00000514080
  source 1..1225: mol_type = unassigned DNA; mol_type = unassigned DNA
agctttcgcgaggcaccgctttggcgcccggaccgaggtgcgccagggtcaggaggccgacgcagcgggaggaagccgcgccgtcgggctcagggagctgggaggctggttccggggcgtggtttctccgccttgagccaggaagaagatgcaagccagccccatccgtatcccaactgttagcaatgacatcgactgggatttctgcttccatatgtcacagcaaaccgagatcccagctcaccagcaaacagatgagttgtatcccactggtgggtgtggagagagtgaagaggaaactaaagctaaagagaaggagaaggccatagactgtatgtctcatcccaaagagaaattagcccaatcccagaagaaagtagctcagctgattaaggaaaaaatgaatactcaagcaaacaaggagctgattcgatgtgtcatcctttctcggattatttttggggaccatcactggaaatgtgcacgagctctggccaacctagcttatggctacttgacactgagaggcctcccagttcaggccaagaaacatgctacatcagccaagaatacactgttgacctggaaggcaaatacgacctcaaataaggagaaagaggaaatcctggaagctctggtcaagctgtactacactctgggcgtggcctggctcctgcagaaccgtggcagagaagcctatttcaacctgcagaaggcagagagaaacatgaaggagctgaaagaattatataaaggaggtgtttgtgaattacaagtctctgagaacgacctaacacttgctttgggcagagcctccttggccatccacagactgaacctagctctggcatactttgaaaaggcaattggcgatgttattgctgccaagggtgataggacgtcagatctgatcagcctgtacgaggaagctgctcagatagagcagctgaggaggaaccacaaccaggccatccagtacttgcagcaggctcattctgtctgtgtttctttgttcactgaagtcagccccaaaactgcagaaatgagtgcgttactggccaaagcttatgccatgtctggagaggcccagcacagggatgctgttgagatatatttcataagaagtatcaatgcatatcgagcaacattgggctcagaggattttgaaacactgagcaccactgaagaattttgcaaatggcttgtccaaaatggagaaaaacag

SEQ ID NO: 22536 - DNA, 977 bp, Homo sapiens
  misc_feature 1..977: note = ENST00000502674
  source 1..977: mol_type = unassigned DNA; mol_type = unassigned DNA
atgcaagccagccccatccgtatcccaactgttagcaatgacatcgactgggatttctgcttccatatgtcacagcaaaccgagatcccagctcaccagcaaacagatgagttgtatcccactggtgggtgtggagagagtgaagaggaaactaaagctaaagagaaggagaaggccatagactgtatgtctcatcccaaagagaaattagcccaatcccagaagaaagtagctcagctgattaaggaaaaaatgaatactcaagcaaacaaggagctgattcgatgtgtcatcctttctcggattatttttggggaccatcactggaaatgtgcacgagctctggccaacctagcttatggctacttgacactgagaggcctcccagttcaggccaagaaacatgctacatcagccaagaatacactgttgacctggaaggcaaatacgacctcaaataaggagaaagaggaaatcctggaagctctggtcaagctgtactacactctgggcgtggcctggctcctgcagaaccgtggcagagaagcctatttcaacctgcagaaggcagagagaaacatgaaggagctgaaagaattatataaaggaggtgtttgtgaattacaagtctctgagaacgacctaacacttgctttgggcagagcctccttggccatccacagactgaacctagctctggcatactttgaaaaggcaattggcgatgttattgctgccaagggtgataggacgtcagatctgatcagcctgtacgaggaagctgctcagatagagcagctgaggaggaaccacaaccaggccatccagtacttgcagcagatgctgttgagatatatttcataagaagtatcaatgcatatcgagcaacattgggctcagaggattttgaaacactgagcaccactgaagaattttgcaaatggcttgtccaaaatggagaaaaacaggacaagtag

SEQ ID NO: 22537 - DNA, 973 bp, Homo sapiens
  misc_feature 1..973: note = ENST00000610313
  source 1..973: mol_type = unassigned DNA; mol_type = unassigned DNA
atgcaagccagccccatccgtatcccaactgttagcaatgacatcgactgggatttctgcttccatatgtcacagcaaaccgagatcccagctcaccagcaaacagatgagttgtatcccactggtgggtgtggagagagtgaagaggaaactaaagctaaagagaaggagaaggccatagactgtatgtctcatcccaaagagaaattagcccaatcccagaagaaagtagctcagctgattaaggaaaaaatgaatactcaagcaaacaaggagctgattcgatgtgtcatcctttctcggattatttttggggaccatcactggaaatgtgcacgagctctggccaacctagcttatggctacttgacactgagaggcctcccagttcaggccaagaaacatgctacatcagccaagaatacactgttgacctggaaggcaaatacgacctcaaataaggagaaagaggaaatcctggaagctctggtcaagctgtactacactctgggcgtggcctggctcctgcagaaccgtggcagagaagcctatttcaacctgcagaaggcagagagaaacatgaaggagctgaaagaattatataaaggaggtgtttgtgaattacaagtctctgagaacgacctaacacttgctttgggcagagcctccttggccatccacagactgaacctagctctggcatactttgaaaaggcaattggcgatgttattgctgccaagggtgataggacgtcagatctgatcagcctgtacgaggaagctgctcagatagagcagctgaggaggaaccacaaccaggccatccagtacttgcagcagatgctgttgagatatatttcataagaagtatcaatgcatatcgagcaacattgggctcagaggattttgaaacactgagcaccactgaagaattttgcaaatggcttgtccaaaatggagaaaaacaggtaaa

SEQ ID NO: 22538 - DNA, 1185 bp, Homo sapiens
  misc_feature 1..1185: note = ENST00000638320
  source 1..1185: mol_type = unassigned DNA; mol_type = unassigned DNA
attgtctccttggccggacctgggctgcggaaggtaactggggacgtcgcaggctgtgcagctttcgcgaggcaccgctttggcgcccggaccgaggaagaagatgcaagccagccccatccgtatcccaactgttagcaatgacatcgactgggatttctgcttccatatgtcacagcaaaccgagatcccagctcaccagcaaacagatgagttgtatcccactggtgggtgtggagagagtgaagaggaaactaaagctaaagagaaggagaaggccatagactgtatgtctcatcccaaagagaaattagcccaatcccagaagaaagtagctcagctgattaaggaaaaaatgaatactcaagcaaacaaggagctgattcgatgtgtcatcctttctcggattatttttggggaccatcactggaaatgtgcacgagctctggccaacctagcttatggctacttgacactgagaggcctcccagttcaggccaagaaacatgctacatcagccaagaatacactgttgacctggaaggcaaatacgacctcaaataaggagaaagaggaaatcctggaagctctggtcaagctgtactacactctgggcgtggcctggctcctgcagaaccgtggcagagaagcctatttcaacctgcagaaggcagagagaaacatgaaggagctgaaagaattatataaaggaggtgtttgtgaattacaagtctctgagaacgacctaacacttgctttgggcagagcctccttggccatccacagactgaacctagctctggcatactttgaaaaggcaattggcgatgttattgctgccaagggtgataggacgtcagatctgatcagcctgtacgaggaagctgctcagatagagcagctgaggaggaaccacaaccaggccatccagtacttgcagcaggctcattctgtctgtgtttctttgttcactgaagtcagccccaaaactgcagaaatgagtgcgttactggccaaagcttatgccatgtctggagaggcccagcacagggatgctgttgagatatatttcataagaagtatcaatgcatatcgagcaacattgggctcagaggattttgaaacactgagcaccactgaagaattttgcaaatggcttgtccaaaatggagaaaaacaggtaaa

SEQ ID NO: 22539 - DNA, 11795 bp, Homo sapiens
  misc_feature 1..11795: note = ENST00000397906
  source 1..11795: mol_type = unassigned DNA; mol_type = unassigned DNA
gggggcgcgcgcgcggtttgggggcagtgaggggcgccgcggcggcgcgcagcacggcgggaacatggcgcgcggaaccggcgcgcgcgcctagctggcgggaccgttagctcgaggcggacgcggcccgggccccgtggggatggagcagtcgccgccgccggcgcccgagccgacccaagggccgacccccgcaaggagccgaaggcggcgggagccagagtcgccgccggcgtcggcgccgattcctctctttggtgctgacactattggccagagaagtcctgatggaccggtactgagcaaagctgaatttgttgagaaagttcgtcagagtaatcaggcctgtcatgatggagatttccacacagctattgttctgtataatgaagccctggctgttgaccctcagaactgcatcttatacagcaatagatctgcagcctacatgaaaatccagcagtatgacaaggcactggatgatgcaatcaaagctcgacttctcaatcccaagtggccaaaggcatacttccgacagggtgttgccctccagtaccttggacgtcatgccgatgccctggcagcctttgcatctggactggctcaagaccccaagagtctccagcttctggtggggatggtggaagccgccatgaaatctcccatgagagactccctcgagcccacttatcagcagcttcagaaaatgaaactggacaagagtccctttgtggtcgtgtctgtggttgggcaggaactcctgacagctggccatcatggggcctctgtggttgtcttagaagccgcactgaagattggcacctgcagcctcaaactgagaggttctgttttctctgccctgagcagtgcttactggtctcttggaaatacagagaagagcaccggatatatgcagcaggacttggatgtagccaagaccttaggtgaccagacaggagaatgccgagctcatgggaatctgggctctgcattcttctccaaaggaaattaccgggaggctctcactaaccacaggcatcagttggtactcgccatgaaactcaaagatcgagaggcagcttcatcagccttgagcagtctgggccacgtgtacacagccattggagactaccccaatgcactggccagtcacaaacagtgtgttcttcttgccaagcaatccaaagatgaactttctgaagcccgagaacttggcaacatgggagctgtgtatattgccatgggtgactttgagaatgctgtgcagtgccatgagcagcatctgaagatagccaaggacctggggaacaagcgagaagaggcccgggcttatagcaacctgggcagtgcctatcactaccggaggaactttgacaaggccatgtcttaccataactatgtcctggagctggcacaggagttgatggagaaggctattgagatgcgggcctatgctggactaggccatgctgccaggtgcatgcaggatttggagagagctaaacaataccatgagcagcagctgggcattgctgaggatctcaaggaccgggctgcagaggggcgagcatcctccaatctaggaatcatacaccagatgaaaggtgattatgacactgcactgaaactccacaagacccacctgtgcattgcccaggagctgagtgattatgctgcccagggccgtgcctatgggaatatgggcaatgcctacaatgccctgggcatgtacgaccaggcggtcaaataccatcggcaggagctgcagatctccatggaagtgaatgaccgcgcctcacaggcctccacacatgggaaccttgccgtggcctaccaggccctgggtgcccatgaccgggccctgcaacactatcagaaccacttgaacatcgcccgggagctacgagacatccagagcgaggcccgggccctcagcaacctgggcaatttccactgctctcggggagagtatgtccaggctgccccctattatgaacagtacctccggcttgctcccgaccttcaagacatggaaggagaagggaaggtctgccacaatcttggctatgcccattactgccttggaaactatcaggaggcagtgaagtactacgaacaggatctggcactggctaaagaccttcacgacaagttgagccaagcaaaagcctactgcaacttgggcctagcattcaaggctctgctgaatttcagtaaagctgaagagtgtcagaagtacctactgtccctagcccagtctctgaataattcccaggctaaatttcgagccctaggaaacctgggcgatatattcatctgtaaaaaagatataaatggtgcaataaaattctatgagcagcaactgggcttagctcaccaggtaaaggacagaagattagaagccagtgcatatgcagccctgggcactgcataccgaatgatccagaagtatgacaaggccctgggttatcacacacaggaactggaggtatatcaggagctgagtgacttgccaggggagtgcagagctcatgggcacctggctgctgtctacatggcccttgggaaatacacaatggcattcaagtgttatgaagagcaactggatctagggcaaaagctgaaggatccgagtctggaagcccaggtctatggcaacatgggcatcacaaagatgaacatgaatgtgatggaagaagccattggctactttgagcagcaattggccatgctgcagcagctaagtggaaatgagtctgtgctcgacaggggccgggcctatggcaacctgggggattgctacgaagccctgggtgactatgaggaagctatcaaatactatgaacaatatttatctgtcgcgcagagtctgaatcgcatgcaagaccaagccaaggcttaccggggcctgggaaatggacacagggcaatggggagcttgcagcaagcccttgtgtgctttgaaaagaggctcgtggttgctcatgaacttggagaggccttcaataaagcccaggcctatggagagctgggaagtctgcacagccaattagggaattacgaacaagccatttcctgccttgaacgccagctgaacattgctagagatatgaaagaccgagccctggagagtgacgcagcctgtggcctggggggcgtttaccagcagatgggggagtatgacacagccctgcagtaccaccagcttgatctacagatagcagaggaaaccaacaaccccacgtgccagggccgagcctatgggaacctgggcctgacttatgaatccctgggcaccttcgagagggctgtggtctatcaagaacagcacttgagcattgctgcacagatgaatgacttggcggccaagacggtgtcatatagtagccttggaaggacccatcatgccttgcagaactattcccaagcagtcatgtacttacaggaaggtttaaggttagctgagcaactgggccgaagagaagatgaggcaaaaattcgccatggccttggcctctccctttgggctagtggaaacttggaggaggcccaacaccagctttatagggcatcagccttgtttgaaacaatccgacatgaggcacagctgagcacggactacaaactctccctctttgacctgcagacatcatcctaccaggccttgcagcgggtgctcgtcagcctaggccatcatgatgaagccctggctgtggcagaaaggggacggacaagggcatttgctgatcttctggtggaacgacaaacaggacaacaagactccgacccctactccccagtcactattgatcagatcttagagatggtaaatggccagaggggactagtgctttactattccctggctgcaggctatctgtatagctggctgctggctcctggggcaggaattgtgaagtttcatgaacactacctgggtgagaacacagtggaaaactcaagtgacttccaggccagcagcagtgtaacccttccaacagcaaccggctcagccctggagcagcacattgccagtgtccgggaggccctgggggtggagtctcactactcaagggcctgtgccagcagtgagacagagagtgaagcgggagacatcatggaccagcaatttgaagagatgaacaacaaactcaactcggtcactgaccccactggctttctgcggatggttcgccgcaataacctgtttaacaggagctgccagagcatgacgagcctgttcagtaacactgtgtcaccgacccaggacgggacctcctctcttcccaggaggcagagctcgtttgccaagcccccgctccgtgccctgtatgacctgctcatcgcgcccatggaagggggcctgatgcactccagcggccccgtgggccggcaccggcagctcatcctggttctggagggggagctctacctcattcctttcgccctcctgaagggaagctcctccaatgagtacctctacgagcgcttcggcctccttgctgtcccttccatccgctccctcagcgtgcagtccaagtctcacttacggaagaacccgcccacatactccagctccacatccatggcggctgtcatcggcaaccccaagctaccatcggccgtgatggacaggtggctgtgggggcccatgccatcggccgaggaagaggcctacatggtgtccgagctgctgggctgccagcccctagtgggcagtgtggccaccaaggagagggtcatgagtgccctgacccaggctgaatgcgtccactttgccacccacatctcctggaagctgtcggccttggtcctcacgcccagcatggacggcaaccctgccagcagcaagagctccttcggccacccctacacgatccctgagtccttgcgggtgcaggacgatgccagtgatggggagagcatctcggactgcccgcccctgcaggagctgctgcttactgccgccgacgtcctggacctgcagctgcctgtgaagctggtggtgcttggctcctcccaggagtccaacagcaaagtcacagccgacggggtcatcgcgctgacaagggccttcctggctgccggcgctcagtgtgtcctcgtgtctctgtggcctgtgccagtggctgcttctaagatgttcatccatgccttctactcatccctgctgaacggcctgaaagccagcgccgccctgggggaggccatgaaggtggtgcagagcagcaaggccttctcgcacccctccaactgggcagggttcatgctcatcgggagtgacgttaagctgaacagcccctcatcactcatcggccaggccctcacagagatcctgcagcacccggagcgtgcgcgggacgccctgcgagtgctgctgcacctggtggagaaatccctgcagcgcatccagaatgggcagcgcaatgccatgtacacatcccagcagagtgtggagaacaaagtgggcggcatccctggctggcaggccctcctcaccgctgtgggcttccggctggaccccccaaccagtggcctgccagcggctgtcttcttcccaacctccgacccgggcgaccggctccagcagtgcagcagcacactccagtccctgctgggtctgcccaatcctgccctccaagccctttgcaaactcatcactgcctccgagacgggcgagcagctcatcagccgggctgttaaaaatatggttggaatgctccaccaggtgctggttcagctccaggctggcgagaaggagcaggacttggcatcagctcccattcaggtctccatcagcgtccagctgtggcggctcccgggatgccacgagttcctggcagctctaggttttgatctctgtgaagttggtcaggaggaagtaatcctgaaaaccgggaagcaagctaatcgacggactgtgcacttcgcgctccagtccctgctgtctctgtttgattctactgagctacccaagcgcctcagccttgacagctcctcctccctcgagtctcttgcttctgctcagtctgtttccaacgccctgcccttgggttaccagcaaccccccttctctcccaccggtgcggacagcatcgcctcagatgccatctctgtgtacagtctgagctccattgcctcctcaatgagctttgtctccaaacccgagggtggatcagagggtggaggccccggaggacggcaggaccatgaccggtccaagaacgcttacctgcagagatccaccctgcctaggagccagctgcctccccagacccgccctgcaggcaacaaagatgaagaagaatatgaagggttttctatcatcagtaacgagcccttggcgacctaccaagaaaaccgaaacacatgcttctcaccagaccacaaacaaccccaacctgggacagccggaggcatgagagtctcggtgagctccaaagggagcatcagcactccaaattctccagtgaaaatgactctgattcccagccccaactcacccttccaaaaggtgggaaaactagcaagctcagatacaggagaatcagaccagtctagcacagaaacggacagtaccgtgaaatcccaagaagaaagcaacccaaaactggatccacaagagttagcccagaaaattctggaggagacacagagtcatctcattgcggtggagcgtcttcagaggagcggcggccaggtgagcaagagtaataaccctgaagacggcgttcaggcgcccagcagcactgctgtcttcagagcgtcagaaaccagtgcgttcagcaggcctgttctctcccatcagaagagtcagccatcaccagtcactgttaaaccaaagcccccagccaggagctcctccctgcccaaggtgagttccggatatagcagccccaccacctcagagatgtccatcaaagacagcccgagccagcacagtggccggccatcgcccggctgcgactcacagacttcccagctggaccagcctctctttaaactgaagtaccccagctctccttacagcgctcacatttccaaatcaccaaggaacatgtccccaagctccggccaccagtctcctgctggcagtgcaccctccccagctctctcctactcctcagctggatctgctcgctcaagtccagcagacgctcccgacatagacaaactgaaaatggcagccattgatgaaaaggtgcaggctgtccataacctgaagatgttctggcagagcacaccccagcattccacagggccaatgaagatcttccggggggctcctggcacgatgacttccaaaagggatgtcctcagtctgttgaatttgtcaccacggcacaataagaaggaggagggagtggataagcttgaactgaaggagctgtccctgcagcagcatgacggagctccaccgaaagcccctcccaacggacactggcgcaccgagaccacctcgctgggctcactgccgctgcccgccggccctcccgccacagcccccgcgcgccctttgaggcttccttctggaaatggctacaagttcctgtctccaggaagatttttcccttcttccaaatgctaaagcatcttttatacccactgactctgagcagcctgcagatgggggcctggcgtttgcttcagcccttccctgagtgcagtccccccacagccaccagcaccctcatgatgctgtgctctgcaggcgaggggcaccaccacgtccaaaggctgccacacacactggtggcttttctgggccacattcaccaaaagccaggacttctgtggggctggtacaggaggctcatggaatttcctacacacttcaccaaatgtttgtttacctttgaactccctgcttctcatctttgatatgattcttcaccaggattttgtacaaaaatgatcatggttctggggtggggagaggaaagggagcacatattttgctaagaggtatatatgcagtaccttttatacacagaaatacaaatagagctttttctaaggctttcggttgctggttgggggtgggatatatgaaatttcagttgaattctacaggaaagtgttatattagccaaaaacagaaaaatggtttttaaaatgccaatgatttgtaattaaattgtagcaattttggtctcatgatagtgtaatatctcagcaacaatgcaataattcacattgaaacagcgcttccattctgaactctgctctgcaaatgtcttttgggtcccgctgtcaaccaaacttgaattttcttaaaaaaaaaattatgtaactcttatccaggcattttagaactatgcaattgtgatttaaaatgcaactttgtgcttttaaaacattattgaccttttttgtatatggataaacaacttggttttattatcaatagtactttgcatttatagctattatttttaaaagctcaaaaagttttttaaaatgtcaaattttgaatagtcatcaataagtaattatcaagtttggaaggaaaggttgaaatgactccgtttccttataagcaaaaaaaaaaaaaaaaaaaaaaaaaaaaaaaaaaaaatttccatggctaactagatttaaccagaatcccgccttccaggctcctgttcccttttattagctgctgaattttattcccttttcccaactccaggtccctcagttgtcttatatctaaatcctttgccaggtccccacaatcccagcacctgcctctgtgagctgcccccaggccctcaccttggccctggccagcctcctgtgctcctgctgtctgaaggactggcccctcccccactgctgaagccacacgtacagatcctaagcaacagggccttttgctgggacgtatgcctggattatggccaaccgggaagagagagatgtatcttaaaaagtggaggtggacttctcctacagctctgacggtaacttaaattgttgccagcttgaggcaagacaagggaatcatctagttaggggtaaccattaatttattttataaagaaaggaaatgctgaaagtcgtattagtactgagtttagttggagaatttagataagtaagtatcttttaggtaattctaaaattaaaatcctacccacctcactacagggttcctcatgaaggtgggcggccacctggcctgggccaccagcagcacatggagcagacctgaggggcctggcagggggcactgacctcaggatccccaggtgggggttttaaccatgggtgggatctcagcttctgcgcatacactgacaatctcacctgttcctcagtgtactcctctgaaaagaagaaaggataatatttatccaatctgtgttctcctgagctccatcctaggggtttttaatttaaccaacagccatgttgacaaaagccaacaataagcatgtcttattctagccctgatcccaacactgaaagcgaagtactttataaagaagccagcaattatgagggtttctttatgttagtaggggaaaaaatggtaataaaagtaccagtgtagcaagtgaagaccaaatttatagcactgtgcattagatagcaaaatcaggttcttaacaatgaaaagtaaacctcaagtttctaaatccatatgcagatggttaggctgtccctctcttagcaaatctctcagcctccttctttcccaagtgccaaggatccctggagtaaagctctggggtctgtgctctctttctgtgaggggaaggctgcggccctatttgcccctctctagcaaacacccccaccaccctgccgcttcctgtggttattgagccagctaggagttactcatggactctaacctggttttagtcccatgtacatcgttgttttaggtttcatactgaagagccaatggtttatgtggttttattctgtcttaaatataagtttcaaggaagggaaaacaaaagtgataaaatgatagaacagtctagaggccactgtaaagtcaccgccactttacgtgtatgtcagtcttggtgttcttgtatgagtaaaatggatgtaaaatcataaaatcacagtgaatgtttcaggctacactggaaaaagtatgcacttagaattaaaggaaattgtataattcaccaagatttctttgtgtagatcaggggttggcaactatgacccacaggctaagactggtcagcggtctggtttttcacagccatgagctaagttacctttttaaagggttatataagtaattacatcatatttttgattttgcctttggcccacaccacataaaatattcaatacctggcctttttttttttttttgagacagagtctcgctctgtcacccaggatagagtgcactggtgcgattttggctcactgcaacctcttcctcctgggttcaagcaattctccctgcctcagcctctaagtagctgggactacaggcacccactaccatgccttgctaatttttgtatttttaatagagatggggtttcaccatgttggccaggctggtctcgaactcctgacctcaggggatccgcccgccttggcctcccaaactgctgggattacaggtgagccactgcgcccagccaatacctggccttttaagaagtttgctgactcctggtatggatgacagaaaatggaataacgttttgtttctccagtctaggaaaagcaagtcaggtagtggatagactgactggcgtccggggagcccagggtatgtgagggccacgtggatggaagcaaatgcctcctgcatagcccttggctctttgtcccacttgggaggagtccatggatgtaatatttacaaaacaattttttccttaccatttgcagaaagcattgcatatatttccttttagctcaggaaactggcatgccccaccctctgctactccatcagatgtaaatacaatgactataagccgtacaactcccctctcttagaaacctcagcaggaccacagagcaagggagtcaaagctttcttaattctctccagtaaatgactcaactaatttgatttttttaattaagtcaaaatatcaagagaaaaattgctactaaaacttacattttgatccacactgatgtgcaacacaaaatgaaagttttcacctccattccattttttaaaaattcacggtccacactgaaacttgctgggttttagcaggagacaaaggtgtcacccacgctgtcctcatcctgctctctctgtcccagtgacgctccagcatatgatcactgcagccggtccctggcccgtgccgattctgccacctcccagccacacacatttgcagacccacaagaagaactgtagccttgataatttcagttcaggctggaaaaatgccatgcaataatctggtttgctttcagtaagtaggcaacaagtgaaaactgtataattttcatcacctattctgctgttctatctaaaatgagtgtacctgtggtttgtgaactgggcccttgtttgtgccagatccttcaaagatgttccctgtcaggacacctgtggccctgcccctcctcagacaccttcccactggcattcacgttccttatatgcagtgttagccatctttggcctacgtggactttttttgtaaattacaccatttccagacattaaactttttatattatgaaatttaccatgtaaaaagaacttcatatttttattgagattgctaaggcacttggccttcctcctttgtgattttcagtgtctattaaagcatgagttccctcagttttaa

SEQ ID NO: 22540 - DNA, 905 bp, Homo sapiens
  misc_feature 1..905: note = ENST00000431039
  source 1..905: mol_type = unassigned DNA; mol_type = unassigned DNA
gacgttaagctgaacagcccctcatcactcatcggccaggccctcacagagatcctgcagcacccggagcgtgcgcgggacgccctgcgagtgctgctgcacctggtggagaaatccctgcagcgcatccagaatgggcagcgcaatgccatgtacacatcccagcagagtgtggagaacaaagtgggcggcatccctggctggcaggccctcctcaccgctgtgggcttccggctggaccccccaaccagtggcctgccagcggctgtcttcttcccaacctccgacccgggcgaccggctccagcagtgcagcagcacactccagtccctgctgggtctgcccaatcctgccctccaagccctttgcaaactcatcactgcctccgagacgggcgagcagctcatcagccggctccaccaggtgctggttcagctccaggctggcgagaaggagcaggacttggcatcagctcccattcaggtctccatcagcgtccagctgtggcggctcccgggatgccacgagttcctggcagctctaggttttgatctctgtgaagttggtcaggaggaagtaatcctgaaaaccgggaagcaagctaatcgacggactgtgcacttcgcgctccagtccctgctgtctctgtttgattctactgagctacccaagcgcctcagccttgacagctcctcctccctcgagtctcttgcttctgctcagtctgtttccaacgccctgcccttgggttaccagcaaccccccttctctcccaccggtgcggacagcatcgcctcagatgccatctctgtgtacagtctgagctccattgcctcctcaatgagctttgtctccaaacccgagggtggatcagagggtggaggccccggaggacggcaggacca

SEQ ID NO: 22541 - DNA, 407 bp, Homo sapiens
  misc_feature 1..407: note = ENST00000480563
  source 1..407: mol_type = unassigned DNA; mol_type = unassigned DNA
gggtcgagtcttgaggtgggctggaggggaaggagacacagggtgctcacgctgtccccccttcctcagctccaccaggtgctggttcagctccaggctggcgagaaggagcaggacttggcatcagctcccattcaggtctccatcagcgtccagctgtggcggctcccgggatgccacgagttcctggcagctctaggttttgatctctgtgaagttggtcaggaggaagtaatcctgaaaaccgggaagcaagctaatcgacggactgtgcacttcgcgctccagtccctgctgtctctgtttgattctactgagctacccaagcgcctcagccttgacagctcctcctccctcgagtctcttgcttctgctcagtctgtttccaacgccctgcccttgggtta

SEQ ID NO: 22542 - DNA, 574 bp, Homo sapiens
  misc_feature 1..574: note = ENST00000469670
  source 1..574: mol_type = unassigned DNA; mol_type = unassigned DNA
ccatccagtgagtcagatgccccaggccagcctgtgagctgctcccctgccaggccctgctctttctgctgggttaacctcgaggcgtaagtgagccctggaagccggggtggggctgggggtctccagctgccctgctgaggtgccctcctttgctttctgcagggttcatgctcatcgggagtgacgttaagctgaacagcccctcatcactcatcggccaggccctcacagagatcctgcagcacccggagcgtgcgcgggacgccctgcgagtgctgctgcacctggtggagaaatccctgcagcgcatccagaatgggcagcgcaatgccatgtacacatcccagcagagtgtggagaacaaagtgggcggcatccctggctggcaggccctcctcaccgctgtgggcttccggctggaccccccaaccagtggcctgccagcggctgtcttcttcccaacctccgacccgggcgaccggctccagcagtgcagcagcacactccagtccctgctgggtctgcccaatcctgccctccaagccctttgcaaactcatcactgcctccga

SEQ ID NO: 22543 - DNA, 499 bp, Homo sapiens
  misc_feature 1..499: note = ENST00000442232
  source 1..499: mol_type = unassigned DNA; mol_type = unassigned DNA
gagcagcacattgccagtgtccgggaggccctgggggtggagtctcactactcaagggcctgtgccagcagtgagacagagagtgaagcgggagacatcatggaccagcaatttgaagagatgaacaacaaactcaactcggtcactgaccccactggctttctgcggatggttcgccgcaataacctgtttaacagggatgcaaccaggtttgcggaggcctgggattgggcctggacacatgttcttgctctgccaacttctcagccagtgaaggcaggtgacacttacctccaccaggtgatgcaggctgtggtgataaactagagtgtgaagagctcagagtgcagcctctggccttgccactcacaagctgtaggacactagggaggcagtttcacctctgtcagcctcagtctcgtcatctgtgaaatggggatggcttcttaccctgcagggttcctgtaatgtgggaataaaggagccaatgtataaataa

SEQ ID NO: 22544 - DNA, 724 bp, Homo sapiens
  misc_feature 1..724: note = ENST00000490475
  source 1..724: mol_type = unassigned DNA; mol_type = unassigned DNA
gcgaaaagactggactctcctggggcttttcccttcgcagtgaatatgggaaagaattagggggtgggagggaggcagcatgacttgcagtcgtcgctgccctgcatctgcccccagcccccagccaacatcttgatgttccacgtatcggctttacaaatatgatgaaatggcagccccggaagaaggcatacttccgacagggtgttgccctccagtaccttggacgtcatgccgatgccctggcagcctttgcatctggactggctcaagaccccaagagtctccagcttctggtggggatggtggaagccgccatgaaatctcccatgagagactccctcgagcccacttatcagcagcttcagaaaatgaaactggacaagagtccctttgtggtcgtgtctgtggttgggcaggaactcctgacagctggccatcatggggcctctgtggttgtcttagaagccgcactgaagattggcacctgcagcctcaaactgagaggttctgttttctctgccctgagcagtgcttactggtctcttggaaatacagagaagagcaccggatatatgcagcaggacttggatgtagccaagaccttaggtgaccagacaggagaatgccgagctcatgggaatctgggctctgcattcttctccaaaggaaattaccgggaggctctcactaaccacaggcatcagttggtactcgccatgaa

SEQ ID NO: 22545 - DNA, 594 bp, Homo sapiens
  misc_feature 1..594: note = ENST00000468807
  source 1..594: mol_type = unassigned DNA; mol_type = unassigned DNA
acggcgggaacatggcgcgcggaaccggcgcgcgcgcctagctggcgggaccgttagctcgaggcggacgcggcccgggccccgtggggatggagcagtcgccgccgccggcgcccgagccgacccaagggccgacccccgcaaggagccgaaggcggcgggagccagagtcgccgccggcgtcggcgccgattcctctctttggtgctgacactattggccagagaagtcctgatggaccggtactgagcaaagctgaatttgttgagaaagttcgtcagagtaatcaggcctgtcatgatggagatttccacacagctattgttctgtataatgaagccctggctgttgaccctcagaactgcatcttatacagcaatagatctgcagcctacatgaaaatccagcagtatgacaaggcactggatgatgcaatcaaagctcgacttctcaatcccaagtggccaaaggtagaaatttttacctatgaagatttattttcatagaatcttttgtcctggcttcttactttaatgtaatattttgttgatttagtgtacttactaatattttaataatctgtacttcagcaaa

SEQ ID NO: 22546 - DNA, 11274 bp, Homo sapiens
  misc_feature 1..11274: note = ENST00000612946
  source 1..11274: mol_type = unassigned DNA; mol_type = unassigned DNA
aggcatacttccgacagggtgttgccctccagtaccttggacgtcatgccgatgccctggcagcctttgcatctggactggctcaagaccccaagagtctccagcttctggtggggatggtggaagccgccatgaaatctcccatgagagactccctcgagcccacttatcagcagcttcagaaaatgaaactggacaagagtccctttgtggtcgtgtctgtggttgggcaggaactcctgacagctggccatcatggggcctctgtggttgtcttagaagccgcactgaagattggcacctgcagcctcaaactgagaggttctgttttctctgccctgagcagtgcttactggtctcttggaaatacagagaagagcaccggatatatgcagcaggacttggatgtagccaagaccttaggtgaccagacaggagaatgccgagctcatgggaatctgggctctgcattcttctccaaaggaaattaccgggaggctctcactaaccacaggcatcagttggtactcgccatgaaactcaaagatcgagaggcagcttcatcagccttgagcagtctgggccacgtgtacacagccattggagactaccccaatgcactggccagtcacaaacagtgtgttcttcttgccaagcaatccaaagatgaactttctgaagcccgagaacttggcaacatgggagctgtgtatattgccatgggtgactttgagaatgctgtgcagtgccatgagcagcatctgaagatagccaaggacctggggaacaagcgagaagaggcccgggcttatagcaacctgggcagtgcctatcactaccggaggaactttgacaaggccatgtcttaccataactatgtcctggagctggcacaggagttgatggagaaggctattgagatgcgggcctatgctggactaggccatgctgccaggtgcatgcaggatttggagagagctaaacaataccatgagcagcagctgggcattgctgaggatctcaaggaccgggctgcagaggggcgagcatcctccaatctaggaatcatacaccagatgaaaggtgattatgacactgcactgaaactccacaagacccacctgtgcattgcccaggagctgagtgattatgctgcccagggccgtgcctatgggaatatgggcaatgcctacaatgccctgggcatgtacgaccaggcggtcaaataccatcggcaggagctgcagatctccatggaagtgaatgaccgcgcctcacaggcctccacacatgggaaccttgccgtggcctaccaggccctgggtgcccatgaccgggccctgcaacactatcagaaccacttgaacatcgcccgggagctacgagacatccagagcgaggcccgggccctcagcaacctgggcaatttccactgctctcggggagagtatgtccaggctgccccctattatgaacagtacctccggcttgctcccgaccttcaagacatggaaggagaagggaaggtctgccacaatcttggctatgcccattactgccttggaaactatcaggaggcagtgaagtactacgaacaggatctggcactggctaaagaccttcacgacaagttgagccaagcaaaagcctactgcaacttgggcctagcattcaaggctctgctgaatttcagtaaagctgaagagtgtcagaagtacctactgtccctagcccagtctctgaataattcccaggctaaatttcgagccctaggaaacctgggcgatatattcatctgtaaaaaagatataaatggtgcaataaaattctatgagcagcaactgggcttagctcaccaggtaaaggacagaagattagaagccagtgcatatgcagccctgggcactgcataccgaatgatccagaagtatgacaaggccctgggttatcacacacaggaactggaggtatatcaggagctgagtgacttgccaggggagtgcagagctcatgggcacctggctgctgtctacatggcccttgggaaatacacaatggcattcaagtgttatgaagagcaactggatctagggcaaaagctgaaggatccgagtctggaagcccaggtctatggcaacatgggcatcacaaagatgaacatgaatgtgatggaagaagccattggctactttgagcagcaattggccatgctgcagcagctaagtggaaatgagtctgtgctcgacaggggccgggcctatggcaacctgggggattgctacgaagccctgggtgactatgaggaagctatcaaatactatgaacaatatttatctgtcgcgcagagtctgaatcgcatgcaagaccaagccaaggcttaccggggcctgggaaatggacacagggcaatggggagcttgcagcaagcccttgtgtgctttgaaaagaggctcgtggttgctcatgaacttggagaggccttcaataaagcccaggcctatggagagctgggaagtctgcacagccaattagggaattacgaacaagccatttcctgccttgaacgccagctgaacattgctagagatatgaaagaccgagccctggagagtgacgcagcctgtggcctggggggcgtttaccagcagatgggggagtatgacacagccctgcagtaccaccagcttgatctacagatagcagaggaaaccaacaaccccacgtgccagggccgagcctatgggaacctgggcctgacttatgaatccctgggcaccttcgagagggctgtggtctatcaagaacagcacttgagcattgctgcacagatgaatgacttggcggccaagacggtgtcatatagtagccttggaaggacccatcatgccttgcagaactattcccaagcagtcatgtacttacaggaaggtttaaggttagctgagcaactgggccgaagagaagatgaggcaaaaattcgccatggccttggcctctccctttgggctagtggaaacttggaggaggcccaacaccagctttatagggcatcagccttgtttgaaacaatccgacatgaggcacagctgagcacggactacaaactctccctctttgacctgcagacatcatcctaccaggccttgcagcgggtgctcgtcagcctaggccatcatgatgaagccctggctgtggcagaaaggggacggacaagggcatttgctgatcttctggtggaacgacaaacaggacaacaagactccgacccctactccccagtcactattgatcagatcttagagatggtaaatggccagaggggactagtgctttactattccctggctgcaggctatctgtatagctggctgctggctcctggggcaggaattgtgaagtttcatgaacactacctgggtgagaacacagtggaaaactcaagtgacttccaggccagcagcagtgtaacccttccaacagcaaccggctcagccctggagcagcacattgccagtgtccgggaggccctgggggtggagtctcactactcaagggcctgtgccagcagtgagacagagagtgaagcgggagacatcatggaccagcaatttgaagagatgaacaacaaactcaactcggtcactgaccccactggctttctgcggatggttcgccgcaataacctgtttaacaggagctgccagagcatgacgagcctgttcagtaacactgtgtcaccgacccaggacgggacctcctctcttcccaggaggcagagctcgtttgccaagcccccgctccgtgccctgtatgacctgctcatcgcgcccatggaagggggcctgatgcactccagcggccccgtgggccggcaccggcagctcatcctggttctggagggggagctctacctcattcctttcgccctcctgaagggaagctcctccaatgagtacctctacgagcgcttcggcctccttgctgtcccttccatccgctccctcagcgtgcagtccaagtctcacttacggaagaacccgcccacatactccagctccacatccatggcggctgtcatcggcaaccccaagctaccatcggccgtgatggacaggtggctgtgggggcccatgccatcggccgaggaagaggcctacatggtgtccgagctgctgggctgccagcccctagtgggcagtgtggccaccaaggagagggtcatgagtgccctgacccaggctgaatgcgtccactttgccacccacatctcctggaagctgtcggccttggtcctcacgcccagcatggacggcaaccctgccagcagcaagagctccttcggccacccctacacgatccctgagtccttgcgggtgcaggacgatgccagtgatggggagagcatctcggactgcccgcccctgcaggagctgctgcttactgccgccgacgtcctggacctgcagctgcctgtgaagctggtggtgcttggctcctcccaggagtccaacagcaaagtcacagccgacggggtcatcgcgctgacaagggccttcctggctgccggcgctcagtgtgtcctcgtgtctctgtggcctgtgccagtggctgcttctaagatgttcatccatgccttctactcatccctgctgaacggcctgaaagccagcgccgccctgggggaggccatgaaggtggtgcagagcagcaaggccttctcgcacccctccaactgggcagggttcatgctcatcgggagtgacgttaagctgaacagcccctcatcactcatcggccaggccctcacagagatcctgcagcacccggagcgtgcgcgggacgccctgcgagtgctgctgcacctggtggagaaatccctgcagcgcatccagaatgggcagcgcaatgccatgtacacatcccagcagagtgtggagaacaaagtgggcggcatccctggctggcaggccctcctcaccgctgtgggcttccggctggaccccccaaccagtggcctgccagcggctgtcttcttcccaacctccgacccgggcgaccggctccagcagtgcagcagcacactccagtccctgctgggtctgcccaatcctgccctccaagccctttgcaaactcatcactgcctccgagacgggcgagcagctcatcagccgggctgttaaaaatatggttggaatgctccaccaggtgctggttcagctccaggctggcgagaaggagcaggacttggcatcagctcccattcaggtctccatcagcgtccagctgtggcggctcccgggatgccacgagttcctggcagctctaggttttgatctctgtgaagttggtcaggaggaagtaatcctgaaaaccgggaagcaagctaatcgacggactgtgcacttcgcgctccagtccctgctgtctctgtttgattctactgagctacccaagcgcctcagccttgacagctcctcctccctcgagtctcttgcttctgctcagtctgtttccaacgccctgcccttgggttaccagcaaccccccttctctcccaccggtgcggacagcatcgcctcagatgccatctctgtgtacagtctgagctccattgcctcctcaatgagctttgtctccaaacccgagggtggatcagagggtggaggccccggaggacggcaggaccatgaccggtccaagaacgcttacctgcagagatccaccctgcctaggagccagctgcctccccagacccgccctgcaggcaacaaagatgaagaagaatatgaagggttttctatcatcagtaacgagcccttggcgacctaccaagaaaaccgaaacacatgcttctcaccagaccacaaacaaccccaacctgggacagccggaggcatgagagtctcggtgagctccaaagggagcatcagcactccaaattctccagtgaaaatgactctgattcccagccccaactcacccttccaaaaggtgggaaaactagcaagctcagatacaggagaatcagaccagtctagcacagaaacggacagtaccgtgaaatcccaagaagaaagcaacccaaaactggatccacaagagttagcccagaaaattctggaggagacacagagtcatctcattgcggtggagcgtcttcagaggagcggcggccaggtgagcaagagtaataaccctgaagacggcgttcaggcgcccagcagcactgctgtcttcagagcgtcagaaaccagtgcgttcagcaggcctgttctctcccatcagaagagtcagccatcaccagtcactgttaaaccaaagcccccagccaggagctcctccctgcccaaggtgagttccggatatagcagccccaccacctcagagatgtccatcaaagacagcccgagccagcacagtggccggccatcgcccggctgcgactcacagacttcccagctggaccagcctctctttaaactgaagtaccccagctctccttacagcgctcacatttccaaatcaccaaggaacatgtccccaagctccggccaccagtctcctgctggcagtgcaccctccccagctctctcctactcctcagctggatctgctcgctcaagtccagcagacgctcccgacatagacaaactgaaaatggcagccattgatgaaaaggtgcaggctgtccataacctgaagatgttctggcagagcacaccccagcattccacagggccaatgaagatcttccggggggctcctggcacgatgacttccaaaagggatgtcctcagtctgttgaatttgtcaccacggcacaataagaaggaggagggagtggataagcttgaactgaaggagctgtccctgcagcagcatgacggagctccaccgaaagcccctcccaacggacactggcgcaccgagaccacctcgctgggctcactgccgctgcccgccggccctcccgccacagcccccgcgcgccctttgaggcttccttctggaaatggctacaagttcctgtctccaggaagatttttcccttcttccaaatgctaaagcatcttttatacccactgactctgagcagcctgcagatgggggcctggcgtttgcttcagcccttccctgagtgcagtccccccacagccaccagcaccctcatgatgctgtgctctgcaggcgaggggcaccaccacgtccaaaggctgccacacacactggtggcttttctgggccacattcaccaaaagccaggacttctgtggggctggtacaggaggctcatggaatttcctacacacttcaccaaatgtttgtttacctttgaactccctgcttctcatctttgatatgattcttcaccaggattttgtacaaaaatgatcatggttctggggtggggagaggaaagggagcacatattttgctaagaggtatatatgcagtaccttttatacacagaaatacaaatagagctttttctaaggctttcggttgctggttgggggtgggatatatgaaatttcagttgaattctacaggaaagtgttatattagccaaaaacagaaaaatggtttttaaaatgccaatgatttgtaattaaattgtagcaattttggtctcatgatagtgtaatatctcagcaacaatgcaataattcacattgaaacagcgcttccattctgaactctgctctgcaaatgtcttttgggtcccgctgtcaaccaaacttgaattttcttaaaaaaaaaattatgtaactcttatccaggcattttagaactatgcaattgtgatttaaaatgcaactttgtgcttttaaaacattattgaccttttttgtatatggataaacaacttggttttattatcaatagtactttgcatttatagctattatttttaaaagctcaaaaagttttttaaaatgtcaaattttgaatagtcatcaataagtaattatcaagtttggaaggaaaggttgaaatgactccgtttccttataagcaaaaaaaaaaaaaaaaaaaaaaaaaaaaaaaaaaaaatttccatggctaactagatttaaccagaatcccgccttccaggctcctgttcccttttattagctgctgaattttattcccttttcccaactccaggtccctcagttgtcttatatctaaatcctttgccaggtccccacaatcccagcacctgcctctgtgagctgcccccaggccctcaccttggccctggccagcctcctgtgctcctgctgtctgaaggactggcccctcccccactgctgaagccacacgtacagatcctaagcaacagggccttttgctgggacgtatgcctggattatggccaaccgggaagagagagatgtatcttaaaaagtggaggtggacttctcctacagctctgacggtaacttaaattgttgccagcttgaggcaagacaagggaatcatctagttaggggtaaccattaatttattttataaagaaaggaaatgctgaaagtcgtattagtactgagtttagttggagaatttagataagtaagtatcttttaggtaattctaaaattaaaatcctacccacctcactacagggttcctcatgaaggtgggcggccacctggcctgggccaccagcagcacatggagcagacctgaggggcctggcagggggcactgacctcaggatccccaggtgggggttttaaccatgggtgggatctcagcttctgcgcatacactgacaatctcacctgttcctcagtgtactcctctgaaaagaagaaaggataatatttatccaatctgtgttctcctgagctccatcctaggggtttttaatttaaccaacagccatgttgacaaaagccaacaataagcatgtcttattctagccctgatcccaacactgaaagcgaagtactttataaagaagccagcaattatgagggtttctttatgttagtaggggaaaaaatggtaataaaagtaccagtgtagcaagtgaagaccaaatttatagcactgtgcattagatagcaaaatcaggttcttaacaatgaaaagtaaacctcaagtttctaaatccatatgcagatggttaggctgtccctctcttagcaaatctctcagcctccttctttcccaagtgccaaggatccctggagtaaagctctggggtctgtgctctctttctgtgaggggaaggctgcggccctatttgcccctctctagcaaacacccccaccaccctgccgcttcctgtggttattgagccagctaggagttactcatggactctaacctggttttagtcccatgtacatcgttgttttaggtttcatactgaagagccaatggtttatgtggttttattctgtcttaaatataagtttcaaggaagggaaaacaaaagtgataaaatgatagaacagtctagaggccactgtaaagtcaccgccactttacgtgtatgtcagtcttggtgttcttgtatgagtaaaatggatgtaaaatcataaaatcacagtgaatgtttcaggctacactggaaaaagtatgcacttagaattaaaggaaattgtataattcaccaagatttctttgtgtagatcaggggttggcaactatgacccacaggctaagactggtcagcggtctggtttttcacagccatgagctaagttacctttttaaagggttatataagtaattacatcatatttttgattttgcctttggcccacaccacataaaatattcaatacctggcctttttttttttttttgagacagagtctcgctctgtcacccaggatagagtgcactggtgcgattttggctcactgcaacctcttcctcctgggttcaagcaattctccctgcctcagcctctaagtagctgggactacaggcacccactaccatgccttgctaatttttgtatttttaatagagatggggtttcaccatgttggccaggctggtctcgaactcctgacctcaggggatccgcccgccttggcctcccaaactgctgggattacaggtgagccactgcgcccagccaatacctggccttttaagaagtttgctgactcctggtatggatgacagaaaatggaataacgttttgtttctccagtctaggaaaagcaagtcaggtagtggatagactgactggcgtccggggagcccagggtatgtgagggccacgtggatggaagcaaatgcctcctgcatagcccttggctctttgtcccacttgggaggagtccatggatgtaatatttacaaaacaattttttccttaccatttgcagaaagcattgcatatatttccttttagctcaggaaactggcatgccccaccctctgctactccatcagatgtaaatacaatgactataagccgtacaactcccctctcttagaaacctcagcaggaccacagagcaagggagtcaaagctttcttaattctctccagtaaatgactcaactaatttgatttttttaattaagtcaaaatatcaagagaaaaattgctactaaaacttacattttgatccacactgatgtgcaacacaaaatgaaagttttcacctccattccattttttaaaaattcacggtccacactgaaacttgctgggttttagcaggagacaaaggtgtcacccacgctgtcctcatcctgctctctctgtcccagtgacgctccagcatatgatcactgcagccggtccctggcccgtgccgattctgccacctcccagccacacacatttgcagacccacaagaagaactgtagccttgataatttcagttcaggctggaaaaatgccatgcaataatctggtttgctttcagtaagtaggcaacaagtgaaaactgtataattttcatcacctattctgctgttctatctaaaatgagtgtacctgtggtttgtgaactgggcccttgtttgtgccagatccttcaaagatgttccctgtcaggacacctgtggccctgcccctcctcagacaccttcccactggcattcacgttccttatatgcagtgttagccatctttggcctacgtggactttttttgtaaattacaccatttccagacattaaactttttatattatgaaatttaccatgtaaaaagaacttcatatttttattgagattgctaaggcacttggccttcctcctttgtgattttcagtgtctattaaagcatgagttccctcagttttaa

SEQ ID NO: 22547 - DNA, 735 bp, Homo sapiens
  misc_feature 1..735: note = ENST00000402414
  source 1..735: mol_type = unassigned DNA
tgtcaaggtagattccagggtgtggaagtggctttgtggtgccacctctaaccgctcggaggtcaacccccattctacaccgaaaactaggccttggctgctatggaaggacagcggcaagaaagccacgcaaccctaacactcgcccaggctcatttcaacaatggagagtacgcggaggccgaggcactgtactccgcttacattcgccggtgcgcttgcgcggcctccagcgacgagagtcccgggaggatattttgatgatgctttggaagatttcaagaaggtcttagacttaaatcctggatttcaagatgctactttgagcttaaaacagactattctagacaaagaagaaaaacaaagaagaaatgttgcaaaaaattattgatatttttaacttaatggaagtattgattcatgatccttacatctgcatctagttatcagtaatttagatattgagctattttgatttatatttaagaaattaatacattagcactgaaagttaaatagtgtgtttaaggtagttaatttcaggttgaatgggttttttttaatgaagtgtaaataataccaatgtataagtgtatattattatattaaatattatagtaaaaaggaatgtgtggtattttcttcagcaaaactatttttgtgatttttttattctcaactttttatttaaaaaatgttacatctgcagaaaagttgaaagtataataaactctt

SEQ ID NO: 22548 - DNA, 822 bp, Homo sapiens
  misc_feature 1..822: note = ENST00000333610
  source 1..822: mol_type = unassigned DNA
ataaggcacaaacctagcgccaaggttggctgtcaaggtagattccagggtgtggaagtggctttgtggtgccacctctaaccgctcggaggtcaacccccattctacaccgaaaactaggccttggctgctatggaaggacagcggcaagaaagccacgcaaccctaacactcgcccaggctcatttcaacaatggagagtacgcggaggccgaggcactgtactccgcttacattcgccggtgcgcttgcgcggcctccagcgacgagagtcccgggagcaaatgcagccctgaggatttggctactgcatataacaacagggggcaaatcaagtacttcagggttgatttttatgaagccatggatgactacacatctgccatagaagtccaacccaattttgaagttccatattacaacagagggttgatactgtataggctgggatattttgatgatgctttggaagatttcaagaaggtcttagacttaaatcctggatttcaagatgctactttgagcttaaaacagactattctagacaaagaagaaaaacaaagaagaaatgttgcaaaaaattattgatatttttaacttaatggaagtattgattcatgatccttacatctgcatctagttatcagtaatttagatattgagctattttgatttatatttaagaaattaatacattagcactgaaagttaaatagtgtgtttaaggtagttaatttcaggttgaatgggttttttttaatgaagtgtaaataataccaatgtataagtgtatattattatattaaatattatagtaaaaag

SEQ ID NO: 22549 - DNA, 710 bp, Homo sapiens
  misc_feature 1..710: note = ENST00000495698
  source 1..710: mol_type = unassigned DNA; mol_type = unassigned DNA
tttaagatcacttaaaaatttgagaatgaaattgattcacattgtgacatatccatagcaaactcgggctttgggctggctttccctctttgcttagtatttatctgttctgtcttctttgccctgctggtgtgtgcttagaaaaatgaacaatcattttaatgttatattcagcagaacaaattggcagtgaacacactgtaaagttagtatgcttttcaggttgacattgcagtggtataaccctacaaaagtagataacagggttaaacaaaaattgattttagctctttatttgtacgttttttcttcagcttggattttcagtgttgatgctgcatgttataggctgtgaagtttgacaatacccaaaagagaatgaaagtggaaatgagaggaatttggtaacacggtgtttttaatgtgaactttttgtttaaagcaaatgcagccctgaggatttggctactgcatataacaacagggggcaaatcaagtacttcagggttgatttttatgaagccatggatgactacacatctgccatagaagtccaacccaattttgaagttccatattacaacagagggttgatactgtataggctgggatattttgatgatgctttggaagatttcaagaaggtcttagacttaaatcctggatttcaagatgctactttgagcttaaaacagactattctagacaaa

SEQ ID NO: 22550 - DNA, 779 bp, Homo sapiens
  misc_feature 1..779: note = ENST00000431392
  source 1..779: mol_type = unassigned DNA; mol_type = unassigned DNA
ctcctatctttgcctctggagctcacggtcggcgcttgtcataacccagcactaggactgagcgggcggacgttcgtctttctagaaaggcctaggcgaggcctaggacgagggcggcggagaacgcggggagaagcccacccgtgaggagccagctgccgcgacggtgcggagagatttccgggaaccaagccctctgcgcgatcctcgggcgcgggccgccgcctctcaccccgccgtctctccttccacgttcctcattcgcacccagagacttaggacagataggaattttccactcgtgattttagctggcgggaaatccgcgacctgggaagggaaggggtcacggctgcgtagggccacagtaccgcgactcccatctcagtgtcacggcgcaggctcttggtggtgtttttcacttgtgaaaaacgtttaaatatgtggaagagagcataacgaacgtctaggtgtttatcacttggcttaagcattatcagtttacctattgtattcatccatggatgtttcagaaggaaccaccatgtcatcatcacatagttacttaatatcaagtcgtcagtgttggaaccattctgatcgactaataagcaaatgcagccctgaggatttggctactgcatataacaacagggggcaaatcaagtacttcagggttgatttttatgaagccatggatgactacacatctgccatagaagtccaacccaattttgaagttccatattacaacagagggttgatactgtataggctgg

SEQ ID NO: 22551 - DNA, 549 bp, Homo sapiens
  misc_feature 1..549: note = ENST00000414814
  source 1..549: mol_type = unassigned DNA; mol_type = unassigned DNA
aaaagggattcctccagatggccagaggggtttcttctgatggggtggacaagggcacatggctatgttctagctttgcagtgaatgttaaaggtgctcacagtgaaactgggtgactaataggatatagcagctggtcactcaacaaccctcacaggacagcattgcctgggtttcccggtcctctggcgaggatcctccaaggcgtctcacatgaaccggctcagaaacgccaaaatctacgtggagagagctgtcaagcagaagaagatctttacaatccaaggctgctacccggtgatccggtgtctcttgcgccggaggggctgggtggagaagaagatggtccatcgctcaggccccaccctgctgccaccccagaaggatctggatagctcagcgatgggtgacagtgacaccactgaggatgaggatgaagatgaggacgaggagttccagccatcacagctgttcgacttcgatgatttactgaaatttgatgacctagatggaacacatgctctgatgtcccgcatggtccagaatgag

SEQ ID NO: 22552 - DNA, 603 bp, Homo sapiens
  misc_feature 1..603: note = ENST00000452597
  source 1..603: mol_type = unassigned DNA; mol_type = unassigned DNA
aattaggtgttccctcctccagggcacatggctatgttctagctttgcagtgaatgttaaaggtgctcacagtgaaactgggtgactaataggatatagcagctggtcactcaacaaccctcacaggacagcattgcctgggtttcccggtcctctggcgaggatcctccaaggcgtctcacatgaaccggctcagaaacgccaaaatctacgtggagagagctgtcaagcagaagaagatctttacaatccaaggctgctacccggtgatccggtgtctcttgcgccggaggggctgggtggagaagaagatggtccatcgctcaggccccaccctgctgccaccccagaaggatctggatagctcagcgatgggtgacagtgacaccactgaggatgaggatgaagatgaggacgaggagttccagccatcacagctgttcgacttcgatgatttactgaaatttgatgacctagatggaacacatgctctgatgtcccgcatggtccagaatgagatcccctacttcatctggaccactcggcgggatgtgctcgactgtcgcttcctctccaaggatcagatgataaaccactacgccc

SEQ ID NO: 22553 - DNA, 591 bp, Homo sapiens
  misc_feature 1..591: note = ENST00000419081
  source 1..591: mol_type = unassigned DNA; mol_type = unassigned DNA
aacactaactaactggggctcagtgctctcttccgccttcagtgccctgctcatcaagggtctgggtgaggccccaggtcataaggaagccctcgctcgactgccccggggcccatcgcagcccccaaccagccccgagcggtctgatggtgcccagggaatggtttccaaggcaatagcaaacggggcggggcttggaacggaggacaaggctcgagcctaggtttcccggtcctctggcgaggatcctccaaggcgtctcacatgaaccggctcagaaacgccaaaatctacgtggagagagctgtcaagcagaagaagatctttacaatccaaggctgctacccggtgatccggtgtctcttgcgccggaggggctgggtggagaagaagatggtccatcgctcaggccccaccctgctgccaccccagaaggatctggatagctcagcgatgggtgacagtgacaccactgaggatgaggatgaagatgaggacgaggagttccagccatcacagctgttcgacttcgatgatttactgaaatttgatgacctagatggaacacatgctctgatggtgggtctatgt

SEQ ID NO: 22554 - DNA, 540 bp, Homo sapiens
  misc_feature 1..540: note = ENST00000438596
  source 1..540: mol_type = unassigned DNA; mol_type = unassigned DNA
agtgctctcttccgccttcagtgccctgctcatcaagggtctgggtttcccggtcctctggcgaggatcctccaaggcgtctcacatgaaccggctcagaaacgccaaaatctacgtggagagagctgtcaagaagaagatctttacaatccaaggctgctacccggtgatccggtgtctcttgcgccggaggggctgggtggagaagaagatggtccatcgctcaggccccaccctgctgccaccccagaaggatctggatagctcagcgatgggtgacagtgacaccactgaggatgaggatgaagatgaggacgaggagttccagccatcacagctgttcgacttcgatgatttactgaaatttgatgacctagatggaacacatgctctgatgtcccgcatggtccagaatgagatcccctacttcatctggaccactcggcgggatgtgctcgactgtcgcttcctctccaaggatcagatgataaaccactacgcccgggctggctcctttaccacaaaggtgggtctatgtct

SEQ ID NO: 22555 - DNA, 555 bp, Homo sapiens
  misc_feature 1..555: note = ENST00000459758
  source 1..555: mol_type = unassigned DNA; mol_type = unassigned DNA
agtgctctcttccgccttcagtgccctgctcatcaagggtctgggtttcccggtcctctggcgaggatcctccaaggcgtctcacatgaaccggctcagaaacgccaaaatctacgtggagagagctgtcaagcagaagaagatctttacaatccaaggctgctacccggtgatccggtgtctcttgcgccggaggggctgggtggagaagaagatggtccatcgctcaggccccaccctgctgccaccccagaaggatctggatagctcagcgatgggtgacagtgacaccactgaggatgaggatgaagatgaggacgaggagttccagccatcacagctgttcgacttcgatgatttactgaaatttgatgacctagatggaacacatgctctgatggtgggtctatgtctcaatctccggaatttgccgtggtttgatgaggttgatgccaactccttcttcccacgctgctactgcctgggggctgaggatgacaaaaaagccttcataggtaaggagacccccagccctatgcctgaacctcaggctga

SEQ ID NO: 22556 - DNA, 565 bp, Homo sapiens
  misc_feature 1..565: note = ENST00000417065
  source 1..565: mol_type = unassigned DNA; mol_type = unassigned DNA
agtgctctcttccgccttcagtgccctgctcatcaagggtctgggtttcccggtcctctggcgaggatcctccaaggcgtctcacatgaaccggctcagaaacgccaaaatctacgtggagagagctgtcaagcagaagaagatctttacaatccaaggctgctacccggtgatccggtgtctcttgcgccggaggggctgggtggagaagaagatggtccatcgctcaggccccaccctgctgccaccccagaaggatctggatagctcagcgatgggtgacagtgacaccactgaggatgaggatgaagatgaggacgaggagttccagccatcacagctgttcgacttcgatgatttactgaaatttgatgacctagatggaacacatgctctgatggtgggtctatgtctcaatctccggaatttgccgtggtttgatgaggttgatgccaactccttcttcccacgctgctactgcctgggggctgaggatgacaaaaaagccttcatagaggacttctggctgactgctgcccgcaacgttctcaagctggtggtgaag

SEQ ID NO: 22557 - DNA, 497 bp, Homo sapiens
  misc_feature 1..497: note = ENST00000439814
  source 1..497: mol_type = unassigned DNA; mol_type = unassigned DNA
agtgccctgctcatcaagggtctgggtgaggccccaggtcataaggaagccctcgctcgactgccccggggcccatcgcagcccccaaccagccccgagcggtctgatggtttcccggtcctctggcgaggatcctccaaggcgtctcacatgaaccggctcagaaacgccaaaatctacgtggagagagctgtcaagcagaagaagatctttacaatccaaggctgctacccggtgatccggtgtctcttgcgccggaggggctgggtggagaagaagatggtccatcgctcaggccccaccctgctgccaccccagaaggatctggatagctcagcgatgggtgacagtgacaccactgaggatgaggatgaagatgaggacgaggagttccagccatcacagctgttcgacttcgatgatttactgaaatttgatgacctagatggaacacatgctctgatgtcccgcatggtccagaatgagatcccctactt

SEQ ID NO: 22558 - DNA, 540 bp, Homo sapiens
  misc_feature 1..540: note = ENST00000418745
  source 1..540: mol_type = unassigned DNA; mol_type = unassigned DNA
agtgccctgctcatcaagggtctgggtgaggccccaggtcataaggaagccctcgctcgactgccccggggcccatcgcagcccccaaccagccccgagcggtctgatggtgcccagggaatggtttccaaggtttcccggtcctctggcgaggatcctccaaggcgtctcacatgaaccggctcagaaacgccaaaatctacgtggagagagctgtcaagcagaagaagatctttacaatccaaggctgctacccggtgatccggtgtctcttgcgccggaggggctgggtggagaagaagatggtccatcgctcaggccccaccctgctgccaccccagaaggatctggatagctcagcgatgggtgacagtgacaccactgaggatgaggatgaagatgaggacgaggagttccagccatcacagctgttcgacttcgatgatttactgaaatttgatgacctagatggaacacatgctctgatgtcccgcatggtccagaatgagatcccctacttcatctggaccactcggcggg

SEQ ID NO: 22559 - DNA, 536 bp, Homo sapiens
  misc_feature 1..536: note = ENST00000430718
  source 1..536: mol_type = unassigned DNA; mol_type = unassigned DNA
aatagcaaacggggcggggcttggaacggaggacaaggctcgagcctaggtttcccggtcctctggcgaggatcctccaaggcgtctcacatgaaccggctcagaaacgccaaaatctacgtggagagagctgtcaagcagaagaagatctttacaatccaaggctgctacccggtgatccggtgtctcttgcgccggaggggctgggtggagaagaagatggtccatcgctcaggccccaccctgctgccaccccagaaggatctggatagctcagcgatgggtgacagtgacaccactgaggatgaggatgaagatgaggacgaggagttccagccatcacagctgttcgacttcgatgatttactgaaatttgatgacctagatggaacacatgctctgatgtcccgcatggtccagaatgagatcccctacttcatctggaccactcggcgggatgtgctcgactgtcgcttcctctccaaggatcagatgataaaccactacgcccgggctggctcctttaccacaaaggt

SEQ ID NO: 22560 - DNA, 3233 bp, Homo sapiens
  misc_feature 1..3233: note = ENST00000427220
  source 1..3233: mol_type = unassigned DNA; mol_type = unassigned DNA
cgggagaggaggcggcgacgcggaggggcgcgggatcaggggccctgggagggcgagcgcggcgaggggcgcatgcagggccccgacgcgccactgctcctgagcgcgagggagctggggcccgggcgccggggctcggcctcctggtaccgccaggagggcggcgcggtgtgcaactggctgcggaagccgcagccgctcgagccacgcaccagtttcccctcggcgcgccgctccgagttccgtccacccaggaggctgccatgggccggccctgcctccgcccagtccgaggagggtcacgcaggcggcagatgccaggcgggcagccccgcccctgcgcgccgcctcagcggcgccttcaagacgctggtcccaggcacccacgcccagggcgcctcggatacccaccccctcggccccccgcacaccccggtcctcgacccctctccgcaggatggtgaggcccgtgcggcccgctcgctctggcctacagcggctgcgaggacgacaagacgctggggtggagggactgggggtcgggagaagagcggctgagggtgggcatctggatgaaggcaggaggaagaaaagaggcgtggctatgggcggccagaaaagatcctaggccgagaccctaggcccagcctcagtgtaccccgcccctattccgcatctttctgcaggtttcccggtcctctggcgaggatcctccaaggcgtctcacatgaaccggctcagaaacgccaaaatctacgtggagagagctgtcaagcagaagaagatctttacaatccaaggctgctacccggtgatccggtgtctcttgcgccggaggggctgggtggagaagaagatggtccatcgctcaggccccaccctgctgccaccccagaaggatctggatagctcagcgatgggtgacagtgacaccactgaggatgaggatgaagatgaggacgaggagttccagccatcacagctgttcgacttcgatgatttactgaaatttgatgacctagatggaacacatgctctgatgtcccgcatggtccagaatgagatcccctacttcatctggaccactcggcgggatgtgctcgactgtcgcttcctctccaaggatcagatgataaaccactacgcccgggctggctcctttaccacaaaggtgggtctatgtctcaatctccggaatttgccgtggtttgatgaggttgatgccaactccttcttcccacgctgctactgcctgggggctgaggatgacaaaaaagccttcatagagacggggtttcactgtgttagccaggatggtctcgatctcctgacctcatgatccatccacctcagcctcccaaagtgctgggattacaggcgtcagccaccgtgaccagcctgaaacaggagcaagttctaaactcaggctctagagtcagaaaaggtagagtcaggttctggatccaaaatggggcaagtcatgatcaggttctggaaccagaacaggcctcaagcctaggggctgagcagggtatcccctggcctgggagcagaggacttctggctgactgctgcccgcaacgttctcaagctggtggtgaagtctgagtggaagtcataccctattcaggcagtagaggaagaggcctcaggagacaagcagcccaagaaacaggagaaaaacccagtgttggtgtccccagagtttgtggatgaagctctgtgtgcgtgcgaggagtaccttagcaacttggcccacatggacatcgacaaggacctggaggccccgctgtacctcacccccgagggctggtccctcttcctccagcgctactaccaagtggtccacgaaggggcagaactcaggcacctcgacactcaggtccagcgctgtgaggacatcctgcagcagctgcaggccgtggtaccccagatagacatggaaggggatcgcaacatctggatcgtgaagccaggagccaagtcccgcggacgaggcatcatgtgcatggaccacctggaggagatgctgaagctggtgaacggcaaccccgtggtgatgaaggacggcaactcagtgcacctgtgcaacaactccatccagaagcacctggagaactcatgccatcggcatccactgcttccgccagacaacatgtggtctagccagaggttccaggcccacctgcaggagatgggtgccccaaatgcttggtccaccatcatcgtgcctggcatgaaggatgctgtgatccacgcacttcagacctcccaggacaccgtgcagtgtcggaaggccagctttgagctctatggcgctgacttcgtgttcggggaggacttccagccctggctgattgagatcaacgccagccccacgatggcaccctccacagcagtcactgcccggctctgtgctggcgtgcaagctgacaccctgcgcgtggtcattgaccggatgctggaccgcaactgtgacacaggagcctttgagctcatctataagcagcccgtcaccacttccccagcctccacaccaaggcccagctgccttctccccatgtactccgacaccagggccaggtcctcagacgacagcacagcaagctggtgggcactaaggccctgtcgaccacaggcaaggccttgaggactctacccacggctaaggtcttcatttccctcccaccgaaccttgatttcaaggtggcacccagcatcctgaagccaagaaaggtgggcctcgacctgtgactcacacccagtggacagtgctgagcacggggtcagggctggagggcacaggcagagggcagctcccaggctggctggcaccccaagggaagagctggtctccctcagaagccccttcctccacagacttctgatcatctccctcttctcccctcctttcacaccgaggctcctgctctcctgtgcctccgaggcccccagctggaagtgccttgttgcctctgccctttgaagtcggaacaattcctagcacctgtcggaaggtcaaggccaaaggcaaattcaaggccagactgtgacaaacccagggctgaggcctgccccatgaagaggctgagccccctgaaacccctgccccttgttggtacattccagaggcgcaggggcctgggggatatgaagctagggaagcccctgcttcgattccccactgcccttgtcctggatccaacaccaaataaaaagaaacaagtgaagta

SEQ ID NO: 22561 - DNA, 2767 bp, Homo sapiens
  misc_feature 1..2767: note = ENST00000426895
  source 1..2767: mol_type = unassigned DNA; mol_type = unassigned DNA
cgagcgcggcgaggggcgcatgcagggccccgacgcgccactgctcctgagcgcgagggagctggggcccgggcgccggggctcggcctcctggtaccgccaggagggcggcgcggtgtgcaactggctgcggaagccgcagccgctcgagccacgcaccagtttcccctcggcgcgccgctccgagttccgtccacccaggaggctgccatgggccggccctgcctccgcccagtccgaggagggtcacgcaggcggcagatgccaggcgggcagccccgcccctgcgcgccgcctcagcggcgccttcaagacgctggtcccaggcacccacgcccagggcgcctcggatacccaccccctcggccccccgcacaccccggtcctcgacccctctccgcaggatggtttcccggtcctctggcgaggatcctccaaggcgtctcacatgaaccggctcagaaacgccaaaatctacgtggagagagctgtcaagcagaagaagatctttacaatccaaggctgctacccggtgatccggtgtctcttgcgccggaggggctgggtggagaagaagatggtccatcgctcaggccccaccctgctgccaccccagaaggatctggatagctcagcgatgggtgacagtgacaccactgaggatgaggatgaagatgaggacgaggagttccagccatcacagctgttcgacttcgatgatttactgaaatttgatgacctagatggaacacatgctctgatggtgggtctatgtctcaatctccggaatttgccgtggtttgatgaggttgatgccaactccttcttcccacgctgctactgcctgggggctgaggatgacaaaaaagccttcatagaggacttctggctgactgctgcccgcaacgttctcaagctggtggtgaagtctgagtggaagtcataccctattcaggcagtagaggaagaggcctcaggagacaagcagcccaagaaacaggagaaaaacccagtgttggtgtccccagagtttgtggatgaagctctgtgtgcgtgcgaggagtaccttagcaacttggcccacatggacatcgacaaggacctggaggccccgctgtacctcacccccgagggctggtccctcttcctccagcgctactaccaagtggtccacgaaggggcagaactcaggcacctcgacactcaggtccagcgctgtgaggacatcctgcagcagctgcaggccgtggtaccccagatagacatggaaggggatcgcaacatctggatcgtgaagccaggagccaagtcccgcggacgaggcatcatgtgcatggaccacctggaggagatgctgaagctggtgaacggcaaccccgtggtgatgaaggacggcaagtgggtggtgcagaagtatattgagcggcccctcctcatctttggcaccaagtttgacctcagacagtggttcctggtaactgactggaacccacttaccgtgtggttctaccgcgacagctatatccgcttttccacgcagcccttctccctgaagaacctggacaactcagtgcacctgtgcaacaactccatccagaagcacctggagaactcatgccatcggcatccactgcttccgccagacaacatgtggtctagccagaggttccaggcccacctgcaggagatgggtgccccaaatgcttggtccaccatcatcgtgcctggcatgaaggatgctgtgatccacgcacttcagacctcccaggacaccgtgcagtgtcggaaggccagctttgagctctatggcgctgacttcgtgttcggggaggacttccagccctggctgattgagatcaacgccagccccacgatggcaccctccacagcagtcactgcccggctctgtgctggcgtgcaagctgacaccctgcgcgtggtcattgaccggatgctggaccgcaactgtgacacaggagcctttgagctcatctataagcagcctgctgtggaggtgcctcaatatgtgggcatccggctcctggtagagggcttcaccatcaagaagcccatggcgatgtgtcatcggcggatgggggtccgcccagcagtccctctgctgacccagcgaggctctggggaagcccgtcaccacttccccagcctccacaccaaggcccagctgccttctccccatgtactccgacaccagggccaggtcctcagacgacagcacagcaagctggtgggcactaaggccctgtcgaccacaggcaaggccttgaggactctacccacggctaaggtcttcatttccctcccaccgaaccttgatttcaaggtggcacccagcatcctgaagccaagaaaggctcctgctctcctgtgcctccgaggcccccagctggaagtgccttgttgcctctgccctttgaagtcggaacaattcctagcacctgtcggaaggtcaaggccaaaggcaaattcaaggccagactgtgacaaacccagggctgaggcctgccccatgaagaggctgagccccctgaaacccctgccccttgttggtacattccagaggcgcaggggcctgggggatatgaagctagggaagcccctgcttcgattccccactgcccttgtcctggatccaacaccaaataaaaagaaacaagtgaagtatttggggcttgactccattgctgttggagggtcaagagtggatggggcgaggccgtgtaccccagggtccacagcaagagcctga

SEQ ID NO: 22562 - DNA, 756 bp, Homo sapiens
  misc_feature 1..756: note = ENST00000426827
  source 1..756: mol_type = unassigned DNA; mol_type = unassigned DNA
agatgccaggcgggcagccccgcccctgcgcgccgcctcagcggcgccttcaagacgctggtcccaggcacccacgcccagggcgcctcggatacccaccccctcggccccccgcacaccccggtcctcgacccctctccgcaggatggtttcccggtcctctggcgaggatcctccaaggcgtctcacatgaaccggctcagaaacgccaaaatctacgtggagagagctgtcaagcagaagaagatctttacaatccaaggctgctacccggtgatccggtgtctcttgcgccggaggggctgggtggagaagaagatggtccatcgctcaggccccaccctgctgccaccccagaaggatctggatagctcagcgatgggtgacagtgacaccactgaggatgaggatgaagatgaggacgaggagttccagccatcacagctgttcgacttcgatgatttactgaaatttgatgacctagatggaacacatgctctgatgtcccgcatggtccagaatgagatcccctacttcatctggaccactcggcgggatgtgctcgactgtcgcttcctctccaaggatcagatgataaaccactacgcccgggctggctcctttaccacaaaggtgggtctatgtctcaatctccggaatttgccgtggtttgatgaggttgatgccaactccttcttcccacgctgctactgcctgggggctgaggatgacaaaaaagccttcataggtaaggag

SEQ ID NO: 22563 - DNA, 1041 bp, Homo sapiens
  misc_feature 1..1041: note = ENST00000431204
  source 1..1041: mol_type = unassigned DNA; mol_type = unassigned DNA
agatgccaggcgggcagccccgcccctgcgcgccgcctcagcggcgccttcaagacgctggtcccaggcacccacgcccagggcgcctcggatacccaccccctcggccccccgcacaccccggtcctcgacccctctccgcaggatggtttcccggtcctctggcgaggatcctccaaggcgtctcacatgaaccggctcagaaacgccaaaatctacgtggagagagctgtcaagcagaagaagatctttacaatccaaggctgctacccggtgatccggtgtctcttgcgccggaggggctgggtggagaagaagatggtccatcgctcaggccccaccctgctgccaccccagaaggatctggatagctcagcgatgggtgacagtgacaccactgaggatgaggatgaagatgaggacgaggagttccagccatcacagctgttcgacttcgatgatttactgaaatttgatgacctagatggaacacatgctctgatggcatcatgtgcatggaccacctggaggagatgctgaagctggtgaacggcaaccccgtggtgatgaaggacggcaagtgggtggtgcagaagtatattgagcggcccctcctcatctttggcaccaagtttgacctcagacagtggttcctggtaactgactggaacccacttaccgtgtggttctaccgcgacagctatatccgcttttccacgcagcccttctccctgaagaacctggacaactcagtgcacctgtgcaacaactccatccagaagcacctggagaactcatgccatcggcatccactgcttccgccagacaacatgtggtctagccagaggttccaggcccacctgcaggagatgggtgccccaaatgcttggtccaccatcatcgtgcctggcatgaaggatgctgtgatccacgcacttcagacctcccaggacaccgtgcagtgtcggaaggccagctttgagctctatggcgctgacttcgtgttcggggaggacttccagccctggctgattgagatca

SEQ ID NO: 22564 - DNA, 545 bp, Homo sapiens
  misc_feature 1..545: note = ENST00000422738
  source 1..545: mol_type = unassigned DNA; mol_type = unassigned DNA
attccgcatctttctgcaggtttcccggtcctctggcgaggatcctccaaggcgtctcacatgaaccggctcagaaacgccaaaatctacgtggagagagctgtcaagcagaagaagatctttacaatccaaggctgctacccggtgatccggtgtctcttgcgccggaggggctgggtggagaagaagatggtccatcgctcaggccccaccctgctgccaccccagaaggatctggatagctcagcgatgggtgacagtgacaccactgaggatgaggatgaagatgaggacgaggagttccagccatcacagctgttcgacttcgatgatttactgaaatttgatgacctagatggaacacatgctctgatggttgatgccaactccttcttcccacgctgctactgcctgggggctgaggatgacaaaaaagccttcatagaggacttctggctgactgctgcccgcaacgttctcaagctggtggtgaagtctgagtggaagtcataccctattcaggcagtagaggaagaggcctcagg

SEQ ID NO: 22565 - DNA, 1674 bp, Homo sapiens
  misc_feature 1..1674: note = ENST00000430390
  source 1..1674: mol_type = unassigned DNA; mol_type = unassigned DNA
gctcagaaacgccaaaatctacgtggagagagctgtcaagcagaagaagatctttacaatccaaggctgctacccggtgatccggtgtctcttgcgccggaggggctgggtggagaagaagatggtccatcgctcaggccccaccctgctgccaccccagaaggatctggatagctcagcgatgggtgacagtgacaccactgaggatgaggatgaagatgaggacgaggagttccagccatcacagctgttcgacttcgatgatttactgaaatttgatgacctagatggaacacatgctctgatgcgaaggggcagaactcaggcacctcgacactcaggtccagcgctgtgaggacatcctgcagcagctgcaggccgtggtaccccagatagacatggaaggggatcgcaacatctggatcgtgaagccaggagccaagtcccgcggacgaggcatcatgtgcatggaccacctggaggagatgctgaagctggtgaacggcaaccccgtggtgatgaaggacggcaagtgggtggtgcagaagtatattgagcggcccctcctcatctttggcaccaagtttgacctcagacagtggttcctggtaactgactggaacccacttaccgtgtggttctaccgcgacagctatatccgcttttccacgcagcccttctccctgaagaacctggacaactcagtgcacctgtgcaacaactccatccagaagcacctggagaactcatgccatcggcatccactgcttccgccagacaacatgtggtctagccagaggttccaggcccacctgcaggagatgggtgccccaaatgcttggtccaccatcatcgtgcctggcatgaaggatgctgtgatccacgcacttcagacctcccaggacaccgtgcagtgtcggaaggccagctttgagctctatggcgctgacttcgtgttcggggaggacttccagccctggctgattgagatcaacgccagccccacgatggcaccctccacagcagtcactgcccggctctgtgctggcgtgcaagctgacaccctgcgcgtggtcattgaccggatgctggaccgcaactgtgacacaggagcctttgagctcatctataagcagcccgtcaccacttccccagcctccacaccaaggcccagctgccttctccccatgtactccgacaccagggccaggtcctcagacgacagcacagcaagctggtgggcactaaggccctgtcgaccacaggcaaggccttgaggactctacccacggctaaggtcttcatttccctcccaccgaaccttgatttcaaggtggcacccagcatcctgaagccaagaaaggctcctgctctcctgtgcctccgaggcccccagctggaagtgccttgttgcctctgccctttgaagtcggaacaattcctagcacctgtcggaaggtcaaggccaaaggcaaattcaaggccagactgtgacaaacccagggctgaggcctgccccatgaagaggctgagccccctgaaacccctgccccttgttggtacattccagaggcgcaggggcctgggggatatgaagctagggaagcccctgcttcgattccccactgcccttgtcctggatccaacaccaaataaaaagaaacaagtgaagta

SEQ ID NO: 22566 - DNA, 4176 bp, Homo sapiens
  misc_feature 1..4176: note = ENST00000483051
  source 1..4176: mol_type = unassigned DNA; mol_type = unassigned DNA
aggatgaagatgaggacgaggagttccagccatcacagctgttcgacttcgatgatttactgaaatttgatgacctagatggaacacatgctctgatggtgggtctatgtctcaatctccggaatttgccgtggtttgatgaggttgatgccaactccttcttcccacgctgctactgcctgggggctgaggatgacaaaaaagccttcataggtaaggagacccccagccctatgcctgaacctcaggctgacagagcagggctgaagctctggctcatattggagagaaacaggcctctcttcatgccctcatctgcctgccccagcagatttccctttccaccctcaatccttatccttccctaatgtgccctcccttaataagcctcttagcttggtcaactctgacctccagaaaagcttgggtagcttggcttatattctagagcaggttctaaaagttggtcagtcccttgagtttggaatccagaacagattccaggcttatatcaagttccatttgttgaattgggttccaaaaaaggctgcaggctttggatttctaaggcagactaggttccgattccacaatatgttctaaattcaggttagaatttggatccagattctatgctagatttaaattacattcagaatctgaactaggacacagtctggttctcaggacagaataagtatcaaaagtaggtgatgaacagaagaaacaaatcagacaatgggtccaagccagattctgaaggcagaatatgatccaagtcaggtcagatttggggtctggttacacaactgaaacaggagcaagttcttttttttttttgagacggagtctcgctctgtcacccaggctggggtgcagtggcgcgatcttggctcactgcaagctccgcctcccaggttcccgccattctcctgcctcagcctcccgagtagctgggactacaggcgcccgccatcacgcctggctaattttttgtatttttagtagagacggggtttcactgtgttagccaggatggtctcgatctcctgacctcatgatccatccacctcagcctcccaaagtgctgggattacaggcgtcagccaccgtgaccagcctgaaacaggagcaagttctaaactcaggctctagagtcagaaaaggtagagtcaggttctggatccaaaatggggcaagtcatgatcaggttctggaaccagaacaggcctcaagcctaggggctgagcagggtatcccctggcctgggagcagaggacttctggctgactgctgcccgcaacgttctcaagctggtggtgaagtctgagtggaagtcataccctattcaggcagtagaggaagaggcctcaggagacaagcagcccaagaaacaggagaaaaacccagtgttggtgtccccagagtttgtggatgaagctctgtgtgcgtgcgaggagtaccttagcaacttggcccacatggacatcgacaaggacctggaggccccgctgtacctcacccccgagggctggtccctcttcctccagcgctactaccaagtggtccacgaaggggcagaactcaggcacctcgacactcaggtccagcgctgtgaggacatcctgcagcagctgcaggccgtggtaccccagatagacatggaaggggatcgcaacatctggatcgtgaagccaggagccaagtcccgcggacgaggcatcatgtgcatggaccacctggaggagatgctgaagctggtgaacggcaaccccgtggtgatgaaggacggcaagtgggtggtgcagaagtatattgagcggcccctcctcatctttggcaccaagtttgacctcagacagtggttcctggtaactgactggaacccacttaccgtgtggttctaccgcgacagctatatccgcttttccacgcagcccttctccctgaagaacctggacaactcagtgcacctgtgcaacaactccatccagaagcacctggagaactcatgccatcggcatccactgcttccgccagacaacatgtggtctagccagaggttccaggcccacctgcaggagatgggtgccccaaatgcttggtccaccatcatcgtgcctggcatgaaggatgctgtgatccacgcacttcagacctcccaggacaccgtgcagtgtcggaaggccagctttgagctctatggcgctgacttcgtgttcggggaggacttccagccctggctgattgagatcaacgccagccccacgatggcaccctccacagcagtcactgcccggctctgtgctggcgtgcaagctgacaccctgcgcgtggtcattgaccggatgctggaccgcaactgtgacacaggagcctttgagctcatctataagcagcctgctgtggaggtgcctcaatatgtgggcatccggctcctggtagagggcttcaccatcaagaagcccatggcgatgtgtcatcggcggatgggggtccgcccagcagtccctctgctgacccagcgaggctctggggaagcccgtcaccacttccccagcctccacaccaaggcccagctgccttctccccatgtactccgacaccagggccaggtcctcagacgacagcacagcaagctggtgggcactaaggccctgtcgaccacaggcaaggccttgaggactctacccacggctaaggtcttcatttccctcccaccgaaccttgatttcaaggtggcacccagcatcctgaagccaagaaaggtgggcctcgacctgtgactcacacccagtggacagtgctgagcacggggtcagggctggagggcacaggcagagggcagctcccaggctggctggcaccccaagggaagagctggtctccctcagaagccccttcctccacagacttctgatcatctccctcttctcccctcctttcacaccgaggctcctgctctcctgtgcctccgaggcccccagctggaagtgccttgttgcctctgccctttgaagtcggaacaattcctagcacctgtcggaaggtcaaggccaaaggcaaattcaaggccagactgtgacaaacccagggctgaggcctgccccatgaagaggctgagccccctgaaacccctgccccttgttggtacattccagaggcgcaggggcctgggggatatgaagctagggaagcccctgcttcgattccccactgcccttgtcctggatccaacaccaaataaaaagaaacaagtgaagtatttggggcttgactccattgctgttggagggtcaagagtggatggggcgaggccgtgtaccccagggtccacagcaagagcctgaggccatcagcagctcctccgtgcagcgaggcccagaattcccacctaaggacagacatggggcttcctatttagggactcccccagcatctccgatccaggggtggggagcgtgagccttcactttacagatgaagaaactgagtctgaaagaggaggcatggcttacccaagatcacgtggcagtgagtcgacgcagggacatattgccagaactgccgagcactgggagccccccaaccccagagaacaagccaagctagcagaatgacacctaccgggcataggaacgttaatgccatgagacaggggaaggaattggccttgcctaaacctcagcccttctgcagagggcatgggtctatcccttcttcagcaaggggccaaggtcacctaaaaatgaaacatccaataagccacacccacctgaagaaaagtgtggcactgcttagttgtagtgggttgaactgtggtcccctgaaaagagatgtctacttggaccctgtgaatgtgaccttatgtgggaaaagagtctttgtagctgggtatggtggctcacacctgttatcccagcactttgagaggccaaggcaggagatcgcttgagcccgcaagttcaagaccagtctgggcaacatggtgaaaccgtttctacagaaaattagctgggtgtggtggcacacacctgtagtcctagctactcgggaggcctaggtgggaggattacctgagcctgggaagatcaaaactgtggtgagctgtgatcacgccactgcgctctgagcctgggagacagagtgaaaccctaaatcaaaaaaaaaaaaaaa

SEQ ID NO: 22567 - DNA, 1561 bp, Homo sapiens
  misc_feature 1..1561: note = ENST00000310252
  source 1..1561: mol_type = unassigned DNA; mol_type = unassigned DNA
cttcgatgatttactgaaatttgatgacctagatggaacacatgctctgatgtcccgcatggtccagaatgagatcccctacttcatctggaccactcggcgggatgtgctcgactgtcgcttcctctccaaggatcagatgataaaccactacgcccgggctggctcctttaccacaaaggtgggtctatgtctcaatctccggaatttgccgtggtttgatgaggttgatgccaactccttcttcccacgctgctactgcctgggggctgaggatgacaaaaaagccttcatagaggacttctggctgactgctgcccgcaacgttctcaagctggtggtgaagtctgagtggaagtcataccctattcaggcagtagaggaagaggcctcaggagacaagcagcccaagaaacaggagaaaaacccagtgttggtgtccccagagtttgtggatgaagctctgtgtgcgtgcgaggagtaccttagcaacttggcccacatggacatcgacaaggacctggaggccccgctgtacctcacccccgagggctggtccctcttcctccagcgctactaccaagtggtccacgaaggggcagaactcaggcacctcgacactcaggtccagcgctgtgaggacatcctgcagcagctgcaggccgtggtaccccagatagacatggaaggggatcgcaacatctggatcgtgaagccaggagccaagtcccgcggacgaggcatcatgtgcatggaccacctggaggagatgctgaagctggtgaacggcaaccccgtggtgatgaaggacggcaagtgggtggtgcagaagtatattgagcggcccctcctcatctttggcaccaagtttgacctcagacagtggttcctggtaactgactggaacccacttaccgtgtggttctaccgcgacagctatatccgcttttccacgcagcccttctccctgaagaacctggacaactcagtgcacctgtgcaacaactccatccagaagcacctggagaactcatgccatcggcatccactgcttccgccagacaacatgtggtctagccagaggttccaggcccacctgcaggagatgggtgccccaaatgcttggtccaccatcatcgtgcctggcatgaaggatgctgtgatccacgcacttcagacctcccaggacaccgtgcagtgtcggaaggccagctttgagctctatggcgctgacttcgtgttcggggaggacttccagccctggctgattgagatcaacgccagccccacgatggcaccctccacagcagtcactgcccggctctgtgctggcgtgcaagctgacaccctgcgcgtggtcattgaccggatgctggaccgcaactgtgacacaggagcctttgagctcatctataagcagcccgtcaccacttccccagcctccacaccaaggcccagctgccttctccccatgtactccgacaccagggccaggtcctcagacgacagcacagcaagctggtgggcactaaggccctgtcgaccacaggcaaggccttga

SEQ ID NO: 22568 - DNA, 5282 bp, Homo sapiens
  misc_feature 1..5282: note = ENST00000496526
  source 1..5282: mol_type = unassigned DNA; mol_type = unassigned DNA
tttactgaaatttgatgacctagatggaacacatgctctgatgtcccgcatggtccagaatgagatcccctacttcatctggaccactcggcgggatgtgctcgactgtcgcttcctctccaaggatcagatgataaaccactacgcccgggctggctcctttaccacaaaggtgggtctatgtctcaatctccggaatttgccgtggtttgatgaggttgatgccaactccttcttcccacgctgctactgcctgggggctgaggatgacaaaaaagccttcataggtaaggagacccccagccctatgcctgaacctcaggctgacagagcagggctgaagctctggctcatattggagagaaacaggcctctcttcatgccctcatctgcctgccccagcagatttccctttccaccctcaatccttatccttccctaatgtgccctcccttaataagcctcttagcttggtcaactctgacctccagaaaagcttgggtagcttggcttatattctagagcaggttctaaaagttggtcagtcccttgagtttggaatccagaacagattccaggcttatatcaagttccatttgttgaattgggttccaaaaaaggctgcaggctttggatttctaaggcagactaggttccgattccacaatatgttctaaattcaggttagaatttggatccagattctatgctagatttaaattacattcagaatctgaactaggacacagtctggttctcaggacagaataagtatcaaaagtaggtgatgaacagaagaaacaaatcagacaatgggtccaagccagattctgaaggcagaatatgatccaagtcaggtcagatttggggtctggttacacaactgaaacaggagcaagttcttttttttttttgagacggagtctcgctctgtcacccaggctggggtgcagtggcgcgatcttggctcactgcaagctccgcctcccaggttcccgccattctcctgcctcagcctcccgagtagctgggactacaggcgcccgccatcacgcctggctaattttttgtatttttagtagagacggggtttcactgtgttagccaggatggtctcgatctcctgacctcatgatccatccacctcagcctcccaaagtgctgggattacaggcgtcagccaccgtgaccagcctgaaacaggagcaagttctaaactcaggctctagagtcagaaaaggtagagtcaggttctggatccaaaatggggcaagtcatgatcaggttctggaaccagaacaggcctcaagcctaggggctgagcagggtatcccctggcctgggagcagaggacttctggctgactgctgcccgcaacgttctcaagctggtggtgaagtctgagtggaagtcataccctattcaggcagtagaggaagaggcctcaggtaagtactgtggttacctccactctcccacccatttatcctccacccatccgcccttccacctatctgcccttctacctatctattcatccacgcacctactggttcatccacacatctgtgtatgattcacatctacccatctatccatccatccaccagccatccatccactcatccacccacgtattcacccactctctgatctaccgattcacccacccacccttccactcatccttccatcctcccacctgtcacccattgttaatctcgtcattcatctacctgatgtcagctccatactccccatccatctatccactccctgcctacctatccttccacagatccacctacccatctatctacctgctattccattctcccatctactacctatctgttcttcaggccatccactcatccattcttctgtcccaggtacttagacacttgtcttcccatccgtttgttagttgatccactcctcattcagccctcccatgggcctggcatgtagccgagcaccctggagagggcagactaagaagacatggtccgtccctgcctgtgaggagttcaggtctctgaggaggaggaagcagtgaaactgggctttacacatggcctgagaacagcttaggcctgaacataaggaacagcttggagtggaggggacacagaggaaccctcactatcatgcatgccaacccaaccactgcctgccctttcccttctggatttagctcgtgtctccaggctcctagtcctgtaatccagggacccatcagcgagggattcagggaagcagaggcagctctccaggaaggaggaaaatccctgcctcttccagagagactcccccattgctgtctcttgtgtgtgtcatgcacaaggaaggcttggttgtgtgccaggataaggggcacaagggcctcgggtgtggccagagaccccatgcttaagcttttatggtataggtcaggctgcaggggtttgagggcctcagttgtatatcagaatcttcagagcactgcgatgttcaggggtgagtcaggtctgtagatgtgcacggggtcttctgaagggtcagtttctgtaatcactttcaggtgtgtcagggccttgtgcagtaacagtgcacacagaagttagtgtttctgtgggctaagggttgtagctctgtatcaggattctgggagtgggtctggatttctggtgtgtggacttaagaagctgtgtcagacttgggggaggggcgttcatgtataactgggttcacataggccaagactcccaggtgcattttaggcagagcctcaggtgtgttagaggtcccaggggcagagaggctataggtgctgtcagaggccttggggacatttagggcagagcctcgagtgacaggtcctgggacagtgggagccaagggcaagtgctagagttgcagtgaatttagagcaaagcctcagctaagtgacacatcccagggcagtaggggatctatctaggttcgtgctgggcctcaggtaagtgacaggccttaggacaatgggggctgtggcatgcgtcaggttacctgccttgatatgggatcgtgacaggcccctccctatgtgcaggagacaagcagcccaagaaacaggagaaaaacccagtgttggtgtccccagagtttgtggatgaagctctgtgtgcgtgcgaggagtaccttagcaacttggcccacatggacatcgacaaggacctggaggccccgctgtacctcacccccgagggctggtccctcttcctccagcgctactaccaagtggtccacgaaggggcagaactcaggcacctcgacactcaggtccagcgctgtgaggacatcctgcagcagctgcaggccgtggtaccccagatagacatggaaggggatcgcaacatctggatcgtgaagccaggagccaagtcccgcggacgaggcatcatgtgcatggaccacctggaggagatgctgaagctggtgaacggcaaccccgtggtgatgaaggacggcaagtgggtggtgcagaagtatattgagcggcccctcctcatctttggcaccaagtttgacctcagacagtggttcctggtaactgactggaacccacttaccgtgtggttctaccgcgacagctatatccgcttttccacgcagcccttctccctgaagaacctggacaacttccaagttgtttgaatctggtcatgtgaaaacctatttaagccttggtttccacatctgaagaatggaggtctgaagaaaaatataaaaaacagtgaagtgggtactgttactacccccattttgcagatgtgaagagcacacagacactgggatggttaactgagactatgcacaaagcacttactactgcggcccccgtaactagcgccctcagagcagccctgagagataagagtggttctggccctagaagaatgtggtggggcccaggcctctgtcctttttgtccttcccagtagggccccatctcaagttgaatagtgcagggtggcccagggctgcttccaggacttgcctgtcctccctgagtttggatgggagagacacaagggcctggacctcagttttctgttctctgccccagctcagtgcacctgtgcaacaactccatccagaagcacctggagaactcatgccatcggcatccactgcttccgccagacaacatgtggtctagccagaggttccaggcccacctgcaggagatgggtgccccaaatgcttggtccaccatcatcgtgcctggcatgaaggatgctgtgatccacgcacttcagacctcccaggacaccgtgcagtgtcggaaggccagctttgagctctatggcgctgacttcgtgttcggggaggacttccagccctggctgattgagatcaacgccagccccacgatggcaccctccacagcagtcactgcccggctctgtgctggcgtgcaagctgacaccctgcgcgtggtcattgaccggatgctggaccgcaactgtgacacaggagcctttgagctcatctataagcagcctgctgtggaggtgcctcaatatgtgggcatccggctcctggtagagggcttcaccatcaagaagcccatggcgatgtgtcatcggcggatgggggtccgcccagcagtccctctgctgacccagcgaggctctggggaagccgaggtatcaggaagtttaaggaagttgcccaaggttgcacagctcagaaggggcacagctgggatgcagacccagcccgtcaccacttccccagcctccacaccaaggcccagctgccttctccccatgtactccgacaccagggccaggtcctcagacgacagcacagcaagctggtgggcactaaggccctgtcgaccacaggcaaggccttgaggactctacccacggctaaggtcttcatttccctcccaccgaaccttgatttcaaggtggcacccagcatcctgaagccaagaaaggctcctgctctcctgtgcctccgaggcccccagctggaagtgccttgttgcctctgccctttgaagtcggaacaattcctagcacctgtcggaaggtcaaggccaaaggcaaattcaaggccagactgtgacaaacccagggctgaggcctgccccatgaagaggctgagccccctgaaacccctgccccttgttggtacattccagaggcgcaggggcctgggggatatgaagctagggaagcccctgcttcgattccccactgcccttgtcctggatccaacaccaaataaaaagaaacaagtgaagt

SEQ ID NO: 22569 - DNA, 507 bp, Homo sapiens
  misc_feature 1..507: note = ENST00000496246
  source 1..507: mol_type = unassigned DNA; mol_type = unassigned DNA
ctgaaatttgatgacctagatggaacacatgctctgatgagacggggtttcactgtgttagccaggatggtctcgatctcctgacctcatgatccatccacctcagcctcccaaagtgctgggattacaggcgtcagccaccgtgaccagcctgaaacaggagcaagttctaaactcaggctctagagtcagaaaaggtagagtcaggttctggatccaaaatggggcaagtcatgatcaggttctggaaccagaacaggcctcaagcctaggggctgagcagggtatcccctggcctgggagcagaggacttctggctgactgctgcccgcaacgttctcaagctggtggtgaagtctgagtggaagtcataccctattcaggcagtagaggaagaggcctcaggagacaagcagcccaagaaacaggagaaaaacccagtgttggtgtccccagagtttgtggatgaagctctgtgtgcgtgcgaggagtaccttagcaacttgg

SEQ ID NO: 22570 - DNA, 603 bp, Homo sapiens
  misc_feature 1..603: note = ENST00000474948
  source 1..603: mol_type = unassigned DNA; mol_type = unassigned DNA
gaaatttgatgacctagatggaacacatgctctgatgtcccgcatggtccagaatgagatcccctacttcatctggaccactcggcgggatgtgctcgactgtcgcttcctctccaaggatcagatgataaaccactacgcccgggctggctcctttaccacaaagagacggggtttcactgtgttagccaggatggtctcgatctcctgacctcatgatccatccacctcagcctcccaaagtgctgggattacaggcgtcagccaccgtgaccagcctgaaacaggagcaagttctaaactcaggctctagagtcagaaaaggtagagtcaggttctggatccaaaatggggcaagtcatgatcaggttctggaaccagaacaggcctcaagcctaggggctgagcagggtatcccctggcctgggagcagaggacttctggctgactgctgcccgcaacgttctcaagctggtggtgaagtctgagtggaagtcataccctattcaggcagtagaggaagaggcctcaggagacaagcagcccaagaaacaggagaaaaacccagtgttggtgtccccagagtttgtggatgaagctctg

SEQ ID NO: 22571 - DNA, 579 bp, Homo sapiens
  misc_feature 1..579: note = ENST00000452823
  source 1..579: mol_type = unassigned DNA; mol_type = unassigned DNA
gaaatttgatgacctagatggaacacatgctctgatgtcccgcatggtccagaatgagatcccctacttcatctggaccactcggcgggatgtgctcgactgtcgcttcctctccaaggatcagatgataaaccactacgcccgggctggctcctttaccacaaaggtgggtctatgtctcaatctccggaatttgccgtggtttgatgaggttgatgccaactccttcttcccacgctgctactgcctgggggctgaggatgacaaaaaagccttcataggagacaagcagcccaagaaacaggagaaaaacccagtgttggtgtccccagagtttgtggatgaagctctgtgtgcgtgcgaggagtaccttagcaacttggcccacatggacatcgacaaggacctggaggccccgctgtacctcacccccgagggctggtccctcttcctccagcgctactaccaagtggtccacgaaggggcagaactcaggcacctcgacactcaggtccagcgctgtgaggacatcctgcagcagctgcaggccgtggtaccccagatagacatggaagggga

SEQ ID NO: 22572 - DNA, 2031 bp, Homo sapiens
  misc_feature 1..2031: note = ENST00000443148
  source 1..2031: mol_type = unassigned DNA; mol_type = unassigned DNA
tcccgcatggtccagaatgagatcccctacttcatctggaccactcggcgggatgtgctcgactgtcgcttcctctccaaggatcagatgataaaccactacgcccgggctggctcctttaccacaaaggtgggtctatgtctcaatctccggaatttgccgtggtttgatgaggttgatgccaactccttcttcccacgctgctactgcctgggggctgaggatgacaaaaaagccttcatagaggacttctggctgactgctgcccgcaacgttctcaagctggtggtgaagtctgagtggaagtcataccctattcaggcagtagaggaagaggcctcaggagacaagcagcccaagaaacaggagaaaaacccagtgttggtgtccccagagtttgtggatgaagctctgtgtgcgtgcgaggagtaccttagcaacttggcccacatggacatcgacaaggacctggaggccccgctgtacctcacccccgagggctggtccctcttcctccagcgctactaccaagtggtccacgaaggggcagaactcaggcacctcgacactcaggtccagcgctgtgaggacatcctgcagcagctgcaggccgtggtaccccagatagacatggaaggggatcgcaacatctggatcgtgaagccaggagccaagtcccgcggacgaggcatcatgtgcatggaccacctggaggagatgctgaagctggtgaacggcaaccccgtggtgatgaaggacggcaagtgggtggtgcagaagtatattgagcggcccctcctcatctttggcaccaagtttgacctcagacagtggttcctggtaactgactggaacccacttaccgtgtggttctaccgcgacagctatatccgcttttccacgcagcccttctccctgaagaacctggacaactcagtgcacctgtgcaacaactccatccagaagcacctggagaactcatgccatcggcatccactgcttccgccagacaacatgtggtctagccagaggttccaggcccacctgcaggagatgggtgccccaaatgcttggtccaccatcatcgtgcctggcatgaaggatgctgtgatccacgcacttcagacctcccaggacaccgtgcagtgtcggaaggccagctttgagctctatggcgctgacttcgtgttcggggaggacttccagccctggctgattgagatcaacgccagccccacgatggcaccctccacagcagtcactgcccggctctgtgctggcgtgcaagctgacaccctgcgcgtggtcattgaccggatgctggaccgcaactgtgacacaggagcctttgagctcatctataagcagcctgctgtggaggtgcctcaatatgtgggcatccggctcctggtagagggcttcaccatcaagaagcccatggcgatgtgtcatcggcggatgggggtccgcccagcagtccctctgctgacccagcgaggctctggggaaggcaaggactcggggacccctacccacagccgaggtatcaggaagtttaaggaagttgcccaaggttgcacagctcagaaggggcacagctgggatgcagacccagcccgtcaccacttccccagcctccacaccaaggcccagctgccttctccccatgtactccgacaccagggccaggtcctcagacgacagcacagcaagctggtgggcactaaggccctgtcgaccacaggcaaggccttgaggactctacccacggctaaggtcttcatttccctcccaccgaaccttgatttcaaggtggcacccagcatcctgaagccaagaaaggtgggcctcgacctgtgactcacacccagtggacagtgctgagcacggggtcagggctggagggcacaggcagagggcagctcccaggctggctggcaccccaagggaagagctggtctccctcagaagccccttcctccacagacttctgatcatctccctcttctcccctcctttcacaccgaggct

SEQ ID NO: 22573 - DNA, 4834 bp, Homo sapiens
  misc_feature 1..4834: note = ENST00000383827
  source 1..4834: mol_type = unassigned DNA; mol_type = unassigned DNA
ttcttttttttttttgagacggagtctcgctctgtcacccaggctggggtgcagtggcgcgatcttggctcactgcaagctccgcctcccaggttcccgccattctcctgcctcagcctcccgagtagctgggactacaggcgcccgccatcacgcctggctaattttttgtatttttagtagagacggggtttcactgtgttagccaggatggtctcgatctcctgacctcatgatccatccacctcagcctcccaaagtgctgggattacaggcgtcagccaccgtgaccagcctgaaacaggagcaagttctaaactcaggctctagagtcagaaaaggtagagtcaggttctggatccaaaatggggcaagtcatgatcaggttctggaaccagaacaggcctcaagcctaggggctgagcagggtatcccctggcctgggagcagaggacttctggctgactgctgcccgcaacgttctcaagctggtggtgaagtctgagtggaagtcataccctattcaggcagtagaggaagaggcctcaggtaagtactgtggttacctccactctcccacccatttatcctccacccatccgcccttccacctatctgcccttctacctatctattcatccacgcacctactggttcatccacacatctgtgtatgattcacatctacccatctatccatccatccaccagccatccatccactcatccacccacgtattcacccactctctgatctaccgattcacccacccacccttccactcatccttccatcctcccacctgtcacccattgttaatctcgtcattcatctacctgatgtcagctccatactccccatccatctatccactccctgcctacctatccttccacagatccacctacccatctatctacctgctattccattctcccatctactacctatctgttcttcaggccatccactcatccattcttctgtcccaggtacttagacacttgtcttcccatccgtttgttagttgatccactcctcattcagccctcccatgggcctggcatgtagccgagcaccctggagagggcagactaagaagacatggtccgtccctgcctgtgaggagttcaggtctctgaggaggaggaagcagtgaaactgggctttacacatggcctgagaacagcttaggcctgaacataaggaacagcttggagtggaggggacacagaggaaccctcactatcatgcatgccaacccaaccactgcctgccctttcccttctggatttagctcgtgtctccaggctcctagtcctgtaatccagggacccatcagcgagggattcagggaagcagaggcagctctccaggaaggaggaaaatccctgcctcttccagagagactcccccattgctgtctcttgtgtgtgtcatgcacaaggaaggcttggttgtgtgccaggataaggggcacaagggcctcgggtgtggccagagaccccatgcttaagcttttatggtataggtcaggctgcaggggtttgagggcctcagttgtatatcagaatcttcagagcactgcgatgttcaggggtgagtcaggtctgtagatgtgcacggggtcttctgaagggtcagtttctgtaatcactttcaggtgtgtcagggccttgtgcagtaacagtgcacacagaagttagtgtttctgtgggctaagggttgtagctctgtatcaggattctgggagtgggtctggatttctggtgtgtggacttaagaagctgtgtcagacttgggggaggggcgttcatgtataactgggttcacataggccaagactcccaggtgcattttaggcagagcctcaggtgtgttagaggtcccaggggcagagaggctataggtgctgtcagaggccttggggacatttagggcagagcctcgagtgacaggtcctgggacagtgggagccaagggcaagtgctagagttgcagtgaatttagagcaaagcctcagctaagtgacacatcccagggcagtaggggatctatctaggttcgtgctgggcctcaggtaagtgacaggccttaggacaatgggggctgtggcatgcgtcaggttacctgccttgatatgggatcgtgacaggcccctccctatgtgcaggagacaagcagcccaagaaacaggagaaaaacccagtgttggtgtccccagagtttgtggatgaagctctgtgtgcgtgcgaggagtaccttagcaacttggcccacatggacatcgacaaggacctggaggccccgctgtacctcacccccgagggctggtccctcttcctccagcgctactaccaagtggtccacgaaggggcagaactcaggcacctcgacactcaggtccagcgctgtgaggacatcctgcagcagctgcaggccgtggtaccccagatagacatggaaggggatcgcaacatctggatcgtgaagccaggagccaagtcccgcggacgaggcatcatgtgcatggaccacctggaggagatgctgaagctggtgaacggcaaccccgtggtgatgaaggacggcaagtgggtggtgcagaagtatattgagcggcccctcctcatctttggcaccaagtttgacctcagacagtggttcctggtaactgactggaacccacttaccgtgtggttctaccgcgacagctatatccgcttttccacgcagcccttctccctgaagaacctggacaactcagtgcacctgtgcaacaactccatccagaagcacctggagaactcatgccatcggcatccactgcttccgccagacaacatgtggtctagccagaggttccaggcccacctgcaggagatgggtgccccaaatgcttggtccaccatcatcgtgcctggcatgaaggatgctgtgatccacgcacttcagacctcccaggacaccgtgcagtgtcggaaggccagctttgagctctatggcgctgacttcgtgttcggggaggacttccagccctggctgattgagatcaacgccagccccacgatggcaccctccacagcagtcactgcccggctctgtgctggcgtgcaagctgacaccctgcgcgtggtcattgaccggatgctggaccgcaactgtgacacaggagcctttgagctcatctataagcagcccgtcaccacttccccagcctccacaccaaggcccagctgccttctccccatgtactccgacaccagggccaggtcctcagacgacagcacagcaagctggtgggcactaaggccctgtcgaccacaggcaaggccttgaggactctacccacggctaaggtcttcatttccctcccaccgaaccttgatttcaaggtggcacccagcatcctgaagccaagaaaggtgggcctcgacctgtgactcacacccagtggacagtgctgagcacggggtcagggctggagggcacaggcagagggcagctcccaggctggctggcaccccaagggaagagctggtctccctcagaagccccttcctccacagacttctgatcatctccctcttctcccctcctttcacaccgaggctcctgctctcctgtgcctccgaggcccccagctggaagtgccttgttgcctctgccctttgaagtcggaacaattcctagcacctgtcggaaggtcaaggccaaaggcaaattcaaggccagactgtgacaaacccagggctgaggcctgccccatgaagaggctgagccccctgaaacccctgccccttgttggtacattccagaggcgcaggggcctgggggatatgaagctagggaagcccctgcttcgattccccactgcccttgtcctggatccaacaccaaataaaaagaaacaagtgaagtatttggggcttgactccattgctgttggagggtcaagagtggatggggcgaggccgtgtaccccagggtccacagcaagagcctgaggccatcagcagctcctccgtgcagcgaggcccagaattcccacctaaggacagacatggggcttcctatttagggactcccccagcatctccgatccaggggtggggagcgtgagccttcactttacagatgaagaaactgagtctgaaagaggaggcatggcttacccaagatcacgtggcagtgagtcgacgcagggacatattgccagaactgccgagcactgggagccccccaaccccagagaacaagccaagctagcagaatgacacctaccgggcataggaacgttaatgccatgagacaggggaaggaattggccttgcctaaacctcagcccttctgcagagggcatgggtctatcccttcttcagcaaggggccaaggtcacctaaaaatgaaacatccaataagccacacccacctgaagaaaagtgtggcactgcttagttgtagtgggttgaactgtggtcccctgaaaagagatgtctacttggaccctgtgaatgtgaccttatgtgggaaaagagtctttgtagctgggtatggtggctcacacctgttatcccagcactttgagaggccaaggcaggagatcgcttgagcccgcaagttcaagaccagtctgggcaacatggtgaaaccgtttctacagaaaattagctgggtgtggtggcacacacctgtagtcctagctactcgggaggcctaggtgggaggattacctgagcctgggaagatcaaaactgtggtgagctgtgatcacgccactgcgctctgagcctgggagacagagtgaaaccctaaatcaaaaaaaaaaaaaaa

SEQ ID NO: 22574 - DNA, 3811 bp, Homo sapiens
  misc_feature 1..3811: note = ENST00000473661
  source 1..3811: mol_type = unassigned DNA; mol_type = unassigned DNA
ggtttcactgtgttagccaggatggtctcgatctcctgacctcatgatccatccacctcagcctcccaaagtgctgggattacaggcgtcagccaccgtgaccagcctgaaacaggagcaagttctaaactcaggctctagagtcagaaaaggtagagtcaggttctggatccaaaatggggcaagtcatgatcaggttctggaaccagaacaggcctcaagcctaggggctgagcagggtatcccctggcctgggagcagaggacttctggctgactgctgcccgcaacgttctcaagctggtggtgaagtctgagtggaagtcataccctattcaggcagtagaggaagaggcctcaggtaagtactgtggttacctccactctcccacccatttatcctccacccatccgcccttccacctatctgcccttctacctatctattcatccacgcacctactggttcatccacacatctgtgtatgattcacatctacccatctatccatccatccaccagccatccatccactcatccacccacgtattcacccactctctgatctaccgattcacccacccacccttccactcatccttccatcctcccacctgtcacccattgttaatctcgtcattcatctacctgatgtcagctccatactccccatccatctatccactccctgcctacctatccttccacagatccacctacccatctatctacctgctattccattctcccatctactacctatctgttcttcaggccatccactcatccattcttctgtcccaggtacttagacacttgtcttcccatccgtttgttagttgatccactcctcattcagccctcccatgggcctggcatgtagccgagcaccctggagagggcagactaagaagacatggtccgtccctgcctgtgaggagttcaggtctctgaggaggaggaagcagtgaaactgggctttacacatggcctgagaacagcttaggcctgaacataaggaacagcttggagtggaggggacacagaggaaccctcactatcatgcatgccaacccaaccactgcctgccctttcccttctggatttagctcgtgtctccaggctcctagtcctgtaatccagggacccatcagcgagggattcagggaagcagaggcagctctccaggaaggaggaaaatccctgcctcttccagagagactcccccattgctgtctcttgtgtgtgtcatgcacaaggaaggcttggttgtgtgccaggataaggggcacaagggcctcgggtgtggccagagaccccatgcttaagcttttatggtataggtcaggctgcaggggtttgagggcctcagttgtatatcagaatcttcagagcactgcgatgttcaggggtgagtcaggtctgtagatgtgcacggggtcttctgaagggtcagtttctgtaatcactttcaggtgtgtcagggccttgtgcagtaacagtgcacacagaagttagtgtttctgtgggctaagggttgtagctctgtatcaggattctgggagtgggtctggatttctggtgtgtggacttaagaagctgtgtcagacttgggggaggggcgttcatgtataactgggttcacataggccaagactcccaggtgcattttaggcagagcctcaggtgtgttagaggtcccaggggcagagaggctataggtgctgtcagaggccttggggacatttagggcagagcctcgagtgacaggtcctgggacagtgggagccaagggcaagtgctagagttgcagtgaatttagagcaaagcctcagctaagtgacacatcccagggcagtaggggatctatctaggttcgtgctgggcctcaggtaagtgacaggccttaggacaatgggggctgtggcatgcgtcaggttacctgccttgatatgggatcgtgacaggcccctccctatgtgcaggagacaagcagcccaagaaacaggagaaaaacccagtgttggtgtccccagagtttgtggatgaagctctgtgtgcgtgcgaggagtaccttagcaacttggcccacatggacatcgacaaggacctggaggccccgctgtacctcacccccgagggctggtccctcttcctccagcgctactaccaagtggtccacgaaggggcagaactcaggcacctcgacactcaggtccagcgctgtgaggacatcctgcagcagctgcaggccgtggtaccccagatagacatggaaggggatcgcaacatctggatcgtgaagccaggagccaagtcccgcggacgaggcatcatgtgcatggaccacctggaggagatgctgaagctggtgaacggcaaccccgtggtgatgaaggacggcaacccttctccctgaagaacctggacaactcagtgcacctgtgcaacaactccatccagaagcacctggagaactcatgccatcggcatccactgcttccgccagacaacatgtggtctagccagaggttccaggcccacctgcaggagatgggtgccccaaatgcttggtccaccatcatcgtgcctggcatgaaggatgctgtgatccacgcacttcagacctcccaggacaccgtgcagtgtcggaaggccagctttgagctctatggcgctgacttcgtgttcggggaggacttccagccctggctgattgagatcaacgccagccccacgatggcaccctccacagcagtcactgcccggctctgtgctggcgtgcaagctgacaccctgcgcgtggtcattgaccggatgctggaccgcaactgtgacacaggagcctttgagctcatctataagcagcctgctgtggaggtgcctcaatatgtgggcatccggctcctggtagagggcttcaccatcaagaagcccatggcgatgtgtcatcggcggatgggggtccgcccagcagtccctctgctgacccagcgaggctctggggaagccgaggtatcaggaagtttaaggaagttgcccaaggttgcacagctcagaaggggcacagctgggatgcagacccagcccgtcaccacttccccagcctccacaccaaggcccagctgccttctccccatgtactccgacaccagggccaggtcctcagacgacagcacagcaagctggtgggcactaaggccctgtcgaccacaggcaaggccttgaggactctacccacggctaaggtcttcatttccctcccaccgaaccttgatttcaaggtggcacccagcatcctgaagccaagaaaggtgggcctcgacctgtgactcacacccagtggacagtgctgagcacggggtcagggctggagggcacaggcagagggcagctcccaggctggctggcaccccaagggaagagctggtctccctcagaagccccttcctccacagacttctgatcatctccctcttctcccctcctttcacaccgaggctcctgctctcctgtgcctccgaggcccccagctggaagtgccttgttgcctctgccctttgaagtcggaacaattcctagcacctgtcggaaggtcaaggccaaaggcaaattcaaggccagactgtgacaaacccagggctgaggcctgccccatgaagaggctgagccccctgaaacccctgccccttgttggtacattccagaggcgcaggggcctgggggatatgaagctagggaagcccctgcttcgattccccactgcccttgtcctggatccaacaccaaataaaaagaaacaagtgaagta

SEQ ID NO: 22575 - DNA, 2848 bp, Homo sapiens
  misc_feature 1..2848: note = ENST00000455274
  source 1..2848: mol_type = unassigned DNA; mol_type = unassigned DNA
attctcccatctactacctatctgttcttcaggccatccactcatccattcttctgtcccaggtacttagacacttgtcttcccatccgtttgttagttgatccactcctcattcagccctcccatgggcctggcatgtagccgagcaccctggagagggcagactaagaagacatggtccgtccctgcctgtgaggagttcaggtctctgaggaggaggaagcagtgaaactgggctttacacatggcctgagaacagcttaggcctgaacataaggaacagcttggagtggaggggacacagaggaaccctcactatcatgcatgccaacccaaccactgcctgccctttcccttctggatttagctcgtgtctccaggctcctagtcctgtaatccagggacccatcagcgagggattcagggaagcagaggcagctctccaggaaggaggaaaatccctgcctcttccagagagactcccccattgctgtctcttgtgtgtgtcatgcacaaggaaggcttggttgtgtgccaggataaggggcacaagggcctcgggtgtggccagagaccccatgcttaagcttttatggtataggtcaggctgcaggggtttgagggcctcagttgtatatcagaatcttcagagcactgcgatgttcaggggtgagtcaggtctgtagatgtgcacggggtcttctgaagggtcagtttctgtaatcactttcaggtgtgtcagggccttgtgcagtaacagtgcacacagaagttagtgtttctgtgggctaagggttgtagctctgtatcaggattctgggagtgggtctggatttctggtgtgtggacttaagaagctgtgtcagacttgggggaggggcgttcatgtataactgggttcacataggccaagactcccaggtgcattttaggcagagcctcaggtgtgttagaggtcccaggggcagagaggctataggtgctgtcagaggccttggggacatttagggcagagcctcgagtgacaggtcctgggacagtgggagccaagggcaagtgctagagttgcagtgaatttagagcaaagcctcagctaagtgacacatcccagggcagtaggggatctatctaggttcgtgctgggcctcaggtaagtgacaggccttaggacaatgggggctgtggcatgcgtcaggttacctgccttgatatgggatcgtgacaggcccctccctatgtgcaggagacaagcagcccaagaaacaggagaaaaacccagtgttggtgtccccagagtttgtggatgaagctctgtgtgcgtgcgaggagtaccttagcaacttggcccacatggacatcgacaaggacctggaggccccgctgtacctcacccccgagggctggtccctcttcctccagcgctactaccaagtggtccacgaaggggcagaactcaggcacctcgacactcaggtccagcgctgtgaggacatcctgcagcagctgcaggccgtggtaccccagatagacatggaaggggatcgcaacatctggatcgtgaagccaggagccaagtcccgcggacgaggcatcatgtgcatggaccacctggaggagatgctgaagctggtgaacggcaaccccgtggtgatgaaggacggcaagtgggtggtgcagaagtatattgagcggcccctcctcatctttggcaccaagtttgacctcagacagtggttcctggtaactgactggaacccacttaccgtgtggttctaccgcgacagctatatccgcttttccacgcagcccttctccctgaagaacctggacaactcagtgcacctgtgcaacaactccatccagaagcacctggagaactcatgccatcggcatccactgcttccgccagacaacatgtggtctagccagaggttccaggcccacctgcaggagatgggtgccccaaatgcttggtccaccatcatcgtgcctggcatgaaggatgctgtgatccacgcacttcagacctcccaggacaccgtgcagtgtcggaaggccagctttgagctctatggcgctgacttcgtgttcggggaggacttccagccctggctgattgagatcaacgccagccccacgatggcaccctccacagcagtcactgcccggctctgtgctggcgtgcaagctgacaccctgcgcgtggtcattgaccggatgctggaccgcaactgtgacacaggagcctttgagctcatctataagcagggcccagctcctaacatgcaggtgtcaccagagagaaatgcaccactgtgcccagcaccatagctctggctcagagagtttgcctgagaaagcagcagacagaaaacaaaaggtgcgagttgctcccgaaggaactgacttcatgtgcaacagagctcggagaagtccaaggctaagcacactctccagaacagtggaggttgtgctgaaaggcaactgggaggcgacggagagcctgggaggtgcgggctacactggaggccagcaagtctgccagagagaaacagaaaaaaagacaggtgggaagagctctcctggggtcagaacaaagcttaatatcttctttgacaaagaacgtaacatcaaaatagccaactatgggtttagttcaacatttgcaaagagagacaacactgaaaagggaacgtttgatgggactctcccttatgcaggcccagaactcttcttgggccatgggtaccaatgccctgccatcaacgtttggagccttggcatcatcgtatgcaaaatggtggctggggccctgccattttatgagcagaactgtaaggatatactg

SEQ ID NO: 22576 - DNA, 1743 bp, Homo sapiens
  misc_feature 1..1743: note = ENST00000438141
  source 1..1743: mol_type = unassigned DNA; mol_type = unassigned DNA
gccttggggacatttagggcagagcctcgagtgacaggtcctgggacagtgggagccaagggcaagtgctagagttgcagtgaatttagagcaaagcctcagctaagtgacacatcccagggcagtaggggatctatctaggttcgtgctgggcctcaggtaagtgacaggccttaggacaatgggggctgtggcatgcgtcaggttacctgccttgatatgggatcgtgacaggcccctccctatgtgcaggagacaagcagcccaagaaacaggagaaaaacccagtgttggtgtccccagagtttgtggatgaagctctgtgtgcgtgcgaggagtaccttagcaacttggcccacatggacatcgacaaggacctggaggccccgctgtacctcacccccgagggctggtccctcttcctccagcgctactaccaagtggtccacgaaggggcagaactcaggcacctcgacactcaggtccagcgctgtgaggacatcctgcagcagctgcaggccgtggtaccccagatagacatggaaggggatcgcaacatctggatcgtgaagccaggagccaagtcccgcggacgaggcatcatgtgcatggaccacctggaggagatgctgaagctggtgaacggcaaccccgtggtgatgaaggacggcaagtgggtggtgcagaagtatattgagcggcccctcctcatctttggcaccaagtttgacctcagacagtggttcctggtaactgactggaacccacttaccgtgtggttctaccgcgacagctatatccgcttttccacgcagcccttctccctgaagaacctggacaactcagtgcacctgtgcaacaactccatccagaagcacctggagaactcatgccatcggcatccactgcttccgccagacaacatgtggtctagccagaggttccaggcccacctgcaggagatgggtgccccaaatgcttggtccaccatcatcgtgcctggcatgaaggatgctgtgatccacgcacttcagacctcccaggacaccgtgcagtgtcggaaggccagctttgagctctatggcgctgacttcgtgttcggggaggacttccagccctggctgattgagatcaacgccagccccacgatggcaccctccacagcagtcactgcccggctctgtgctggcgtgcaagctgacaccctgcgcgtggtcattgaccggatgctggaccgcaactgtgacacaggagcctttgagctcatctataagcagcccgtcaccacttccccagcctccacaccaaggcccagctgccttctccccatgtactccgacaccagggccaggtcctcagacgacagcacagcaagctggtgggcactaaggccctgtcgaccacaggcaaggccttgaggactctacccacggctaaggtcttcatttccctcccaccgaaccttgatttcaaggtggcacccagcatcctgaagccaagaaaggctcctgctctcctgtgcctccgaggcccccagctggaagtgccttgttgcctctgccctttgaagtcggaacaattcctagcacctgtcggaaggtcaaggccaaaggcaaattcaaggccagactgtgacaaacccagggctgaggcctgccccatgaagaggctgagccccctgaaacccctgccccttgttggtacattccagaggcgcaggggcctgggggatatgaagctagg

SEQ ID NO: 22577 - DNA, 2097 bp, Homo sapiens
  misc_feature 1..2097: note = ENST00000430793
  source 1..2097: mol_type = unassigned DNA; mol_type = unassigned DNA
gccttggggacatttagggcagagcctcgagtgacaggtcctgggacagtgggagccaagggcaagtgctagagttgcagtgaatttagagcaaagcctcagctaagtgacacatcccagggcagtaggggatctatctaggttcgtgctgggcctcaggtaagtgacaggccttaggacaatgggggctgtggcatgcgtcaggttacctgccttgatatgggatcgtgacaggcccctccctatgtgcaggagacaagcagcccaagaaacaggagaaaaacccagtgttggtgtccccagagtttgtggatgaagctctgtgtgcgtgcgaggagtaccttagcaacttggcccacatggacatcgacaaggacctggaggccccgctgtacctcacccccgagggctggtccctcttcctccagcgctactaccaagtggtccacgaaggggcagaactcaggcacctcgacactcaggtccagcgctgtgaggacatcctgcagcagctgcaggccgtggtaccccagatagacatggaaggggatcgcaacatctggatcgtgaagccaggagccaagtcccgcggacgaggcatcatgtgcatggaccacctggaggagatgctgaagctggtgaacggcaaccccgtggtgatgaaggacggcaagtgggtggtgcagaagtatattgagcggcccctcctcatctttggcaccaagtttgacctcagacagtggttcctggtaactgactggaacccacttaccgtgtggttctaccgcgacagctatatccgcttttccacgcagcccttctccctgaagaacctggacaactcagtgcacctgtgcaacaactccatccagaagcacctggagaactcatgccatcggcatccactgcttccgccagacaacatgtggtctagccagaggttccaggcccacctgcaggagatgggtgccccaaatgcttggtccaccatcatcgtgcctggcatgaaggatgctgtgatccacgcacttcagacctcccaggacaccgtgcagtgtcggaaggccagctttgagctctatggcgctgacttcgtgttcggggaggacttccagccctggctgattgagatcaacgccagccccacgatggcaccctccacagcagtcactgcccggctctgtgctggcgtgcaagctgacaccctgcgcgtggtcattgaccggatgctggaccgcaactgtgacacaggagcctttgagctcatctataagcagcctgctgtggaggtgcctcaatatgtgggcatccggctcctggtagagggcttcaccatcaagaagcccatggcgatgtgtcatcggcggatgggggtccgcccagcagtccctctgctgacccagcgaggctctggggaagcccgtcaccacttccccagcctccacaccaaggcccagctgccttctccccatgtactccgacaccagggccaggtcctcagacgacagcacagcaagctggtgggcactaaggccctgtcgaccacaggcaaggccttgaggactctacccacggctaaggtcttcatttccctcccaccgaaccttgatttcaaggtggcacccagcatcctgaagccaagaaaggtgggcctcgacctgtgactcacacccagtggacagtgctgagcacggggtcagggctggagggcacaggcagagggcagctcccaggctggctggcaccccaagggaagagctggtctccctcagaagccccttcctccacagacttctgatcatctccctcttctcccctcctttcacaccgaggctcctgctctcctgtgcctccgaggcccccagctggaagtgccttgttgcctctgccctttgaagtcggaacaattcctagcacctgtcggaaggtcaaggccaaaggcaaattcaaggccagactgtgacaaacccagggctgaggcctgccccatgaagaggctgagccccctgaaacccctgccccttgttggtacattccagaggcgcaggggcctgggggatatgaagctagggaagcccctgcttcgattccccactg

SEQ ID NO: 22578 - DNA, 693 bp, Homo sapiens
  misc_feature 1..693: note = ENST00000602338
  source 1..693: mol_type = unassigned DNA; mol_type = unassigned DNA
ccaagggcaagtgctagagttgcagtgaatttagagcaaagcctcagctaagtgacacatcccagggcagtaggggatctatctaggttcgtgctgggcctcaggtaagtgacaggccttaggacaatgggggctgtggcatgcgtcaggttacctgccttgatatgggatcgtgacaggcccctccctatgtgcaggagacaagcagcccaagaaacaggagaaaaacccagtgttggtgtccccagagtttgtggatgaagctctgtgtgcgtgcgaggagtaccttagcaacttggcccacatggacatcgacaaggacctggaggccccgctgtacctcacccccgagggctggtccctcttcctccagcgctactaccaagtggtccagtgagtcccctgcagctgggactttgggctgtgggcaggtgcttagggatagaccctttctgtctcgtgcagcccctaccccttccccaagcctcccgctcgtttaccccgctgttctgctcaggaaccctcgaggactcccactgcctccgtgatagggtctgggccacttttcttggttcttggcatagcatagtcactaagagcatggactgtgccaccaaatggacagcacattacccaaagtgtgtgttgtgtggatgttaattctacaggaagtaaatagattttatgaaaaaa

SEQ ID NO: 22579 - DNA, 882 bp, Homo sapiens
  misc_feature 1..882: note = ENST00000482269
  source 1..882: mol_type = unassigned DNA; mol_type = unassigned DNA
gggcattcgtgaaaatatatggaaagcccttgtcacaatgcctggcacatagtggtgctttatcattaggaactggaatgattaaattctgtcaaagacagttttaatgtaataggaagggggtggcacaggtggagtgttggagtagggggtggtttgcagttaatggaattttatcagcctttcccatttgtgtagtctgggcaggttaggatttccggggtggcttgaaggtggggccggaggcttgggagggacctatggatatctgcagggagggcgtgaccaaggctgcctggatgacggcgggggatggtggaatatatctccccctgccctctccacctgcatgtcccaggtccagccctgcccaagttctatcatttccccacagcgaaggggcagaactcaggcacctcgacactcaggtccagcgctgtgaggacatcctgcagcagctgcaggccgtggtaccccagatagacatggaaggggatcgcaacatctggatcgtgaagccaggagccaagtcccgcggacgaggcatcatgtgcatggaccacctggaggagatgctgaagctggtgaacggcaaccccgtggtgatgaaggacggcaagtgggtggtgcagaagtatattgagcggcccctcctcatctttggcaccaagtttgacctcagacagtggttcctggtaactgactggaacccacttaccgtgtggttctaccgcgacagctatatccgcttttccacgcagcccttctccctgaagaacctggacaactcagtgcacctgtgcaacaactccatccagaagcacctggagaactcatgccatcggcatccactgcttccgccagacaacatgtggtctagcc

SEQ ID NO: 22580 - DNA, 1549 bp, Homo sapiens
  misc_feature 1..1549: note = ENST00000492440
  source 1..1549: mol_type = unassigned DNA; mol_type = unassigned DNA
agttaatggaattttatcagcctttcccatttgtgtagtctgggcaggttaggatttccggggtggcttgaaggtggggccggaggcttgggagggacctatggatatctgcagggagggcgtgaccaaggctgcctggatgacggcgggggatggtggaatatatctccccctgccctctccacctgcatgtcccaggtccagccctgcccaagttctatcatttccccacagcgaaggggcagaactcaggcacctcgacactcaggtccagcgctgtgaggacatcctgcagcagctgcaggccgtggtaccccagatagacatggaaggggatcgcaacatctggatcgtgaagccaggagccaagtcccgcggacgaggcatcatgtgcatggaccacctggaggagatgctgaagctggtgaacggcaaccccgtggtgatgaaggacggcaagtgggtggtgcagaagtatattgagcggcccctcctcatctttggcaccaagtttgacctcagacagtggttcctggtaactgactggaacccacttaccgtgtggttctaccgcgacagctatatccgcttttccacgcagcccttctccctgaagaacctggacaagtgagcccctctgctcgcctcccacgagctccctgcctagttggggagctggcaagcaaacaggcgattacagtgcaggggactcgcgcagcagcgctaggctccacacacagactgcaggcaggcaggccctcatcctgccagctgtccttgcatccaacagatttttttttaacagacagggggcggtctcactctgttacctaggctggagtgcagtggcatggtcacggctcactgtagccttgacttcctgtgctcaagcaatccttcctcctcagcctcccaagtgtctgagaccacaggcatgtaccacagctgatttttaagttttttaatgtagacatggggtctcactatgttgcccaggttggtctcaaactcctgggctcaagcgatcatcccaccttggcttcccaaagtgctgggattacactatgcctggcccctccaacagatttgaccgagtgtgtaccttgtgccatgcactgttctgggcacttggggtatagcagtgaacaaaacaagatcccagctctcaagggcttacattctagcagggagaaacaggcaagcaagaacacaagtgaaattatctaacaggttaaaagattatttgggccaggcgcagtggctcatgcctgtaatccaagcactttgggaggccgaggtgggtggatcacctgaggtcaggagttcgagaccagcctgaccaatatagcgaaaccccgtctctactaaaaatataaaaattagccgggcgtgttggcgggcgccagtagtcccagctactcgggaggccgtgacaggagaattgcttgaacctgggaggtggaggttgcagtgaactgagatcgtgccattgcactccagcctgggtgacagatcaaggatctgtctcaaaaaaaaaaaaaaaaaaaaa

SEQ ID NO: 22581 - DNA, 616 bp, Homo sapiens
  misc_feature 1..616: note = ENST00000466245
  source 1..616: mol_type = unassigned DNA; mol_type = unassigned DNA
cagctgcaggccgtggtaccccagatagacatggaaggggatcgcaacatctggatcgtgaagccaggagccaagtcccgcggacgaggcatcatgtgcatggaccacctggaggagatgctgaagctggtgaacggcaaccccgtggtgatgaaggacggcaagtgggtggtgcagaagtatattgagcggcccctcctcatctttggcaccaagtttgacctcagacagtggttcctgctcagtgcacctgtgcaacaactccatccagaagcacctggagaactcatgccatcggcatccactgcttccgccagacaacatgtggtctagccagaggttccaggcccacctgcaggagatgggtgccccaaatgcttggtccaccatcatcgtgcctggcatgaaggatgctgtgatccacgcacttcagacctcccaggacaccgtgcagtgtcggaaggccagctttgagctctatggcgctgacttcgtgttcggggaggacttccagccctggctgattgagatcaacgccagccccacgatggcaccctccacagcagtcactgcccggctctgtgctggcgtgcaagctgacaccctgcgcgtggtc

SEQ ID NO: 22582 - DNA, 543 bp, Homo sapiens
  misc_feature 1..543: note = ENST00000471058
  source 1..543: mol_type = unassigned DNA; mol_type = unassigned DNA
acaccgtgcagtgtcggaaggccagctttgagctctatggcgctgacttcgtgttcggggaggacttccagccctggctgattgagatcaacgccagccccacgatggcaccctccacagcagtcactgcccggctctgtgctggcgtgcaagctgacaccctgcgcgtggtcattgaccggatgctggaccgcaactgtgacacaggagcctttgagctcatctataagcaggctcctgctctcctgtgcctccgaggcccccagctggaagtgccttgttgcctctgccctttgaagtcggaacaattcctagcacctgtcggaaggtcaaggccaaaggcaaattcaaggccagactgtgacaaacccagggctgaggcctgccccatgaagaggctgagccccctgaaacccctgccccttgttggtacattccagaggcgcaggggcctgggggatatgaagctagggaagcccctgcttcgattccccactgcccttgtcctggatccaacaccaaataaaaagaaacaagtgaagt

SEQ ID NO: 22583 - DNA, 762 bp, Homo sapiens
  misc_feature 1..762: note = ENST00000493241
  source 1..762: mol_type = unassigned DNA; mol_type = unassigned DNA
cctgggcaacaagagcaaaactctgtctcaaaaaaaaaaaaaaaaaaaaaacccagccaaatgagtattgtctcctccaaagtagtcactctgcctcacagagtgacttatttcaaagatgacctgatttcaaagatgccaggacttaagcccaggttgctctctccagcgcccacgcttttcccactgcagtattctgcctttgccttcaagcagtcacctctcggggaaagaactaacacatgtccagcacttaacagtttgccccataccgctacctgcccagctcctttagtgtttacaccaacctagcaaggtaggtgctattatccccattttccagccgaggtatcaggaagtttaaggaagttgcccaaggttgcacagctcagaaggggcacagctgggatgcagacccagcccgtcaccacttccccagcctccacaccaaggcccagctgccttctccccatgtactccgacaccagggccaggtcctcagacgacagcacagcaagctggtgggcactaaggccctgtcgaccacaggcaaggccttgaggactctacccacggctaaggtcttcatttccctcccaccgaaccttgatttcaaggtggcacccagcatcctgaagccaagaaaggctcctgctctcctgtgcctccgaggcccccagctggaagtgccttgttgcctctgccctttgaagtcggaacaattcctagcacctgtcggaaggtcaaggccaaaggcaaatt

SEQ ID NO: 22584 - DNA, 4168 bp, Homo sapiens
  misc_feature 1..4168: note = ENST00000557636
  source 1..4168: mol_type = unassigned DNA; mol_type = unassigned DNA
gtagtaaccggggaagcagccgtcggcggctgccctgagccttcctggggaaggaggagggaggtaggcgcagagcgcggtccacgcctgctcgccccgaaccatgggaagatgagacaggaatctgtgccatccaaattgcttgatccagtgaatctgctaggaaaggtctctgaggcccccgtctgctgactgcatgacaaaccctaaaggaaatgccaatcgtgatggcccgggacctggaggaaacagcatcatcctcagaggatgaggaggtcataagtcaagaggatcatccatgcatcatgtggactggaggctgcaggagaattccagttttggtattccatgccgacgctattcttacaaaggacaacaatattagagtaattggagaacgttatcatttgtcttataagattgtacgaacggacagtcgcctagtacgcagcattctgacagcccatggatttcatgaagttcacccaagcagcactgactataacctaatgtggacaggatcccacctgaagcccttcttactgcgcaccctctctgaagcacaaaaagttaatcactttcccaggtcttatgaacttacccggaaggaccgactgtacaaaaacattattcgaatgcagcatacacatggattcaaggcttttcacatcctcccccagaccttcctcctgccagctgagtacgcggaattttgtaattcatattcgaaggaccggggaccttggatagtaaaaccagtggcatcttcaagggggcggggcgtctacctgatcaacaatccaaaccagatctccctggaagagaacattttggtctcccgttacattaacaaccccctgctcatagatgatttcaagtttgacgtgcgcctctatgtgctcgtgacttcctatgatcctcttgtcatctatctctatgaagaaggattggctaggtttgcaactgtgcgatatgatcaaggagccaagaacattcggaaccagttcatgcatctgacaaactacagtgtcaacaagaaaagtggagattacgtcagttgtgacgatccagaagtggaggattatggaaacaaatggagcatgagtgctatgcttaggtacctgaaacaagaaggcagagatacaaccgcattgatggcccatgtagaagacctgatcattaagactataatctctgctgaactagctattgctactgcctgtaaaacctttgttcctcatcgcagcagttgttttgaactctatggctttgacgtgctcatagattctactctgaagccatggttgttggaagtgaatctctctccttctttggcctgtgatgcgcctctggacctaaagattaaagccagtatgatttcagatatgttcactgttgtaggatttgtgtgccaagatcctgcccagcgggcatcaactcggccaatttatcccacctttgagtcttccaggcgaaaccctttccagaaacctcagcgtccagtatctgcacagtttcagtcgtcaaaggccaagcagcgttgccgtccactctctgccagtgatgcggaaatgaaaaacctcgtgggctcagcccgggagaaagggccagggaagttgggtggttctgtgcttggtctgtcaatggaggagatcaaagttttacgaagggtgaaggaggagaatgatcggcgaggtggatttattcgcatatttcctacatctgagacatgggaaatatatgggtcctacctcgagcataagacctcaatgaactatatgctggcaacacgcctcttccaggacagaatgactgctgatggagcgccagaattgaagatagagagtctgaattcaaaggccaagctgcatgctgcactttacgagaggaagctcctgtctctggaggtgcgaaaacgtagacgacggagtagcagattgagggcaatgaggccaaaatacccagtgattacccaaccagctgaaatgaatgttaaaactgagacagagagtgaagaggaggaagaagtcgcattagataatgaagatgaagaacaggaggcttcccaggaggagtctgcaggatttcttagagaaaatcaagccaaatatacaccctcattgacagctttggtagaaaatacacccaaagaaaattccatgaaagttcgtgaatggaataataaaggtggacactgctgcaaacttgagactcaggagctagagcctaaatttaacctgatgcagattcttcaagataatggcaatcttagcaaaatgcaggcccgaatagcattctctgcctatctccagcatgttcaaattcgcctgatgaaagacagtggcggtcagacgttcagtgccagttgggctgccaaagaggatgaacagatggagctggttgttcgtttcctcaagcgagcatcaaataacctccagcattcactgaggatggtattacccagtcgacgattggcacttctggaacgcagaagaatcctggcccaccagctgggtgactttatcattgtatacaacaaggaaacagaacaaatggctgaaaagaaatcaaagaagaaagttgaggaagaagaggaagatggggtgaatatggaaaactttcaggagttcatcagacaagcaagtgaggctgaactggaggaggtgttgactttttatacccaaaagaacaagtctgctagtgtcttcctggggactcactctaaaatttctaagaacaacaacaattattctgatagtggggcaaaaggtgatcaccctgagactataatggaagaagtgaaaataaagccacctaaacagcaacagacgacagaaattcattctgataaattatctcgatttaccacttcagcagaaaaagaggcaaaattagtttatagcaattcctcctctggtcctactgctactctgcagaaaattcccaacacccatttgtcatctgttacaacctctgacctctctccagggccttgccaccattcttctttatctcaaattccttcagctatccccagcatgcctcaccagccaacaattttactgaacacagtctctgccagtgcttctccctgcctacatcccggggcacagaacatcccaagccctactggcctgccacgctgtcgatcaggaagtcacaccattggtcccttttcttccttccaaagtgctgcacacatctatagccagaaactgtctcgtccctcttcagcaaaggcagcaggatcgtgctatctaaacaagcatcattcaggaatagccaaaacacaaaaagagggagaagatgcttctttatatagcaaacggtacaaccaaagtatggttacagctgaacttcagcggctagctgagaagcaggcagcgagacagtattctccatccagccacatcaacctcctcacccaacaggtaacaaacctgaatttggcaactggcatcataaacagaagcagtgcttcagctcccccaaccctccgacccatcatcagtcctagtggcccgacatggtctacacagtcagacccccaagctcccgagaatcactccagctctcctggaagcaggagcctgcagacagggggatttgcctgggaaggagaagtagaaaacaacgtgtacagccaggctacaggggtggtcccccagcacaagtatcaccccacagcaggcagctatcagcttcaatttgccctgcagcaacttgaacaacaaaaacttcagtcccggcagctcctggaccagagtcgagcccggcaccaggcaatctttggcagccagacactacctaactccaatttatggacaatgaataatggtgcaggttgtagaatttccagtgccacagctagtggccagaagccaaccactctgccacaaaaagtggtaccacctccaagttcttgcgcctccctggttcccaaacccccacccaaccacgaacaagtgctcagaagggcaacatcccagaaagcttccaatacccgcttcagatcctcctttcaaaactatttgtggtatttcttccaagcagtcagctgaactgaggacgacagcctacaaacaactacatgcatctgaactgtctcttgtaaatgagcttttttcagagccagaatcatactctccaggaaatatggagaaagaaa

SEQ ID NO: 22585 - DNA, 1595 bp, Homo sapiens
  misc_feature 1..1595: note = ENST00000286650
  source 1..1595: mol_type = unassigned DNA; mol_type = unassigned DNA
gggaagcagccgtcggcggctgccctgagccttcctggggaaggaggagggaggtaggcgcagagcgcggtccacgcctgctcgccccgaaccatgggaagatgagacaggaatctgtgccatccaaattgcttgatccagtgaatctgctaggaaaggtctctgaggcccccgtctgctgactgcatgacaaaccctaaaggaaatgccaatcgtgatggcccgggacctggaggaaacagcatcatcctcagaggatgaggaggtcataagtcaagaggatcatccatgcatcatgtggactggaggctgcaggagaattccagttttggtattccatgccgacgctattcttacaaaggacaacaatattagagtaattggagaacgttatcatttgtcttataagattgtacgaacggacagtcgcctagtacgcagcattctgacagcccatggatttcatgaagttcacccaagcagcactgactataacctaatgtggacaggatcccacctgaagcccttcttactgcgcaccctctctgaagcacaaaaagttaatcactttcccaggtcttatgaacttacccggaaggaccgactgtacaaaaacattattcgaatgcagcatacacatggattcaaggcttttcacatcctcccccagaccttcctcctgccagctgagtacgcggaattttgtaattcatattcgaaggaccggggaccttggatagtaaaaccagtggcatcttcaagggggcggggcgtctacctgatcaacaatccaaaccagatctccctggaagagaacattttggtctcccgttacattaacaaccccctgctcatagatgatttcaagtttgacgtgcgcctctatgtgctcgtgacttcctatgatcctcttgtcatctatctctatgaagaaggattggctagaaaatgcaattggaagatgggaaataccatggataaaagaaggctacctatttatgtacaggtgctttgacagatattattgtactctgacaactattattttagaatggtcttttaatgattttagagacttagtttttttcacatgtatcctatgacttgaaatcagtgagagcagactaaccaaacctcgctggtggagctctgtgttccgttcgcctctaggtggcagtcacagcatttataagtcctgtcatattcttaactgagattttgagtttgagccctgggaacattggagactaccaaaactccctagttctggcctcttccttgaaaattgagaaagggaagaactgaaacatctcgcagttattagataaagggctggaccaggcatctgaacatgagctgactactagctctaatcaggtttttataggaaagaaattgtcgataatatttgtagacacacgtgctctcacgttttgaagtatcactatacaaaattaggtataaaagcctattcctggccaggcgtggtggctcacacctgtaatcctagcactttgggaggccgagacgggaggattgcctgaggccaggagttcaagaccagtttgggcaacattgtgagaccccatctcatt

SEQ ID NO: 22586 - DNA, 4683 bp, Homo sapiens
  misc_feature 1..4683: note = ENST00000298832
  source 1..4683: mol_type = unassigned DNA; mol_type = unassigned DNA
gggaagcagccgtcggcggctgccctgagccttcctggggaaggaggagggaggtaggcgcagagcgcggtccacgcctgctcgccccgaaccatgggaagatgagacaggaatctgtgccatccaaattgcttgatccagtgaatctgctaggaaaggtctctgaggcccccgtctgctgactgcatgacaaaccctaaaggaaatgccaatcgtgatggcccgggacctggaggaaacagcatcatcctcagaggatgaggaggtcataagtcaagaggatcatccatgcatcatgtggactggaggctgcaggagaattccagttttggtattccatgccgacgctattcttacaaaggacaacaatattagagtaattggagaacgttatcatttgtcttataagattgtacgaacggacagtcgcctagtacgcagcattctgacagcccatggatttcatgaagttcacccaagcagcactgactataacctaatgtggacaggatcccacctgaagcccttcttactgcgcaccctctctgaagcacaaaaagttaatcactttcccaggtcttatgaacttacccggaaggaccgactgtacaaaaacattattcgaatgcagcatacacatggattcaaggcttttcacatcctcccccagaccttcctcctgccagctgagtacgcggaattttgtaattcatattcgaaggaccggggaccttggatagtaaaaccagtggcatcttcaagggggcggggcgtctacctgatcaacaatccaaaccagatctccctggaagagaacattttggtctcccgttacattaacaaccccctgctcatagatgatttcaagtttgacgtgcgcctctatgtgctcgtgacttcctatgatcctcttgtcatctatctctatgaagaaggattggctaggtttgcaactgtgcgatatgatcaaggagccaagaacattcggaaccagttcatgcatctgacaaactacagtgtcaacaagaaaagtggagattacgtcagttgtgacgatccagaagtggaggattatggaaacaaatggagcatgagtgctatgcttaggtacctgaaacaagaaggcagagatacaaccgcattgatggcccatgtagaagacctgatcattaagactataatctctgctgaactagctattgctactgcctgtaaaacctttgttcctcatcgcagcagttgttttgaactctatggctttgacgtgctcatagattctactctgaagccatggttgttggaagtgaatctctctccttctttggcctgtgatgcgcctctggacctaaagattaaagccagtatgatttcagatatgttcactgttgtaggatttgtgtgccaagatcctgcccagcgggcatcaactcggccaatttatcccacctttgagtcttccaggcgaaaccctttccagaaacctcagcgttgccgtccactctctgccagtgatgcggaaatgaaaaacctcgtgggctcagcccgggagaaagggccagggaagttgggtggttctgtgcttggtctgtcaatggaggagatcaaagttttacgaagggtgaaggaggagaatgatcggcgaggtggatttattcgcatatttcctacatctgagacatgggaaatatatgggtcctacctcgagcataagacctcaatgaactatatgctggcaacacgcctcttccaggacagaatgactgctgatggagcgccagaattgaagatagagagtctgaattcaaaggccaagctgcatgctgcactttacgagaggaagctcctgtctctggaggtgcgaaaacgtagacgacggagtagcagattgagggcaatgaggccaaaatacccagtgattacccaaccagctgaaatgaatgttaaaactgagacagagagtgaagaggaggaagaagtcgcattagataatgaagatgaagaacaggaggcttcccaggaggagtctgcaggatttcttagagaaaatcaagccaaatatacaccctcattgacagctttggtagaaaatacacccaaagaaaattccatgaaagttcgtgaatggaataataaaggtggacactgctgcaaacttgagactcaggagctagagcctaaatttaacctgatgcagattcttcaagataatggcaatcttagcaaaatgcaggcccgaatagcattctctgcctatctccagcatgttcaaattcgcctgatgaaagacagtggcggtcagacgttcagtgccagttgggctgccaaagaggatgaacagatggagctggttgttcgtttcctcaagcgagcatcaaataacctccagcattcactgaggatggtattacccagtcgacgattggcacttctggaacgcagaagaatcctggcccaccagctgggtgactttatcattgtatacaacaaggaaacagaacaaatggctgaaaagaaatcaaagaagaaagttgaggaagaagaggaagatggggtgaatatggaaaactttcaggagttcatcagacaagcaagtgaggctgaactggaggaggtgttgactttttatacccaaaagaacaagtctgctagtgtcttcctggggactcactctaaaatttctaagaacaacaacaattattctgatagtggggcaaaaggtgatcaccctgagactataatggaagaagtgaaaataaagccacctaaacagcaacagacgacagaaattcattctgataaattatctcgatttaccacttcagcagaaaaagaggcaaaattagtttatagcaattcctcctctggtcctactgctactctgcagaaaattcccaacacccatttgtcatctgttacaacctctgacctctctccagggccttgccaccattcttctttatctcaaattccttcagctatccccagcatgcctcaccagccaacaattttactgaacacagtctctgccagtgcttctccctgcctacatcccggggcacagaacatcccaagccctactggcctgccacgctgtcgatcaggaagtcacaccattggtcccttttcttccttccaaagtgctgcacacatctatagccagaaactgtctcgtccctcttcagcaaaggcaggatcgtgctatctaaacaagcatcattcaggaatagccaaaacacaaaaagagggagaagatgcttctttatatagcaaacggtacaaccaaagtatggttacagctgaacttcagcggctagctgagaagcaggcagcgagacagtattctccatccagccacatcaacctcctcacccaacaggtaacaaacctgaatttggcaactggcatcataaacagaagcagtgcttcagctcccccaaccctccgacccatcatcagtcctagtggcccgacatggtctacacagtcagacccccaagctcccgagaatcactccagctctcctggaagcaggagcctgcagacagggggatttgcctgggaaggagaagtagaaaacaacgtgtacagccaggctacaggggtggtcccccagcacaagtatcaccccacagcaggcagctatcagcttcaatttgccctgcagcaacttgaacaacaaaaacttcagtcccggcagctcctggaccagagtcgagcccggcaccaggcaatctttggcagccagacactacctaactccaatttatggacaatgaataatggtgcaggttgtagaatttccagtgccacagctagtggccagaagccaaccactctgccacaaaaagtggtaccacctccaagttcttgcgcctccctggttcccaaacccccacccaaccacgaacaagtgctcagaagggcaacatcccagaaagcttccaaagggtcctccgcggaagggcagctgaatggactccagagcagccttaaccctgcagcctttgtgcccatcaccagctctacagatcctgctcacactaaaatatgaaccacaaacacacagagaaacaacctgttcaccactcctgggtgcatgattgagggtgaagcatccaccagcacttcaaggggtccatagtatttttttttttgctgcctcaaagtccccaaagccttcgagcagaagtggcagtagatggttgccaatcagccaatgcagactttcactgggacaacaagaaagcagatcttctgggttttgatggaacttggcagtggggacattcagctgatgcattatataccccgtcagagcacacttgtatcttttaccttccctttgccccatgcccccaaactgcttaggtcttctctgtccctttactgctgctgcacagagatgatataaaagaggctctttggctatttgcattttgcttcctcttcttttccagattacagtatgaagctttattttctttgtacaagcttaaaatttcaacatcatcatccgccaaagttgttcctcccttttcggaggatctagggggaaagaggagcattcatcacaagtttcctagagagaggagacaaatcggtgtgccattgacaacatgagccagggtaaaggcaccctttggaattactgatttcaaagattaataaagtaattctattttt

SEQ ID NO: 22587 - DNA, 3989 bp, Homo sapiens
  misc_feature 1..3989: note = ENST00000556173
  source 1..3989: mol_type = unassigned DNA; mol_type = unassigned DNA
ggatcatccatgcatcatgtggactggaggctgcaggagaattccagttttggtattccatgccgacgctattcttacaaaggacaacaatattagagtaattggagaacgttatcatttgtcttataagattgtacgaacggacagtcgcctagtacgcagcattctgacagcccatggatttcatgaagttcacccaagcagcactgactataacctaatgtggacaggatcccacctgaagcccttcttactgcgcaccctctctgaagcacaaaaagttaatcactttcccaggtcttatgaacttacccggaaggaccgactgtacaaaaacattattcgaatgcagcatacacatggattcaaggcttttcacatcctcccccagaccttcctcctgccagctgagtacgcggaattttgtaattcatattcgaaggaccggggaccttggatagtaaaaccagtggcatcttcaagggggcggggcgtctacctgatcaacaatccaaaccagatctccctggaagagaacattttggtctcccgttacattaacaaccccctgctcatagatgatttcaagtttgacgtgcgcctctatgtgctcgtgacttcctatgatcctcttgtcatctatctctatgaagaaggattggctagaaaatgcaattggaagatgggaaataccatggataaaagaaggctacctatttatgtacaggtgctttgacagatattattgtactctgacaactattattttagaatggtcttttaatgattttagagacttagtttttttcacatgtatcctatgacttgaaatcagtgagagcagactaaccaaacctcgctggtggagctctgtgttccgttcgcctctaggtggcagtcacagcatttataagtcctgtcatattcttaactgagattttgagtttgagccctgggaacattggagactaccaaaactccctagttctggcctcttccttgaaaattgagaaagggaagaactgaaacatctcgcagttattagataaagggctggaccaggcatctgaacatgagctgactactagctctaatcaggtttttataggaaagaaattgtcgataatatttgtagacacacgtgctctcacgttttgaagtatcactatacaaaattaggtataaaagcctattcctggccaggcgtggtggctcacacctgtaatcctagcactttgggaggccgagacgggaggattgcctgaggccaggagttcaagaccagtttgggcaacattgtgagaccccatctcattaaaaaaaaaaaaaaaaaaaaaaaaaaagaccaagaaaaagcctattccctatattatttaaaacaaaatgatggtaaaatacagtcctgacttctcagatatgcaaggttctgaggattttcagctttataatttgagacttctgagctttctctcttttgtgttatgagtttcatcattctccttcctctgctcatcctcaccttcacttctctcctgtgtcaagttttagaaactgattatgtcctgccaaaaattggactttgggaatagagaaaagagatggaggttgtgcttcactgtttctcaaggacatcatagcaatatgttttgcttaatattccaaagatattttcacctacaatattaacagccctctctatgggtaaaatttggcataattttaagacctttctggttcagagcacaacatgagaacaacagtaccaatgtttattatagaatttactacaaatatgcaagtgctttggctactggttgtgtgttggaagtcagaatctactgaattaagtataacccttttgcttccagcagaaacaaaaaaatttatacacacacacacacacacacacacacacacacacacacaatggatgttttttcacagaataattagaaaaacagcttttaaaaaactcagaccaagtagaaccagaaagccacatgaattttcagggctttggttaggtttacctgaaagtgtaggtgaatataaaagctttatcaaagctttacaaaagcataacgcatggcaatatgatgcactgtttgcgggagtcctgcgagggcacattgttccgtgcagtaatttcaatgtgcctaagttcttgtgtcttcactaattatgtatcttgacattcacttgctttgttgtaaccctcagagtctgttcaactatgtcgatagtctgtagcatctccagatctgcagcttttagttatcttgggccacatgtaatttatgtagacataactgaagatcatcagtttgggatgagattattgggttacgttgaggctcaacaagaaaaaccataatctttcctaaagagacggaacaggaggcaaatacaattcatttccttctttagaaatgaattcccttacaccctatcacttctgttttggacctcaaattaatactaggcgacagaaagattaaattcatttcacaagacagttttgtgatataagttattttgtgtaaaattttttaacacaaaattaaattcgtgaaaaccctagtttctgtatagatgagtgttttcagttgtccttattgttttattaacataagaagtgggagagctctcactgttttctcatgtgtgggtatagtattgaagaagtgttgcaattgtccccctggtatttgggtgcagctttttgtgattcccacagtagccctcagaggtcccctgtgcttttgaattttacttgcgtgttgctgttttgcaccaccaggggacactcagtttccacagaggggtgctatgctctaccaaaatggtgcagattctttttcctgtcaggggtggactccaaaaagattttgtcctggattttacagctttaggtggatccagtattgggtttagatgagttgacagagccctttctgagatgaagctaatagccagattttcactgaaacaggaaaaataaaaatttcaaaaaaattaaaacaaaatggagttaaaaactaaatatgttgccagagacccaaagataggcagctctagcaacttggggggcatgcaagtatccatccagggagctgagttccacccatgcggcggaggtgggaagagaggattctgggaaggtcccggttggaatggccttttttctgcctcagccatattattcagtggaaattcagaaaagaccccaaaacatttgtagtgcctttccctttctccccacccccagttccttcttcagtagccttccttgctaattaacactggctctgcagggatatttaccttttctctgctggattcctgtggttttgaaagaattcaggtacttgctggttgccaaggaattcagattacctcacaggctgcacactgtccagaatctgccacagcagcaagtaggggggaagagacaccaacaagggggagaaaaccctttccagtgctcattgtcaccctccctggcaggcccttgctgtttgtgaagtttgagtcatttctggctctaaagacaagggatcaggctggtaatcccctcccagacggctctgtagggcgctgcctagtcactgcagcgctttggcagtctcccggctgcagctggttgacagcagatcagagagctcttgggcctcttgttctcttccataagatttttctgggtcaggccaggatgaaacccagtggctcctggcaaggctgcctgaggtgctgtctcttcattgtccaggcctctctgactcaaaatgcctacacctgttgaaggataactcatgtgccacagcgaggtcgaggctggccttctcttttcttggtacatttgtagtgaatgtttgtcagaaaatataactaccaaagaggatgttaagcttctacatctagaatgcctgtgactctgaccataagaagatattggtatcaaaaaaaagtttttaagaaaacagcaggac

SEQ ID NO: 22588 - DNA, 572 bp, Homo sapiens
  misc_feature 1..572: note = ENST00000554185
  source 1..572: mol_type = unassigned DNA; mol_type = unassigned DNA
agcaataaataactaaaacaacttactgaacaaccaagcagtcccacttctagagaaataaaaacttacgtttacagtaaaacttacaaaaacgtacattcatataaaaatctatatggaaatgctttatagcaactttattcataatctccaaaaattaaacaatccaaatgccttcaactggtgaatggataaccatggtacatctatacagtggattactactgagcaagaaaagggacagaatactgatacatgcaacaatgatacatttcaaatgagttgtgctcagtgaaagaagctagtctcaaaaggatacacactgtctgattccacttatttgactttctggaaaaggcaaaattataaggacagaaaacaaatgaatgttttcccaggggctggaggtgattgggagggtccactacagggggacttgaggtcttatgaacttacccggaaggaccgactgtacaaaaacattattcgaatgcagcatacacatggattcaaggcttttcacatcctcccccagaccttcctcctgccagctgagtacgcggaattttgta

SEQ ID NO: 22589 - DNA, 2155 bp, Homo sapiens
  misc_feature 1..2155: note = ENST00000555422
  source 1..2155: mol_type = unassigned DNA; mol_type = unassigned DNA
atagtaaaaccagtggcatcttcaagggggcggggcgtctacctgatcaacaatccaaaccagatctccctggaagagaacattttggtctcccgttacattaacaaccccctgctcatagatgatttcaagtttgacgtgcgcctctatgtgctcgtgacttcctatgatcctcttgtcatctatctctatgaagaaggattggctagaaaatgcaattggaagatgggaaataccatggataaaagaaggctacctatttatgtacagaacttgattaatttctcttgaacttgaaagattcttgaaagattctctgcttctacttccacttgctacttacactcaaactctatggctttgacgtgctcatagattctactctgaagccatggttgttggaagtgaatctctctccttctttggcctgtgatgcgcctctggacctaaagattaaagccagtatgatttcagatatgttcactgttgtaggatttgtgtgccaagatcctgcccagcgggcatcaactcggccaatttatcccacctttgagtcttccaggcgaaaccctttccagaaacctcagcgttgccgtccactctctgccagtgatgcggaaatgaaaaacctcgtgggctcagcccgggagaaagggccagggaagttgggtggttctgtgcttggtctgtcaatggaggagatcaaagttttacgaagggtgaaggaggagaatgatcggcgaggtggatttattcgcatatttcctacatctgagacatgggaaatatatgggtcctacctcgagcataagacctcaatgaactatatgctggcaacacgcctcttccaggacagaatgactgctgatggagcgccagaattgaagatagagagtctgaattcaaaggccaagctgcatgctgcactttacgagaggaagctcctgtctctggaggtgcgaaaacgtagacgacggagtagcagattgagggcaatgaggccaaaatacccagtgattacccaaccagctgaaatgaatgttaaaactgagacagagagtgaagaggaggaagaagtcgcattagataatgaagatgaagaacaggaggcttcccaggaggagtctgcaggatttcttagagaaaatcaagccaaatatacaccctcattgacagctttggtagaaaatacacccaaagaaaattccatgaaagttcgtgaatggaataataaaggtggacactgctgcaaacttgagactcaggagctagagcctaaatttaacctgatgcagattcttcaagataatggcaatcttagcaaaatgcaggcccgaatagcattctctgcctatctccagcatgttcaaattcgcctgatgaaagacagtggcggtcagacgttcagtgccagttgggctgccaaagaggatgaacagatggagctggttgttcgtttcctcaagcgagcatcaaataacctccagcattcactgaggatggtattacccagtcgacgattggcacttctggaacgcagaagaatcctggcccaccagctgggtgactttatcattgtatacaacaagttttatcttgttgtttttctgtggggtttgggcactgggtaggaaacagaacaaatggctgaaaagaaatcaaagaagaaagttgaggaagaagaggaagatggggtgaatatggaaaactttcaggagttcatcagacaagcaaggctgaactggaggaggtgttgactttttatacccaaaagaacaagtctgctagtgtcttcctggggactcactctaaaatttctaagaacaacaacaattattctgatagtggggcaaaaggtgatcaccctgagactataatggaagaagtgaaaataaagccacctaaacagcaacagacgacagaaattcattctgataaattatctcgatttaccacttcagcagaaaaagaggcaaaattagtttatagcaattcctcctctggtcctactgctactctgcagaaaattcccaacacccatttgtcatctgttacaacctctgacctctctccagggccttgccaccattcttctttatctcaaattccttcagctatccccagcatgcctcaccagccaacaattttactgaac

SEQ ID NO: 22590 - DNA, 528 bp, Homo sapiens
  misc_feature 1..528: note = ENST00000554935
  source 1..528: mol_type = unassigned DNA; mol_type = unassigned DNA
tttccttgaaactctgttcctggcatttaacctgtttcccttctatcaggtttgcaactgtgcgatatgatcaaggagccaagaacattcggaaccagttcatgcatctgacaaactacagtgtcaacaagaaaagtggagattacgtcagttgtgacgatccagaagtggaggattatggaaacaaatggagcatgagtgctatgcttaggtacctgaaacaagaaggcagagatacaaccgcattgatggcccatgtagaagacctgatcattaagactataatctctgctgaactagctattgctactgcctgtaaaacctttgttcctcatcgcagcagttgttttgaactctatggctttgacgtgctcatagattctactctgaagccatggttgttggaagtgaatctctctccttctttggcctgtgatgcgcctctggacctaaagattaaagccagtatgatttcagatatgttcactgttgtaggatttgtgtgccaagatcctgcccagcgggcat

SEQ ID NO: 22591 - DNA, 705 bp, Homo sapiens
  misc_feature 1..705: note = ENST00000554148
  source 1..705: mol_type = unassigned DNA; mol_type = unassigned DNA
tgagtgctatgcttaggtacctgaaacaagaaggcagagatacaaccgcattgatggcccatgtagaagacctgatcattaagactataatctctgctgaactagctattgctactgcctgtaaaacctttgttcctcatcgcagcagttgttttgaactctatggctttgacgtgctcatagattctactctgaagccatggttgttggaagtgaatctctctccttctttggcctgtgatgcgcctctggacctaaagattaaagccagtatgatttcagatatgttcactgttgtaggatttgtgtgccaagatcctgcccagcgggcatcaactcggccaatttatcccacctttgagtcttccaggcgaaaccctttccagaaacctcagcgtccagtatctgcacagtttcagtcgtcaaaggccaagcagcgttgccgtccactctctgccagtgatgcggaaatgaaaaacctcgtgggctcagcccgggagaaagggccagggaagttgggtggttctgtgcttggtctgtcaatggaggagatcaaagttttacgaagggtgaaggaggagaatgatcggcgaggtggatttattcgcatatttcctacatctgagacatgggaaatatatgggtcctacctcgagcataagacctcaatgaactatatgctggcaacacgcctcttccaggaca

SEQ ID NO: 22592 - DNA, 445 bp, Homo sapiens
  misc_feature 1..445: note = ENST00000554878
  source 1..445: mol_type = unassigned DNA; mol_type = unassigned DNA
gatttgtgtgccaagatcctgcccagcgggcatcaactcggccaatttatcccacctttgagtcttccaggcgaaaccctttccagaaacctcagatgacctccctcatcatcatgtagaagctgaaatagccaagatcctcttctgggatcagtgatggacagggcccatttggctgccttcttggagtacccagggtagtcacgtttgtgccaggcctcttgaagtccagcaaccacagtgatagccttttggccacagctcttttctgtgttactgatgtctctcatctcaatatttccccctcaaattgtaaaacatttcacagcccaactttttcatttgtgatataatagattgttccttggttttgtgtcttatgtctcaattctcttaattgttcatctcctgtgctaaaaatatacccactgaaataaatacacat

SEQ ID NO: 22593 - DNA, 513 bp, Homo sapiens
  misc_feature 1..513: note = ENST00000556976
  source 1..513: mol_type = unassigned DNA; mol_type = unassigned DNA
gatgcggaaatgaaaaacctcgtgggctcagcccgggagaaagggccagggaagttgggtggttctgtgcttggtctgtcaatggaggagatcaaagttttacgaagggtgaaggaggagaatgatcggcgaggtggatttattcgcatatttcctacatctgagacatgggaaatatatgggtcctacctcgagcataagacctcaatgaactatatgctggcaacacgcctcttccaggacaggggaaacccaagaagaagcttattgacaggaagaacacgaatgactgctgatggagcgccagaattgaagatagagagtctgaattcaaaggccaagctgcatgctgcactttacgagaggaagctcctgtctctggaggtgcgaaaacgtagacgacggagtagcagattgagggcaatgaggccaaaatacccagtgattacccaaccagctgaaatgaatgttaaaactgagacagagagtgaagaggaggaagaagtcgcatta

SEQ ID NO: 22594 - DNA, 3071 bp, Homo sapiens
  misc_feature 1..3071: note = ENST00000556893
  source 1..3071: mol_type = unassigned DNA; mol_type = unassigned DNA
gaaaaacctcgtgggctcagcccgggagaaagggccagggaagttgggtggttctgtgcttggtctgtcaatggaggagatcaaagttttacgaagggtgaaggaggagaatgatcggcgaggtggatttattcgcatatttcctacatctgagacatgggaaatatatgggtcctacctcgagcataagacctcaatgaactatatgctggcaacacgcctcttccaggacaggggaaacccaagaagaagcttattgacaggaagaacacgaatgactgctgatggagcgccagaattgaagatagagagtctgaattcaaaggccaagctgcatgctgcactttacgagaggaagctcctgtctctggaggtgcgaaaacgtagacgacggagtagcagattgagggcaatgaggccaaaatacccagtgattacccaaccagctgaaatgaatgttaaaactgagacagagagtgaagaggaggaagaagtcgcattagataatgaagatgaagaacaggaggcttcccaggaggagtctgcaggatttcttagagaaaatcaagccaaatatacaccctcattgacagctttggtagaaaatacacccaaagaaaattccatgaaagttcgtgaatggaataataaaggtggacactgctgcaaacttgagactcaggagctagagcctaaatttaacctgatgcagattcttcaagataatggcaatcttagcaaaatgcaggcccgaatagcattctctgcctatctccagcatgttcaaattcgcctgatgaaagacagtggcggtcagacgttcagtgccagttgggctgccaaagaggatgaacagatggagctggttgttcgtttcctcaagcgagcatcaaataacctccagcattcactgaggatggtattacccagtcgacgattggcacttctggaacgcagaagaatcctggcccaccagctgggtgactttatcattgtatacaacaaggaaacagaacaaatggctgaaaagaaatcaaagaagaaagttgaggaagaagaggaagatggggtgaatatggaaaactttcaggagttcatcagacaagcaagtgaggctgaactggaggaggtgttgactttttatacccaaaagaacaagtctgctagtgtcttcctggggactcactctaaaatttctaagaacaacaacaattattctgatagtggggcaaaaggtgatcaccctgagactataatggaagaagtgaaaataaagccacctaaacagcaacagacgacagaaattcattctgataaattatctcgatttaccacttcagcagaaaaagaggcaaaattagtttatagcaattcctcctctggtcctactgctactctgcagaaaattcccaacacccatttgtcatctgttacaacctctgacctctctccagggccttgccaccattcttctttatctcaaattccttcagctatccccagcatgcctcaccagccaacaattttactgaacacagtctctgccagtgcttctccctgcctacatcccggggcacagaacatcccaagccctactggcctgccacgctgtcgatcaggaagtcacaccattggtcccttttcttccttccaaagtgctgcacacatctatagccagaaactgtctcgtccctcttcagcaaaggcaggatcgtgctatctaaacaagcatcattcaggaatagccaaaacacaaaaagagggagaagatgcttctttatatagcaaacggtacaaccaaagtatggttacagctgaacttcagcggctagctgagaagcaggcagcgagacagtattctccatccagccacatcaacctcctcacccaacaggtaacaaacctgaatttggcaactggcatcataaacagaagcagtgcttcagctcccccaaccctccgacccatcatcagtcctagtggcccgacatggtctacacagtcagacccccaagctcccgagaatcactccagctctcctggaagcaggagcctgcagacagggggatttgcctgggaaggagaagtagaaaacaacgtgtacagccaggctacaggggtggtcccccagcacaagtatcaccccacagcaggcagctatcagcttcaatttgccctgcagcaacttgaacaacaaaaacttcagtcccggcagctcctggaccagagtcgagcccggcaccaggcaatctttggcagccagacactacctaactccaatttatggacaatgaataatggtgcaggttgtagaatttccagtgccacagctagtggccagaagccaaccactctgccacaaaaagtggtaccacctccaagttcttgcgcctccctggttcccaaacccccacccaaccacgaacaagtgctcagaagggcaacatcccagaaagcttccaatacccgcttcagatcctcctttcaaaactatttgtggtatttcttccaagcagtcagctgaactgaggacgacagcctacaaacaactacatgcatctgaactgtctcttgtaaatgagcttttttcagagccagaatcatactctccaggaaatatggagaaagaaacctgaggagattgaagtttgccaggcacaagggcaaaactcagactgaatgaatttgaaagggtggggccaaagatgttgtaacctgggagacttctctgaagaaagaaaactgtttaagaaacacagactgaactgcagtacttttccttaaatagctgagatgaccttctttaccctgggcttaggtgattctcatcagggtgacctgagtggaagttggtggtaacgactgttctgtgtcagcacccaggacagtggtgtctgttaaggctgccagggattagcagggaggaaagccatcaggactgggtagcctggtagcaccaaatcccaattaatgttacctgaacatgtggtgaggtcagccgtatgatgaaagatgtttaagagattaatgtcagaagaatatgaaaataaacaccggcttaaaaaatgtta

SEQ ID NO: 22595 - DNA, 2624 bp, Homo sapiens
  misc_feature 1..2624: note = ENST00000554510
  source 1..2624: mol_type = unassigned DNA; mol_type = unassigned DNA
agatcaaagttttacgaagggtgaaggaggagaatgatcggcgaggtggatttattcgcatatttcctacatctgagacatgggaaatatatgggtcctacctcgagcataagacctcaatgaactatatgctggcaacacgcctcttccaggacaggggaaacccaagaagaagcttattgacaggaagaacacgaatgactgctgatggagcgccagaattgaagatagagagtctgaattcaaaggccaagctgcatgctgcactttacgagaggaagctcctgtctctggaggtgcgaaaacgtagacgacggagtagcagattgagggcaatgaggccaaaatacccagtgattacccaaccagctgaaatgaatgttaaaactgagacagagagtgaagaggaggaagaagtcgcattagataatgaagatgaagaacaggaggcttcccaggaggagtctgcaggatttcttagagaaaatcaagccaaatatacaccctcattgacagctttggtagaaaatacacccaaagaaaattccatgaaagttcgtgaatggaataataaaggtggacactgctgcaaacttgagactcaggagctagagcctaaatttaacctgatgcagattcttcaagataatggcaatcttagcaaaatgcaggcccgaatagcattctctgcctatctccagcatgttcaaattcgcctgatgaaagacagtggcggtcagacgttcagtgccagttgggctgccaaagaggatgaacagatggagctggttgttcgtttcctcaagcgagcatcaaataacctccagcattcactgaggatggtattacccagtcgacgattggcacttctggaacgcagaagaatcctggcccaccagctgggtgactttatcattgtatacaacaaggaaacagaacaaatggctgaaaagaaatcaaagaagaaagttgaggaagaagaggaagatggggtgaatatggaaaactttcaggagttcatcagacaagcaagtgaggctgaactggaggaggtgttgactttttatacccaaaagaacaagtctgctagtgtcttcctggggactcactctaaaatttctaagaacaacaacaattattctgatagtggggcaaaaggtgatcaccctgagactataatggaagaagtgaaaataaagccacctaaacagcaacagacgacagaaattcattctgataaattatctcgatttaccacttcagcagaaaaagaggcaaaattagtttatagcaattcctcctctggtcctactgctactctgcagaaaattcccaacacccatttgtcatctgttacaacctctgacctctctccagggccttgccaccattcttctttatctcaaattccttcagctatccccagcatgcctcaccagccaacaattttactgaacacagtctctgccagtgcttctccctgcctacatcccggggcacagaacatcccaagccctactggcctgccacgctgtcgatcaggaagtcacaccattggtcccttttcttccttccaaagtgctgcacacatctatagccagaaactgtctcgtccctcttcagcaaaggcaggatcgtgctatctaaacaagcatcattcaggaatagccaaaacacaaaaagagggagaagatgcttctttatatagcaaacggtacaaccaaagtatggttacagctgaacttcagcggctagctgagaagcaggcagcgagacagtattctccatccagccacatcaacctcctcacccaacaggtaacaaacctgaatttggcaactggcatcataaacagaagcagtgcttcagctcccccaaccctccgacccatcatcagtcctagtggcccgacatggtctacacagtcagacccccaagctcccgagaatcactccagctctcctggaagcaggagcctgcagacagggggatttgcctgggaaggagaagtagaaaacaacgtgtacagccaggctacaggggtggtcccccagcacaagtatcaccccacagcaggcagctatcagcttcaatttgccctgcagcaacttgaacaacaaaaacttcagtcccggcagctcctggaccagagtcgagcccggcaccaggcaatctttggcagccagacactacctaactccaatttatggacaatgaataatggtgcaggttgtagaatttccagtgccacagctagtggccagaagccaaccactctgccacaaaaagtggtaccacctccaagttcttgcgcctccctggttcccaaacccccacccaaccacgaacaagtgctcagaagggcaacatcccagaaagcttccaatacccgcttcagatcctcctttcaaaactatttgtggtatttcttccaagcagtcagctgaactgaggacgacagcctacaaacaactacatgcatctgaactgtctcttgtaaatgagcttttttcagagccagaatcatactctccaggaaatatggagaaagaaacctgaggagattgaagtttgccaggcacaagggcaaaactcagactgaatgaatttgaaagggtggggcc

SEQ ID NO: 22596 - DNA, 339 bp, Homo sapiens
  misc_feature 1..339: note = ENST00000555018
  source 1..339: mol_type = unassigned DNA; mol_type = unassigned DNA
aacctcctcacccaacaggtaacaaacctgaatttggcaactggcatcataaacagaagcagtgcttcagctcccccaaccctccgacccatcatcagtcctagtggcccgacatggtctacacagtcagacccccaagctcccgagaatcactccagctctcctggaagcagtttcatataactgaactcaaacaacctcgctgaacaatgctcatttgggaagtgggaaggaaatttcctttatgtagttgagagatgtggctaaagataaaatccacgtagcttctggcaataatgtaagcagcttccaaattaaaaaagaaaccactgtattgaa

SEQ ID NO: 22597 - DNA, 431 bp, Homo sapiens
  misc_feature 1..431: note = ENST00000608522
  source 1..431: mol_type = unassigned DNA; mol_type = unassigned DNA
ggaccactcaggtagcttgaagaggatggatttggaggatgaggcagtgccactcctttttcctccatgctcgctggtgaagataatgaggaacagtgaactagctaaaggtaacaaacctgaatttggcaactggcatcataaacagaagcagtgcttcagctcccccaaccctccgacccatcatcagtcctagtggcccgacatggtctacacagtcagacccccaagctcccgagaatcactccagctctcctggaagcagtttcatataactgaactcaaacaacctcgctgaacaatgctcatttgggaagtgggaaggaaatttcctttatgtagttgagagatgtggctaaagataaaatccacgtagcttctggcaataatgtaagcagcttccaaattaaaaaagaaaccactgtattgaa

SEQ ID NO: 22598 - DNA, 547 bp, Homo sapiens
  misc_feature 1..547: note = ENST00000557219
  source 1..547: mol_type = unassigned DNA; mol_type = unassigned DNA
atttatggacaatgaataatggtgcaggttgtagaatttccagtgccacagctagtggccagaagccaaccactctgccacaaaaagtggtaccacctccaagttcttgcgcctccctggttcccaaacccccacccaaccacgaacaagtgctcagaagggcaacatcccagaaagcttccaaagggtcctccgcggaagggcagctgaatggactccagagcagccttaaccctgcagcctttgtgcccatcaccagctctacaggttagtgggcaccagctcttctgcaactggatagatgacagggaaggtgttgggcttggcacattctctcttctgcctccaaagagagccccagttcaaagaatgaaacatctagcctctcaaaacattggcaaatgggcatttttgttgcattcttctttaaaatagtcttggcagcctaaaataggcattttctggaactagcttggggtaaatgaaacctcgccatcttataaaatgctgtcagatttgcagcatttaatacagatgtcccatattg

SEQ ID NO: 22599 - DNA, 719 bp, Homo sapiens
  misc_feature 1..719: note = ENST00000554972
  source 1..719: mol_type = unassigned DNA; mol_type = unassigned DNA
gccacaaaaagtggtaccacctccaagttcttgcgcctccctggttcccaaacccccacccaaccacgaacaagtgctcagaagggcaacatcccagaaagcttccaaagggtcctccgcggaagggcagctgaatggactccagagcagccttaaccctgcagcctttgtgcccatcaccagctctacaggatctttggatactccccaagttattttcgccacatccaaacccttgcccacacaatctgaagcccttgctacagttataggacagagaaaatcaaagtcggtgaagtcagggccaatttaagatcctgctcacactaaaatatgaaccacaaacacacagagaaacaacctgttcaccactcctgggtgcatgattgagggtgaagcatccaccagcacttcaaggggtccatagtatttttttttttgctgcctcaaagtccccaaagccttcgagcagaagtggcagtagatggttgccaatcagccaatgcagactttcactgggacaacaagaaagcagatcttctgggttttgatggaacttggcagtggggacattcagctgatgcattatataccccgtcagagcacacttgtatcttttaccttccctttgccccatgcccccaaactgcttaggtcttctctgtccctttactgctgctgcacagagatgatataaaagaggctctttggctatttgc

SEQ ID NO: 22600 - DNA, 556 bp, Homo sapiens
  misc_feature 1..556: note = ENST00000554487
  source 1..556: mol_type = unassigned DNA; mol_type = unassigned DNA
agagggtcctccgcggaagggcagctgaatggactccagagcagccttaaccctgcagcctttgtgcccatcaccagctctacagaatgttgccagaagatactaccagggctgcccagatcagttggaaaggccttagggacaaatctttaagagatcctgctcacactaaaatatgaaccacaaacacacagagaaacaacctgttcaccactcctgggtgcatgattgagggtgaagcatccaccagcacttcaaggggtccatagtatttttttttttgctgcctcaaagtccccaaagccttcgagcagaagtggcagtagatggttgccaatcagccaatgcagactttcactgggacaacaagaaagcagatcttctgggttttgatggaacttggcagtggggacattcagctgatgcattatataccccgtcagagcacacttgtatcttttaccttccctttgccccatgcccccaaactgcttaggtcttctctgtccctttactgctgctgcacagagatgatataaaagaggctctttggcta

SEQ ID NO: 22601 - DNA, 689 bp, Homo sapiens
  misc_feature 1..689: note = ENST00000556685
  source 1..689: mol_type = unassigned DNA; mol_type = unassigned DNA
agtggctccgagcgggcggttgcttgttggttgttgtagtaaccggggaagcagccgtcggcggctgccctgagccttcctggggaaggaggagggaggtaggcgcagagcgcggtccacgcctgctcgccccgaaccatgggaagatgagacaggtaaacgcctgcgcccgcgcgcttccctaccctagggaggagcattcccgggtccgggctggcgcctgcagcaggacttcccgctcagagcccgggagtagctgttggcttccgggcgcgccgcgttgaatcgcggctgcggggtcgtcccgtccttcccggggggagcatctgcggacctacgtgggattggggtgagctgggggtggggctgagaagcagattcctttcgggagaggagtctccttaggaatctgtgccatccaaattgcttgatccagtgaatctgctaggaaaggtctctgaggcccccgtctgctgactgcatgacaaaccctaaaggaaatgccaatcgtgatggcccgggacctggaggaaacagcatcatcctcagaggatgaggaggtcataagtcaagaggatcatccatgcatcatgtggactggaggctgcaggagaattccagttttggtattccatgccgacgctattcttacaaaggacaacaatattagagtaattggaggtgcgtat

SEQ ID NO: 22602 - DNA, 1961 bp, Homo sapiens
  misc_feature 1..1961: note = ENST00000556977
  source 1..1961: mol_type = unassigned DNA; mol_type = unassigned DNA
cgcctgcgcagtggctccgagcgggcggttgcttgttggttgttgtagtaaccggggaagcagccgtcggcggctgccctgagccttcctggggaaggaggagggaggtaggcgcagagcgcggtccacgcctgctcgccccgaaccatgggaagatgagacaggaatctgtgccatccaaattgcttgatccagtgaatctgctaggaaaggtctctgaggcccccgtctgctgactgcatgacaaaccctaaaggaaatgccaatcgtgatggcccgggacctggaggaaacagcatcatcctcagaggatgaggaggtcataagtcaagaggatcatccatgcatcatgtggactggaggctgcaggagaattccagttttggtattccatgccgacgctattcttacaaaggacaacaatattagagtaattggagaacgttatcatttgtcttataagattgtacgaacggacagtcgcctagtacgcagcattctgacagcccatggatttcatgaagttcacccaagcagcactgactataacctaatgtggacaggatcccacctgaagcccttcttactgcgcaccctctctgaagcacaaaaagttaatcactttcccaggtaatgctctttgtagctgctttgcttcatttaaaggtacatgacattggggcatgtagccagcaaaggtaattagtgtccttaaagaagaggaagatgaaaatgaagaagaagaaggacttttttttttttttttgagatgagtatcgctctgtcacccaggctggagtgcagtggcatgatcttggctcactgcaacctctgcctcctgagttcaagcaattctcctgcctcagcctacccagtagctgggaatacaagcttgcaccaccatgcccggctaatttttgtatctttgggagagacgaggtttcgccatgtaggccaggctggtctcaaactcctgacctcaattgatctgcctgccttggcctcccaaagtgctgggattacagacatgagccaccacgcccggccagaagaagaaatttttctggtacggaacagcactctgcaaatcaaactgttgtgttcatatccctgagcatgaatgaacactttctaagggctatatagacatggatggttttaaaggagatagtttctggttctctttcctaaagttgagctgcttgggagtacctcatgaggatgggtttgcctttcttacttccccttcacagttactgttttttcacttttattaaagaatggctcacctagaatcttagtctggtatattgtccttaggtgtagaaattttcagggttccaaagaaaggtagaaaaaaattagtgtctaatttaattctagtaatagcataacaaatcctttttgcatgatggtagtttctatttctttgtttttaaaataattgaaggatgatataatctagctattagctgatcattaaacataattttgatgacagatcattttataattttttgatgtgtaattaggaaggagttcacagagttgagcgtcattggtgtttggatgaattgtatactacaatacttgcaatgataatcagtcatgtatatataaacagttatagccttacggtcacagggaattaaaaatatatgccaattcctatgtataattttgctgtacagaaggtatgatatgatgtaaaagacaagtattaaatacgttaggctaacctgttgtttgtgggaaatgaaagaattaaaaacaagagtgactgggggatagtgtctgtgtggcagtctgagggaggcttttctggcatgctgggaatgttctatacagaacttgagtggtggctacacagttgtgttcactttgtaaaaattcattatgccctgccgtgttctttgtatacttttctgtacatacgttaacttcattaaaaagcatatttt

SEQ ID NO: 22603 - DNA, 286 bp, Homo sapiens
  misc_feature 1..286: note = ENST00000556265
  source 1..286: mol_type = unassigned DNA; mol_type = unassigned DNA
tcaggtctgaatgctggtgctttttatgccttgtccactcttctgaatcgcatggtgatctggcactacccgggggaagaagtgaatgctggaagaattggcctgacgatcgtcattgcaggaatgcttggggctgtgatctcaggaatctggctggataggtccaaaacctacaagaatctgtgccatccaaattgcttgatccagtgaatctgctaggaaaggtctctgaggcccccgtctgctgactgcatgacaaaccctaaaggaaatgccaatcgtgatg

SEQ ID NO: 22604 - DNA, 182 bp, Homo sapiens
  misc_feature 1..182: note = ENST00000554132
  source 1..182: mol_type = unassigned DNA; mol_type = unassigned DNA
tcaggtctgaatgctggtgctttttatgccttgtccactcttctgaatcgcatggtgatctggcactacccggaatctgtgccatccaaattgcttgatccagtgaatctgctaggaaaggtctctgaggcccccgtctgctgactgcatgacaaaccctaaaggaaatgccaatcgtgatg

SEQ ID NO: 22605 - DNA, 592 bp, Homo sapiens
  misc_feature 1..592: note = ENST00000555290
  source 1..592: mol_type = unassigned DNA; mol_type = unassigned DNA
aatcagcggttgccgctgcctaagcctctccccaggaatctgtgccatccaaattgcttgatccagtgaatctgctaggaaaggtctctgaggcccccgtctgctgactgcatgacaaaccctaaaggaaatgccaatcgtgatggcccgggacctggaggaaacagcatcatcctcagaggatgaggaggtcataagtcaagaggatcatccatgcatcatgtggactggaggctgcaggagaattccagttttggtattccatgccgacgctattcttacaaaggacaacaatattagagtaattggagaacgttatcatttgtcttataagattgtacgaacggacagtcgcctagtacgcagcattctgacagcccatggatttcatgaagttcacccaagcagcactgactataacctaatgtggacaggatcccacctgaagcccttcttactgcgcaccctctctgaagcacaaaaagttaatcactttcccaggtcttatgaacttacccggaaggaccgactgtacaaaaacattattcgaatgcagcatacacatggattcaaggcttttcacatcctcccc

SEQ ID NO: 22606 - DNA, 283 bp, Homo sapiens
  misc_feature 1..283: note = ENST00000521138
  source 1..283: mol_type = unassigned DNA; mol_type = unassigned DNA
agctgcggccgcagcagcggcggcgggcatggcagaggcgcgatcccagccctcggcggggccgcagctcaacgcgctaccggaccactctccgttgctgcagccgggcctggcggcgctgcggcgccgggcccgggaagctggcgtcccgctcgcgccgctgccgctcaccgactccttcctgctgcggttcctgcgcgcccgggatttcgatctggacctggcctggcgggctggagtgcaatggcgtgatctcagctcaccgcaacctccgcctcccagg

SEQ ID NO: 22607 - DNA, 2338 bp, Homo sapiens
  misc_feature 1..2338: note = ENST00000260116
  source 1..2338: mol_type = unassigned DNA; mol_type = unassigned DNA
gggtagctgcggccgcagcagcggcggcgggcatggcagaggcgcgatcccagccctcggcggggccgcagctcaacgcgctaccggaccactctccgttgctgcagccgggcctggcggcgctgcggcgccgggcccgggaagctggcgtcccgctcgcgccgctgccgctcaccgactccttcctgctgcggttcctgcgcgcccgggatttcgatctggacctggcctggcggttactaaaaaactattataagtggagagcagaatgtccagaaataagtgcagatctacaccctagaagtattattggcctcctaaaggctggctaccatggagtcctgagatccagggatcccactggcagcaaagttcttatttacagaatcgcacactgggaccccaaagtttttacagcttatgacgtatttcgagtaagtctaatcacatccgagcttattgtacaggaggtagaaactcagcggaatggaatcaaggctatctttgatctggaaggttggcagttttctcatgcttttcaaatcactccatccgtagccaagaagattgctgctgtacttacggattcatttccattgaaagttcgtggcatccatttgataaatgaaccagtaattttccatgctgtcttttccatgatcaaaccattcctgactgaaaaaattaaggaacggattcacatgcatgggaacaactacaaacaaagcttgcttcagcatttcccagacattcttcctctggaatatggtggtgaagaattctccatggaggacatttgtcaggaatggacaaattttataatgaagtctgaagattatctcagcagcatttctgagagcattcaatgagaagttatgtcatgtgaatggcttcctaactaaaaatacatgagtgatatccaacctggttaaatgaatgaaagaaaaggagcaaatcttttaaactaatgcttgcctgaactttaaaaatgtagaaatcttctgacatgagcaacacaggtgtttggaaagattttttactttttaaatgcttttttctctacttttgaagtaattaaatgtcagtacattttaagagcataaaaatcggcgattttgtacttgaagagaacatgaaagttattgctaaagtagctgctcatgtgcatctttgtatgtttctagaaagttatattttaaacaagttctctgattaaattggtttagaaaaaaatttagaaatattccgcttaaaaatactagcacaagtcagctaatgataaaaaaattaacacttgttttaagtggatgtcagattaaattataattcattataattaaaatctgaatagagttttatggttattcctgtggaccagcaagacatttcatctcagggaaattttattttagtatattaacacgatagaaactttttttttttttttcagacagagtcttgctctgtcgcccaggctagagtgcagtagtgagatctcagctcactgcaacctctgctaggattacatgtgcacaccaccactcctggctaagttttgtattttatatagagatggggttttgccacgttggccaagctggtctcaaactcctgaactcaagtaatttgcctgcttcggcctcccagagtcctgggattacagtcgtgagccatcgcgcctggccgtgatagaaactttcagctgaggagtctatatgccatactactctatgtggcatctttaggtctctgtgaaatcatgttgatgtaattgattaacaaaaataatttagaaaatacgtcaggcacagttgatggcttctcaatatctgctttgcatttttaaacaaatcaagaatgtaattttaacttttgcttatggtcattcttatgactacacggaaagggatggaatcatacttacttgtcttatacatggactgtttttagttaacaataacgtaactacacaaaggaaaggaaatgtttacattttaaaaaattactgtcaattacatctggtatttttcagattatgcataaaataatatgagtttgactattgtatcagaatattttaatcaaatcctgcaatttatattaacttaaaaaaacatctggtaaagactgggtgtggcagctcacacctgtaatcccagcactttgggaggccgaggctggatggatgattgcttgagcgcaggagttctagaccagcctgggcaatacagggagaccctgtctctatttcaaaaataaataaataggccccggtgtgtgatgttccccttcctgtgtccatgtgttctcaaaaaaaattaaaaaataaaaataaaaa

SEQ ID NO: 22608 - DNA, 1628 bp, Homo sapiens
  misc_feature 1..1628: note = ENST00000455084
  source 1..1628: mol_type = unassigned DNA; mol_type = unassigned DNA
agggcagtgaacctaagccaggagctgcttaggcattaaggcttctatacccagaatcgtgtgctaagctttctctccaagtcagcacaacaaagcaaaccagagcatcgtaccaacaacctgaaaggtcacctgactccttccttctcactcccattctgtacttctgcatacgtgggcaggcaagtgaatggtaagtaagcctgcaaacagcctttctttgtatagggaatgacaggcatttcatcagcaactccaggatggcaggccgttatcctgaaacctatcagaacagctcctgcttggcttccaaaatatcacaattttggaaatgtacaaaggttagttttcacagtccttgaagcctctttccaccctggccatagcccatgtcagcagtaacctatgtctttgttttacatatcatgttgttttactcacctggtgcctccagtgccctatagggtccctgagctgtcctgatactctttcttagatcctgtcaaaacactcacttcaacaaattctgcccttggactctgatgggaggttctgataaagaaaattattgaaaaccgcattatttaaatgtggttatatttcagctggacctggaaataaagacgaaatactgcttcgtgactgtgctttaaggaatttttgcttctaggagatgattgtgagccaggcagaggtgaaggagcaggagcaaatagccaaggcacagttcacagtgctggattttcttgtggatatagctgcattgttgttccttctgccttgtccaactgcttcctggtatccctaccctcaccttttcgttatcttttcatctctctaatcattgagaaaaagagtacaaaaagccagattttgcagttccctattttgtattccaggttgaagagtgctctggctgtagagggtccccacgatctgtcatctagtaactcaccagatacataagatattttgcctgctatgaagccattggagaatcaggtccagctgtgtcctacagatttataccctcactttggatgcactgtgaatcttgaaacaattcattttatacttaaccctttaagtataaagtatatacttcaagtataaagtgtaaggttgcttcatttcatgggcccacccaggatttaaaggtgtattccctgaaagaattggttccttccggtgggttcctggctgacttcaagaatgaagctgcagacacttatggactgggaggaggcccacgagaaaaacaggaagaacaagagaaaggctgaggctctagtggctgctttgcagacttgcagagtccaggatcccccaggaacttccactgattgctacctgttaccagtgttaaagccagggcactttaagaagaattgcccaagccacaagaaaaagccaccttgaccacttttgtggtgaagaccactggagattgcactactgaccaccaagacagagacacaatagcgaatctagaagtggaagtgtgagagatacctgcagctgttaagatgtctgggaatagacacacaaactctctctcccagataagcaacacaaagcagcacagagcaacagagactgaaagtctgcctacctgatcagggaataag

SEQ ID NO: 22609 - DNA, 340 bp, Homo sapiens
  misc_feature 1..340: note = ENST00000439472
  source 1..340: mol_type = unassigned DNA; mol_type = unassigned DNA
ttatcttttcatctctctaatcattgagaaaaagagtacaaaaagccagattttgcagttccctattttgtattccaggttgaagagtgctctggctgtagagggtccccacgatctgtcatctagtaactcaccagatacataagatattttgcctgctatgaagccattggagaatcaggtccagctgtgtcctacagatttataccctcactttggatgcactgtgaatcttgaaacaagtatgtaaatagaatccagcccctctctgccacagcctcagagcaggattggtaactccaaaagacaccaggacacatcctaattttcttaaatttta

SEQ ID NO: 22610 - DNA, 1495 bp, Homo sapiens
  misc_feature 1..1495: note = ENST00000324446
  source 1..1495: mol_type = unassigned DNA; mol_type = unassigned DNA
caaaagcaacccttcttgctccaggcatgtgcaggaggttttttggtttcagcattttgttgcatgctgactatgtcctttaccttctcttaaattatgtatcaattcatgctggtttattcacttcctgatgtctatatgaagaggctgtctgccaacatctttcatcactctgcctgcaactatgaaaaatttagttctaaaaaatgcaaccttgctaaattgagtactaataggattggttcaattatgttctatgtctgttccatattgacattgtgtgcatctttgccatgcaggctttttaggaattatcgcatctctaacttcccacgagtgtttatgaaaatgtttagatttaaagaactttattgctttagacagaataaggcatgcagttctaacagaaagatccatgaattccagaaatatcactgaaaattattgacatttaagattattttctgtttgttactatggttcacaattcaagaataactctggccaggtgcagtagctcacaccctgtaatcccagcactttgggaggctgaggtaggcagatcacttgagctcaagagttcaagaccagcctgggaaacatggcaaactcccaccattacaaaaaaatacaaaaattagttggtcatggtggtgttcacctatagtcccagtgacttgggaggctgggatgggaggatctcttgagcccaggagatgcaggcttgcagtgagccatgatcatgccactgtactgcagactgggtgaaacagcaagatcttgtctgaaaagaaaaaaaaaagtaaaagaaaaagaaaagaaaataactcccattgctaaagacatatatgcttatcaggttaagataaagtgaattttgttcttcccaatgacatttcaggatatttgttcacaggaaagaacatgttgggaattggtactggctagaaatttctgttgagtatttattaccccatggtaataatggtaaaccacagtttagaaagattttttttttgacagccacagcatgttccgaagagatgattggaagatggaagtggagggttaaataatgaaatgcagctaacatttcggaaagtttctaaaagttgtacaacatgccctacagctactctttaaatctccaaatcaaatgagtttcaggtggagcctctgggaggtgatgaggtcatgagagtggagcctcatgaatgggatgagcactcctacaaaaaggattccagagagctcgcttgctccttccacagtgtgaggacacagagggaaggctctgtctatgaatgagaaagtgggtccccaccagacattgaatctgccgcatcttgatactggacttccagtctccagaactgtgggcaataaatgtctgttgtttattacctgtccagtatctttggtattttgctatagcaacccaaatggactaagaaaacaccagaggccatacctaataaaaatattgacatcacaa

SEQ ID NO: 22611 - DNA, 544 bp, Homo sapiens
  misc_feature 1..544: note = ENST00000454875
  source 1..544: mol_type = unassigned DNA; mol_type = unassigned DNA
cgccacgggctgcatgggcagcgctcgcgccccgccgctgagccgccggggagccgtccagtcttcgaatcccaccacagcatgttccgaagagatgattggaagatggaagtggagggttaaataatgaaatgcagctaacatttcggaaagtttctaaaagttgtacaacatgccctacagctactctttaaatctccaaatcaaatgagtttcaggtggagcctctgggaggtgatgaggtcatgagagtggagcctcatgaatgggatgagcactcctacaaaaaggattccagagagctcgcttgctccttccacagtgtgaggacacagagggaaggctctgtctatgaatgagaaagtgggtccccaccagacattgaatctgccgcatcttgatactggacttccagtctccagaactgtgggcaataaatgtctgttgtttattacctgtccagtatctttggtattttgctatagcaacccaaatggactaagaaaacaccagaggccatacctaataaaaatattgacatcac

SEQ ID NO: 22612 - DNA, 860 bp, Homo sapiens
  misc_feature 1..860: note = ENST00000452584
  source 1..860: mol_type = unassigned DNA; mol_type = unassigned DNA
gaggaaagcggcggcggtggcggcttcaacagcagctcttgcccttaaggaacaatgaaacacaaagatggtgcagacccaggccctgctttgactgggagaaagatgcattcagttgactaaaacttgaacagggcagtttacttctatagaagggtgcaccctcacagatggaccaatgtgtcaggagaattcagtcacacccaaagcaggaggtaataagacaccgaagtgaggacttcacaggctgcttgggagaagacaatcatccgtgggcttgggaaagggagaaatgcctactgagtttagggaattgcttgctggaagaaatgatggcttggtggcatgcatgtttagtcccagctacacagcagggaggctgaggctgaaggaatacttgagcccaggaattcaagactagcctgcacaacatagtgagaccctgactttaaaataaatttaaaaaaattaaaagcaacaagactttctgcttgtatatgatgatgttagtatgctgacttacaaggttagatcattttgatatgtgtgatgtaggttttcaaagctggcactgttttatgcttcaaatattatttttattcattggttctcatgggatttcatcactaagctgtaaatcaataatcataatgttgaggggaggggattacaaaatagctcttcaaaatcatctttgcatttctcaataaacagcattcccttttggactacagtgaaaaatattgagctttgtttactttgaaaatgagtcttagtctatgaatgcctgggtagggtcaagaatgaaaaatgagaggaagagagaagcatcaggaagataaaatgatcaatctcacaaa

SEQ ID NO: 22613 - DNA, 515 bp, Homo sapiens
  misc_feature 1..515: note = ENST00000331787
  source 1..515: mol_type = unassigned DNA; mol_type = unassigned DNA
ggggcgggccaatggctgtgacggataaggggtgtggggtgcggggacaatgggccagagcttctcatgcagcctgcaccagcgccgggtcggagagtcagaggccaccctgagatggaccgagatcttcagttggggaggcgcctccggtgagcttgcggccagatgccccctcagtagtcctccgcaacaggtgccgcgcagccgagtggcgggctagcataccgcctgcccgcaattcggccaggcctcgagcctgctccgccttcccgctgcggtagcgccgccggggaaacgccgccacgggctgcatgggcagcgctcgcgccccgccgctgagccgccggggagccgtccagtcttcgaatcccagcttggtggcatgcatgtttagtcccagctacacagcagggaggctgaggctgaaggaatacttgagcccaggaattcaagactagcctgcacaacatagtgagaccctgactttaaaataaatttaaaaaaattaaaagcaa

SEQ ID NO: 22614 - DNA, 920 bp, Homo sapiens
  misc_feature 1..920: note = ENST00000447937
  source 1..920: mol_type = unassigned DNA; mol_type = unassigned DNA
cggataaggggtgtggggtgcggggacaatgggccagagcttctcatgcagcctgcaccagcgccgggtcggagagtcagaggccaccctgagatggaccgagatcttcagttggggaggcgcctccggtgagcttgcggccagatgccccctcagtagtcctccgcaacaggtgccgcgcagccgagtggcgggctagcataccgcctgcccgcaattcggccaggcctcgagcctgctccgccttcccgctgcggtagcgccgccggggaaacgccgccacgggctgcatgggcagcgctcgcgccccgccgctgagccgccggggagccgtccagtcttcgaatcccagaaacacaaagatggtgcagacccaggccctgctttgactgggagaaagatgcattcagttgactaaaacttgaacggtcggctccaccagtgcaaggattgtgcctgtcctcttcccgggctgatcttcccctgtgcctggaacagcacctgctatataaattatgtgctggatacacacactcgaaaagcaagagatcaggctccctgagaaaggcagtttacttctatagaagggtgcaccctcacagatggaccaatgtgtcaggagaattcagtcacacccaaagcaggagatgcgggaggccagatgcgcaagatggacactcggctcctccttcgtccccgcctctcctcgcttccagggtagcagcctcaacaagggaaactattgttccagtggaggctgcgaggatgtcggtgatttacgcgccgagctgtagctgcaaaaggacaagggcaagtgccggcccgacctagggcccaccggtctctggcttgctcttgtgagtaggtgcaccctgcccgcttgtggtggcctcaggggtaagaaatcaggacccacccag

SEQ ID NO: 22615 - DNA, 471 bp, Homo sapiens
  misc_feature 1..471: note = ENST00000610801
  source 1..471: mol_type = unassigned DNA; mol_type = unassigned DNA
ggggcgggccaatggctgtgacggataaggggtgtggggtgcggggacaatgggccagagcttctcatgcagcctgcaccagcgccgggtcggagagtcagaggccaccctgagatggaccgagatcttcagttggggaggcgcctccggtgagcttgcggccagatgccccctcagtagtcctccgcaacaggtgccgcgcagccgagtggcgggctagcataccgcctgcccgcaattcggccaggcctcgagcctgctccgccttcccgctgcggtagcgccgccggggaaacgccgccacgggctgcatgggcagcgctcgcgccccgccgctgagccgccggggagccgtccagtcttcgaatcccagtaagagacgccgctggcctagggacagtggttggggctggcccggggcattcgcgcggccttgcagcctgcaggccttcccagccgacagagctgctg

SEQ ID NO: 22616 - DNA, 630 bp, Homo sapiens
  misc_feature 1..630: note = ENST00000457658
  source 1..630: mol_type = unassigned DNA; mol_type = unassigned DNA
tttttttttttttttttgtcagccgggttcaatgcgccatattgaagaggacgggtctaatagatcgctggagacacaatttaactgaaccccgcccgttgtggactgactttgatgctctgagtccctccctccttcacgccgctagcaggccctgatgtagattgcctttgtcttacttgggacgtttacctgagcgcttggtgctggtgtcgggaccgggagataggagtgtctcaggagagacctggccgaaaaccgcgagaaagaaaagtgaagcctagtgaaactgcctttgcagtgactcaagaaaaactcatcacctggagtccgtgtaagctcggcgacagccctagcagcgaggccaaaacagtttgggaagaaagaaaacctaaagtatttgccgttggtgattcaagggaatcaaacttgacgtatggagccaagaaagcccttggaaaaactggcctcatattttgtgtacacagtccctgtacagggtttctgacctgtgttcagtctttacagaagctgacgagagatttccttgtattttatggtggtatgattggccttagagcacttcagttttgagatctctgctgtatttgtatacaagtattttggaag

SEQ ID NO: 22617 - DNA, 5284 bp, Homo sapiens
  misc_feature 1..5284: note = ENST00000440408
  source 1..5284: mol_type = unassigned DNA; mol_type = unassigned DNA
tttttttttttttttttgtcagccgggttcaatgcgccatattgaagaggacgggtctaatagatcgctggagacacaatttaactgaaccccgcccgttgtggactgactttgatgctctgagtccctccctccttcacgccgctagcaggccctgatgtagattgcctttgtcttacttgggacgtttacctgagcgcttggtgctggtgtcgggaccgggagataggagtgtctcaggagagacctggccgaaaaccgcgagaaagaaaagtgaagcctagtgaaactgcctttgcagtgactcaagaaaaactcatcacctggagtccgtgtaagctcggcgacagccctagcagcgaggccaaaacagtttgggaagaaagaaaacctaaagtatttgccgttggtgattcaagggaatcaaacttgacgtatggagccaagaaagcccttggaaaaactggcctcatattttgtgtacacagtccctgtacagggtttctgacctgtgagtcactgaaaactaagctgcgctttcctaaagtcctgcgaactgaagccagacaacttaaacctcagaagaaaataacagcaacctatttatatacataagccactttcatacctgcctactgttgtatagacttcagagtaatgtggcctgtatcgattttccaggagtattcttttgtgtgttgttttttctcaattcctcctattttctctttacaggatgtgagacttcacaacctgctaaaaatgagctttcaggacctacccatataggaataaaccatcctagccatgagagatcagatgaaacctgagaccagagagactcatttgtttcaaaatagtttctccaaaagattttataaaagaaaaggctggggggagtgggatatgaaaggaaaatgaatcttggggcccccaaatcactaagctcaagggataagtcaagttagaaactgttcagggccaacttaccttgcattctattcaaattcacccctctgctcacttagatgcatatctgattgtaatcagaaactcaaaagaatgcagcagtttgtctctcacctatctatgacctggaagcccccttccccgtttgagtcttcctgcctttgcttcactttatccctgcctttctagactgaaccaacatacttcttagatatattgattgatgtctcatgtctccctaaaatgtataaaactaagctgggccccaaccaccttgggcacatgtcgttaggacttcctgagactgtgtcacaagtttgtgtccacaactttgacaaaataaactttttaaattaactgagacctgtcctaaatttttagggttccatcagatatgcatttctctcacctgagcatcagagggatgatttcgagttctctgtgttttttgtccacaggaatttccttgtgggcaaattctgagggagggatgtagcttttttatgtttggagctattttatttagaaataaaatgggaggcaggtttgcctgagtcagttgcctgcttgacttcctttggcttagtcattttggagtcctgagatttattttcttttcacatacctgttttatttatgatggtttatggtcattgaaccttgtaacattgattacatttcttttcactggtcttttttcttaagtagataaacttatttttaacttgggcacaagagagcataaaaattatatgaggtacatagcctgcttaaatagaatatttaaaatacgttttgtccacagagctggaattctttgtaaatgaaaaccaaattttacttaatttttagagataggatcttggctttgtcgcctaggctagagtgctgtgggggcaatcatagcccactgcaacctcgaattcctggcttaagtgatcctcccatctcagcctcctgggtgcttggacaacagacatgacaccttacctggctagttaaaaaaaattttttttgtagagatgggctttgcctgtgtggcccaggctgctcttgaactcctaggttcaagtgatcctccagcttgggccttccgaagtgctgggattacattgcttccagctttagttttttaaatgtttaacttgtttaacttatttaacttgctgtttattatttaatggagagcttttagtgtttgtcttttgaggtgggatcttgccatgcccagactagccttgaagtcctacagtcaagtgatctttgcatctcagtctcccaagaagtagtggtagagaatttttatgttacattcctttctctgtgtatatgtttgtgggaggacatatgtccctttgtatgtttgggcatatatattttttgtgtgaaagttatgcatgttattgttgatcaatacaagaggtttagaggccagagaagagaaataaaatgggaaaaactacaaacattctacctcccatgataccatgctataatggcaatcataatatttatgtattttttacttttttgtgttcatttttaaaaattagataaaaatagtttaagctagaggcttctctctttcatctttttttttctaatttaagttttccctaagtaggaattttggtaatacttcattatattgatgtatcaagatttctttagtttctcctttgttgtctttaggttgtctacaatattttttgtcattgtgaatatgctgtcatgaacattttgatgctgattattaccagattagtgtgttgtgtcaaagttttcatcagttggattatttttcagtttagtaagtgatgcaagccaaaactaaaactctaaggcaccttctccccacccaaccagtcatctgagtagacttcctcctcagccagggcagtcatagcccactgcaaccagccagcccctttccattccagtatccctttccctttaataaaatttaaggccaaacatggtggttcaatgcctgtaatgccagcactttgggaggctgaggtgggcggatcatgaggtcaggagataaagaccattctgggaaacatggtgaaacactgtctctactaaaagtataaaaattagctggatgtggtggcatgtggctgtggtctcagctactcgggaggctgctgaggcaggagaatcgcttgaacctggggaggcagaggttgcagtgagcagagatcatgccactacactttagtctggtgacagaatgagactccatctcaaaaaaaaaaaaatgatttgtgagatgaatttgttttgaaaatattagcttgttttcagttgtgatacatttgaagttggtacagagtccattttcttttatgtgttaatgtattgacaatatagttgtgttgacaacttcttttcttatttccagttcagtctttacagaagctgacgagagatttccttgtattttatggtggtatgattggccttagagcacttcagttttgagatctctgctgtatttgtatacaagtattttggaaggtcagttgataggatgaatgaaaaacaaaaattggaagtaatggtactagtaataagtggggattttcatgtaggtaaaggaactgataagtcatagggaatccgtgagttcttaatcttactgagtttagttgtgttctttgattattttggatagctttgtttaacggtgaatgaaatgattaaaatggaaaaattaagtgcagaaaatatgtttaacattatataggatgtcttgttttaggcatttattgctagataacatatgtccattcttgtattgctataaagaaatattggatactggctaatttataaataaaagagatttattggctcatgattctgcaggctgtacaggaaatatgattctggaatccgcttggcttctggaaaggcctcaggaaacttagaatgatgacacaaggcagaggggaagcaggcacatcttacatggcaggagcagggagcaagaaagagtgaagcgggaggtgctacacacttttaataatccagatctgagtcaggcatagcagcttatgcctataatcccagcacttttgggaggccaaggcaggcagatcacctgagggtcaggagttcaaggccagcctggccaacatggtgaaacctcatgtctactaaaagtacaaaaattagctgggtgtggttgcacctgcttataatcccagctgctcaggaggctgaggcaggagaattgcttgaacccgggaggcagatgtttcagtgaaccaagattgcaccactgcactccagcctgggtgaacagagtaagactctgccttaaaagtaaaataaaattaaattaaaattaaaaaccagatcttgcaagaactcactgtcagaagaacagcaccaagggtatggtgctgaaccattcatgaaggagccatcctcaagatccagtcatctcataccaggtccacctccatctaatattgggaattacaattcatcatgagggttggtggagacatggatccaagccatgtcacatattatcctgactgtagtggtttaagataacaatttttatctcacaatttattttgaatacaggcatgatttagctgtgtcctttggttcagtatctcttcaaagctgtaatcaggtttttcatgtgtttgtcatcaactgaaagattgactgagtatggttctgagatctctcaggtgattattggcagaattaagttccttttcgattcttggtcttatttcttcacccatctactatagtgcattcttgccatgcagccctttttatggagcaagtcacaatacagcagcttgcttcattagggcaagcaagcaagacaagctgcagcaaatgcaagtaacatggaagtctttataatctaatcatggaattgacatagttaaaaacaaatcattaggtaggctccaaattgatcagaacatggttattggacaaaaccatgactgtcaggaggctgcatcatggggagccattttacaagcagcaccatgggtgttatgggggattttattacatttgttctgctcttaagagttgaaagtctttaaaaatgtgtaagtctgtcgtttgttcttgacttctgtcatgttttcaagaatgcattatgcaatgatgtagaatactgtttgtaaagtagttgtctagactctagtgaaaataattacagataatctcagttcatcaacgaatcggtatattaatgtcatatttaacagttataggaataaactaagcataataataaatgatgatttgaatgttattataatta

SEQ ID NO: 22618 - DNA, 882 bp, Homo sapiens
  misc_feature 1..882: note = ENST00000417071
  source 1..882: mol_type = unassigned DNA; mol_type = unassigned DNA
gtgctggtgtcgggaccgggagataggagtgtctcaggagagacctggccgaaaaccgcgagaaagaaaagtgaagcctagtgaaactgcctttgcagtgactcaagaaaaactcatcacctggagtccgtgtaagctcggcgacagccctagcagcgaggccaaaacagtttgggaagaaagaaaacctaaagtatttgccgttggtgattcaagggaatcaaacttgacgtatggagccaagaaagcccttggaaaaactggcctcatattttgtgtacacagtccctgtacagggtttctgacctgtggatgtgagacttcacaacctgctaaaaatgagctttcaggacctacccatataggaataaaccatcctagccatgagagatcagatgaaacctgagaccagagagactcatttgtttcaaaatagtttctccaaaagattttataaaagaaaaggctggggggagtgggatatgaaaggaaaatgaatcttggggcccccaaatcactaagctcaagggataagtcaagttagaaactgttcagggccaacttaccttgcattctattcaaattcacccctctgctcacttagatgcatatctgattgtaatcagaaactcaaaagaatgcagcagtttgtctctcacctatctatgacctggaagcccccttccccgtttgagtcttcctgcctttgcttcactttatccctgcctttctagactgaaccaacatacttcttagatatattgattgatgtctcatgtctccctaaaatgtataaaactaagctgggccccaaccaccttgggcacatgtcgttaggacttcctgagactgtgtcacaagtttgtgtccacaactttgaca

SEQ ID NO: 22619 - DNA, 630 bp, Homo sapiens; identical to SEQ ID NO: 22616
  misc_feature 1..630: note = ENST00000457658
  source 1..630: mol_type = unassigned DNA; mol_type = unassigned DNA

SEQ ID NO: 22620 - DNA, 5284 bp, Homo sapiens; identical to SEQ ID NO: 22617
  misc_feature 1..5284: note = ENST00000440408
  source 1..5284: mol_type = unassigned DNA; mol_type = unassigned DNA

SEQ ID NO: 22621 - DNA, 882 bp, Homo sapiens; identical to SEQ ID NO: 22618
  misc_feature 1..882: note = ENST00000417071
  source 1..882: mol_type = unassigned DNA; mol_type = unassigned DNA

SEQ ID NO: 22622 - DNA, 4840 bp, Homo sapiens
  misc_feature 1..4840: note = ENST00000258796
  source 1..4840: mol_type = unassigned DNA; mol_type = unassigned DNA
cggcgaacaaagaggcggcgggcgcgggcggccgagcggagccgagcgcagccgagccgggccgagccgggccgggccgggcccaggagcgcgcggatgatgcgggcggccaggcgggggtcgacgggtccctgaagcccgcgccccgggccagcaagggagccccgcgcaggccgcgcgcatccggaggcggccgggccccgccatggccggggtcagctacgcggcgccctggtgggtgagcctcctgcaccggctgccccacttcgacctgagctgggaggccactagcagccagttccggcccgaggacaccgactaccagcaggccctgctgctcctgggggccgccgccctggcctgcctcgccctggacctcctcttcctgctcttctactccttctggctgtgctgccggcggcgcaagagcgaggagcacctggacgccgactgctgctgcacggcctggtgtgtcatcatcgccacgctggtgtgcagcgccggcatcgcagtgggattctacggcaacggggagaccagtgatggcatccatagggccacctactcgctccgccacgccaaccgcacggtggccggggtccaggaccgcgtgtgggacacggcggtggggctgaaccacacggcggagcccagcctgcagaccctggagcggcagctggccgggcggcccgagcccctgcgagccgtacagaggctgcagggcctgctggagacgctgctgggctacacggccgccatccccttttggaggaacacggcggtgtcgctggaggtgctggcggagcaggtggatctctacgactggtacaggtggctgggctacctgggcctgctgctgctggacgtcatcatctgcctcctggtgctggttggcctcatccgcagctccaagggcatcctggtgggggtctgcctgctgggagtcctggccctggtcatcagctggggcgcgctgggcttggagctggctgtgtccgtgggctccagcgacttctgtgtggaccctgacgcctacgtgaccaaaatggtggaggagtactcggtgctgagtggggacatcctgcagtactacctggcctgctcgccccgcgccgccaaccccttccagcagaagctgtcgggcagccacaaggcactggtggagatgcaggatgtcgtggctgagcttctgaggaccgtcccctgggagcagccggccactaaggaccccctcctccgcgtccaggaggtgctgaatggcacggaggtgaacctgcagcacctcaccgccctggtggactgccgcagcctgcatctggactacgtgcaagcgctgaccggcttctgctatgacggcgtggagggcctcatctacctggccctcttctccttcgtcacagccctcatgttcagctccatcgtctgcagcgtcccgcacacctggcagcaaaagagaggccctgatgaggacggggaggaggaggccgctccagggccgcggcaggcgcacgacagcctctaccgcgtccacatgcccagcctgtacagctgtggcagcagctacggcagtgagaccagcatcccggccgcggcccacaccgtcagcaacgccccggtcactgagtacatgagccagaacgctaatttccagaacccccgctgtgagaacaccccactcattgggcgcgagtccccgccgccctcatacacctccagcatgagagccaaatacctcgccacgagccagcctcgccctgactccagcggcagccactagaccgcgcccggcagccacccaccccacgtgccaacttcccctccccgtgccagcactgccgcttccacctgggccacccaccggaccctcgcacgccgtgccaggcctgccccagacgcgtctgcaggccgcttgccctcctgtcccctccccgcaggggcacagtggagacgcaggggctctgggcccgtaccgccaactcgggtcacacctgaacgctgctgccagccgatgccccagccctgcacgccacccactatcccggcacgctccctctgcagatggtcgccgcacctacaagccctggccgcacccaacctgtgttgttgccgcccggcccttccctccacagctctccttcctcccgcccggcacttctgtggaccccttcttagttcacaggcacggctggggccgctctgtgctggcgcctgctggccactgagggacagggacacgtgccacctgctcatctctgccctgaggtcaccccgtggtccctccacgtgcccatctctctgcagtgccctcctcgcctgtgcagcccgcccacccacaggctcacccctcctgccggctgccagaggccccctccagcagggcctctctccgttgccccagcttcactctctccctcagcacctgccctgctggaggccccagccctccgtggacagcaggggccacgtggagcccgggccgctcacccgccacccagtgctggccgccttcttggtgccaaacccccttcccccacccagagactgggcagctgtgtctggttcgttctttgcactaaccacatttgtcatctctagggcaggctggggctgcgggctgagggggaccgctggcaccccccttccctcccttcttggttccatttccatccatgacaggtacagcatcccaggagcccggcctgaggggctggacccgagccggctgtgaacatccctcagcccctgctgtccccccttgggactaaccactaacctcacccccaaactccacgggtgcccctagctggcccagagccggcagtgtgagcccaagtccgggctggagccgaggccggagcagctgtctgggagtcaaggctgcagtagcgtttcttcatggggtgctccagggggtgccacagaccgacaggcagcccaagggcctggacacccctccccaggcaggtgctgccccaggaggactgtcctcgggaatgaacctcccgcgggctttggactgaggtccctgtggcctcggtctcctccccatgaagtgggagcgaggctccccaatggtgcttttggctttagtgtacgatgtttgctgtgcttcccgccgtggagggcagagccaccccacatcaggatcggacgtgctacccctcccggtcccggccctggcccagccagcccagccctcgaggctcgatgcctgtgccaaggccaggggcagccagagggcagctggatggccacgtgcaggggtcaaggctgggccctgcagtggggcgggccgccagccccagcagtttacagacgcatggctcttcctcccagagcagccggcagctacctggaccggaaatgtcctcatcccctccctggggccaggctctgccctggccttcctctgtgaacccctcctttctttgtgctggtgtctgggaccaaaaagggggaatatgggagggcagagtggggaggggagtccatgggcctggggccccaagccggggcgtctgagctccccaggcatgaccaaacctcagtggaggggcctctgcttcaggccccgcctggctgacattctgagcccccctcggaggccccgccacagccaacctgcccagtctttcctctgggcttgacccgccaggggagttctccaggcctagggccaggagagaggccctggcaccctggcgtgggtgcccgccaaacgccctgcgaccgctcagaagcacaaatgctgtccatggccgtgaggctgcctgccaggtgaatggacatagcgtgagaggcggtgaggccagggcttccagcctcgtgctgtctcgggactcctgaccgtggtgtgcgtgtgtgcccgtctgtgactttctactcaccaaggttgaagaaaggaaacggggaaaatcaaaaggggttcaaaccccacctcagtaggtggaggggagcgcctgccattggttgtatttttgttctgagttttcggtgccgtgttcctaactactccatcccatgacctcgccacacctactggggcatctggctggtgcctgctgccatggccagcccccactctcaccctgcacagggggtcttgcagcccccaggcccacagcctcgttgggaggacagggtggccctggggacaagagggaggagcccaggggcttacctcactgagagtgctccccagcaggcatccactaccccagggccccccacatgtcatggcaaggttggtagtgaatgggcctggttgggagcagcccctggcccattgcccacccacccatctcactatgcaattcgagttccaagcaacatttgctcctgccctggggccagctctgccccagccctgagaggggtggtgaggcagccccctggaccccagaaccccagacaagggggcaggcgggggaccagggcctctcctgtgggatctttgttttgtgtttaaccataatggttgtgtactgaaccacttcatatttgttatatataatatatatatatataatctccttaagactcagcctcctggtttacccccccggcctgggcatctgacctcccccaccccagtgtgatttaacatccaggaactgaggcctgaaccattttgcatttccccctcctccagcctctgtagggccatggctgtatgtactgtcgctgtgtttttttgtttttttagaactgggtttgggggctgatttttatttctttgggggctttttttcttggcaaatactaaaaatctcgtcaatgtaatttctgtggtttctattcagcttgggtttcatgttttaaaataaattttaaaaagcaa

SEQ ID NO: 22623 - DNA, 4537 bp, Homo sapiens
  misc_feature 1..4537: note = ENST00000407643
  source 1..4537: mol_type = unassigned DNA; mol_type = unassigned DNA
atggccggggtcagctacgcggcgccctggtgggtgagcctcctgcaccggctgccccacttcgacctgagctgggaggccactagcagccagttccggcccgaggacaccgactaccagcaggccctgctgctcctgggggccgccgccctggcctgcctcgccctggacctcctcttcctgctcttctactccttctggctgtgctgccggcggcgcaagagcgaggagcacctggacgccgactgctgctgcacggcctggtgtgtcatcatcgccacgctggtgtgcagcgccggcatcgcagtgggattctacggcaacggggagaccagtgatggcatccatagggccacctactcgctccgccacgccaaccgcacggtggccggggtccaggaccgcgtgtgggacacggcggtggggctgaaccacacggcggagcccagcctgcagaccctggagcggcagctggccgggcggcccgagcccctgcgagccgtacagaggctgcagggcctgctggagacgctgctgggctacacggccgccatccccttttggaggaacacggcggtgtcgctggaggtgctggcggagcaggtggatctctacgactggtacagggtctgcctgctgggagtcctggccctggtcatcagctggggcgcgctgggcttggagctggctgtgtccgtgggctccagcgacttctgtgtggaccctgacgcctacgtgaccaaaatggtggaggagtactcggtgctgagtggggacatcctgcagtactacctggcctgctcgccccgcgccgccaaccccttccagcagaagctgtcgggcagccacaaggcactggtggagatgcaggatgtcgtggctgagcttctgaggaccgtcccctgggagcagccggccactaaggaccccctcctccgcgtccaggaggtgctgaatggcacggaggtgaacctgcagcacctcaccgccctggtggactgccgcagcctgcatctggactacgtgcaagcgctgaccggcttctgctatgacggcgtggagggcctcatctacctggccctcttctccttcgtcacagccctcatgttcagctccatcgtctgcagcgtcccgcacacctggcagcaaaagagaggccctgatgaggacggggaggaggaggccgctccagggccgcggcaggcgcacgacagcctctaccgcgtccacatgcccagcctgtacagctgtggcagcagctacggcagtgagaccagcatcccggccgcggcccacaccgtcagcaacgccccggtcactgagtacatgagccagaacgctaatttccagaacccccgctgtgagaacaccccactcattgggcgcgagtccccgccgccctcatacacctccagcatgagagccaaatacctcgccacgagccagcctcgccctgactccagcggcagccactagaccgcgcccggcagccacccaccccacgtgccaacttcccctccccgtgccagcactgccgcttccacctgggccacccaccggaccctcgcacgccgtgccaggcctgccccagacgcgtctgcaggccgcttgccctcctgtcccctccccgcaggggcacagtggagacgcaggggctctgggcccgtaccgccaactcgggtcacacctgaacgctgctgccagccgatgccccagccctgcacgccacccactatcccggcacgctccctctgcagatggtcgccgcacctacaagccctggccgcacccaacctgtgttgttgccgcccggcccttccctccacagctctccttcctcccgcccggcacttctgtggaccccttcttagttcacaggcacggctggggccgctctgtgctggcgcctgctggccactgagggacagggacacgtgccacctgctcatctctgccctgaggtcaccccgtggtccctccacgtgcccatctctctgcagtgccctcctcgcctgtgcagcccgcccacccacaggctcacccctcctgccggctgccagaggccccctccagcagggcctctctccgttgccccagcttcactctctccctcagcacctgccctgctggaggccccagccctccgtggacagcaggggccacgtggagcccgggccgctcacccgccacccagtgctggccgccttcttggtgccaaacccccttcccccacccagagactgggcagctgtgtctggttcgttctttgcactaaccacatttgtcatctctagggcaggctggggctgcgggctgagggggaccgctggcaccccccttccctcccttcttggttccatttccatccatgacaggtacagcatcccaggagcccggcctgaggggctggacccgagccggctgtgaacatccctcagcccctgctgtccccccttgggactaaccactaacctcacccccaaactccacgggtgcccctagctggcccagagccggcagtgtgagcccaagtccgggctggagccgaggccggagcagctgtctgggagtcaaggctgcagtagcgtttcttcatggggtgctccagggggtgccacagaccgacaggcagcccaagggcctggacacccctccccaggcaggtgctgccccaggaggactgtcctcgggaatgaacctcccgcgggctttggactgaggtccctgtggcctcggtctcctccccatgaagtgggagcgaggctccccaatggtgcttttggctttagtgtacgatgtttgctgtgcttcccgccgtggagggcagagccaccccacatcaggatcggacgtgctacccctcccggtcccggccctggcccagccagcccagccctcgaggctcgatgcctgtgccaaggccaggggcagccagagggcagctggatggccacgtgcaggggtcaaggctgggccctgcagtggggcgggccgccagccccagcagtttacagacgcatggctcttcctcccagagcagccggcagctacctggaccggaaatgtcctcatcccctccctggggccaggctctgccctggccttcctctgtgaacccctcctttctttgtgctggtgtctgggaccaaaaagggggaatatgggagggcagagtggggaggggagtccatgggcctggggccccaagccggggcgtctgagctccccaggcatgaccaaacctcagtggaggggcctctgcttcaggccccgcctggctgacattctgagcccccctcggaggccccgccacagccaacctgcccagtctttcctctgggcttgacccgccaggggagttctccaggcctagggccaggagagaggccctggcaccctggcgtgggtgcccgccaaacgccctgcgaccgctcagaagcacaaatgctgtccatggccgtgaggctgcctgccaggtgaatggacatagcgtgagaggcggtgaggccagggcttccagcctcgtgctgtctcgggactcctgaccgtggtgtgcgtgtgtgcccgtctgtgactttctactcaccaaggttgaagaaaggaaacggggaaaatcaaaaggggttcaaaccccacctcagtaggtggaggggagcgcctgccattggttgtatttttgttctgagttttcggtgccgtgttcctaactactccatcccatgacctcgccacacctactggggcatctggctggtgcctgctgccatggccagcccccactctcaccctgcacagggggtcttgcagcccccaggcccacagcctcgttgggaggacagggtggccctggggacaagagggaggagcccaggggcttacctcactgagagtgctccccagcaggcatccactaccccagggccccccacatgtcatggcaaggttggtagtgaatgggcctggttgggagcagcccctggcccattgcccacccacccatctcactatgcaattcgagttccaagcaacatttgctcctgccctggggccagctctgccccagccctgagaggggtggtgaggcagccccctggaccccagaaccccagacaagggggcaggcgggggaccagggcctctcctgtgggatctttgttttgtgtttaaccataatggttgtgtactgaaccacttcatatttgttatatataatatatatatatataatctccttaagactcagcctcctggtttacccccccggcctgggcatctgacctcccccaccccagtgtgatttaacatccaggaactgaggcctgaaccattttgcatttccccctcctccagcctctgtagggccatggctgtatgtactgtcgctgtgtttttttgtttttttagaactgggtttgggggctgatttttatttctttgggggctttttttcttggcaaatactaaaaatctcgtcaatgtaatttctgtggtttctattcagcttgggtttcatgttttaaaataaattttaaaaagc

SEQ ID NO: 22624 - DNA, 560 bp, Homo sapiens
  misc_feature 1..560: note = ENST00000400376
  source 1..560: mol_type = unassigned DNA; mol_type = unassigned DNA
cttttgtgttcagagacctggggagagccacactggaaggccgtgcttggagccagacagggctgtgtgtccgatggggcgcctgtatgcagcctgtagcagtgtggggccagccccaccatctcatccagcgtgggggcacgccatggacggtgcccacccctgagtgcagcttctcggtgcacagaccccagacaggatcagactcctgatggggcctcttccatgttcacccctcagaaacactttcatggtcagcaagagggggttcagtcccccacaggctcccaatttccctaccagacctgaaaacctcaggactacagctggggtgggggatcctgccaggactcaggccctgctgctcctgggggccgccgccctggcctgcctcgccctggacctcctcttcctgctcttctactccttctggctgtgctgccggcggcgcaagagcgaggagcacctggacgccgactgctgctgcacggcctggtgtgtcatcatcgccacgctggtgtgcagcgccggcatcgcagtgggattctacggcaacgggg

SEQ ID NO: 22625 - DNA, 4263 bp, Homo sapiens
  misc_feature 1..4263: note = ENST00000403167
  source 1..4263: mol_type = unassigned DNA; mol_type = unassigned DNA
tttgctctcagcacctagtacatgaggcctgatgggcagggtgtggcccagggccactggaggtcacaggcagtggctggagttcccctaatgggagcctttctcaagaactgacaccagtccccatgacccagacgctctgaatgccctctggggtgccaggctgctggcctcagctccccctcaagggcccctggcgccccactcccaggccccgggtccctgtgccctggcgcactcccaggtttgcctgcaggtggctgggctacctgggcctgctgctgctggacgtcatcatctgcctcctggtgctggttggcctcatccgcagctccaagggcatcctggtgggggtctgcctgctgggagtcctggccctggtcatcagctggggcgcgctgggcttggagctggctgtgtccgtgggctccagcgacttctgtgtggaccctgacgcctacgtgaccaaaatggtggaggagtactcggtgctgagtggggacatcctgcagtactacctggcctgctcgccccgcgccgccaaccccttccagcagaagctgtcgggcagccacaaggcactggtggagatgcaggatgtcgtggctgagcttctgaggaccgtcccctgggagcagccggccactaaggaccccctcctccgcgtccaggaggtgctgaatggcacggaggtgaacctgcagcacctcaccgccctggtggactgccgcagcctgcatctggactacgtgcaagcgctgaccggcttctgctatgacggcgtggagggcctcatctacctggccctcttctccttcgtcacagccctcatgttcagctccatcgtctgcagcgtcccgcacacctggcagcaaaagagaggccctgatgaggacggggaggaggaggccgctccagggccgcggcaggcgcacgacagcctctaccgcgtccacatgcccagcctgtacagctgtggcagcagctacggcagtgagaccagcatcccggccgcggcccacaccgtcagcaacgccccggtcactgagtacatgagccagaacgctaatttccagaacccccgctgtgagaacaccccactcattgggcgcgagtccccgccgccctcatacacctccagcatgagagccaaatacctcgccacgagccagcctcgccctgactccagcggcagccactagaccgcgcccggcagccacccaccccacgtgccaacttcccctccccgtgccagcactgccgcttccacctgggccacccaccggaccctcgcacgccgtgccaggcctgccccagacgcgtctgcaggccgcttgccctcctgtcccctccccgcaggggcacagtggagacgcaggggctctgggcccgtaccgccaactcgggtcacacctgaacgctgctgccagccgatgccccagccctgcacgccacccactatcccggcacgctccctctgcagatggtcgccgcacctacaagccctggccgcacccaacctgtgttgttgccgcccggcccttccctccacagctctccttcctcccgcccggcacttctgtggaccccttcttagttcacaggcacggctggggccgctctgtgctggcgcctgctggccactgagggacagggacacgtgccacctgctcatctctgccctgaggtcaccccgtggtccctccacgtgcccatctctctgcagtgccctcctcgcctgtgcagcccgcccacccacaggctcacccctcctgccggctgccagaggccccctccagcagggcctctctccgttgccccagcttcactctctccctcagcacctgccctgctggaggccccagccctccgtggacagcaggggccacgtggagcccgggccgctcacccgccacccagtgctggccgccttcttggtgccaaacccccttcccccacccagagactgggcagctgtgtctggttcgttctttgcactaaccacatttgtcatctctagggcaggctggggctgcgggctgagggggaccgctggcaccccccttccctcccttcttggttccatttccatccatgacaggtacagcatcccaggagcccggcctgaggggctggacccgagccggctgtgaacatccctcagcccctgctgtccccccttgggactaaccactaacctcacccccaaactccacgggtgcccctagctggcccagagccggcagtgtgagcccaagtccgggctggagccgaggccggagcagctgtctgggagtcaaggctgcagtagcgtttcttcatggggtgctccagggggtgccacagaccgacaggcagcccaagggcctggacacccctccccaggcaggtgctgccccaggaggactgtcctcgggaatgaacctcccgcgggctttggactgaggtccctgtggcctcggtctcctccccatgaagtgggagcgaggctccccaatggtgcttttggctttagtgtacgatgtttgctgtgcttcccgccgtggagggcagagccaccccacatcaggatcggacgtgctacccctcccggtcccggccctggcccagccagcccagccctcgaggctcgatgcctgtgccaaggccaggggcagccagagggcagctggatggccacgtgcaggggtcaaggctgggccctgcagtggggcgggccgccagccccagcagtttacagacgcatggctcttcctcccagagcagccggcagctacctggaccggaaatgtcctcatcccctccctggggccaggctctgccctggccttcctctgtgaacccctcctttctttgtgctggtgtctgggaccaaaaagggggaatatgggagggcagagtggggaggggagtccatgggcctggggccccaagccggggcgtctgagctccccaggcatgaccaaacctcagtggaggggcctctgcttcaggccccgcctggctgacattctgagcccccctcggaggccccgccacagccaacctgcccagtctttcctctgggcttgacccgccaggggagttctccaggcctagggccaggagagaggccctggcaccctggcgtgggtgcccgccaaacgccctgcgaccgctcagaagcacaaatgctgtccatggccgtgaggctgcctgccaggtgaatggacatagcgtgagaggcggtgaggccagggcttccagcctcgtgctgtctcgggactcctgaccgtggtgtgcgtgtgtgcccgtctgtgactttctactcaccaaggttgaagaaaggaaacggggaaaatcaaaaggggttcaaaccccacctcagtaggtggaggggagcgcctgccattggttgtatttttgttctgagttttcggtgccgtgttcctaactactccatcccatgacctcgccacacctactggggcatctggctggtgcctgctgccatggccagcccccactctcaccctgcacagggggtcttgcagcccccaggcccacagcctcgttgggaggacagggtggccctggggacaagagggaggagcccaggggcttacctcactgagagtgctccccagcaggcatccactaccccagggccccccacatgtcatggcaaggttggtagtgaatgggcctggttgggagcagcccctggcccattgcccacccacccatctcactatgcaattcgagttccaagcaacatttgctcctgccctggggccagctctgccccagccctgagaggggtggtgaggcagccccctggaccccagaaccccagacaagggggcaggcgggggaccagggcctctcctgtgggatctttgttttgtgtttaaccataatggttgtgtactgaaccacttcatatttgttatatataatatatatatatataatctccttaagactcagcctcctggtttacccccccggcctgggcatctgacctcccccaccccagtgtgatttaacatccaggaactgaggcctgaaccattttgcatttccccctcctccagcctctgtagggccatggctgtatgtactgtcgctgtgtttttttgtttttttagaactgggtttgggggctgatttttatttctttgggggctttttttcttggcaaatactaaaaatctcgtcaatgtaatttctgtggtttctattcagcttgggtttcatgttttaaaataaattttaaaaagc

SEQ ID NO: 22626 - DNA, 731 bp, Homo sapiens
  misc_feature 1..731: note = ENST00000477439
  source 1..731: mol_type = unassigned DNA; mol_type = unassigned DNA
caggtggctgggctacctgggcctgctgctgctggacgtcatcatctgcctcctggtgctggttggcctcatccgcagctccaagggcatcctggtggggtgagtctgggggtgtcggccccccgtgggcccaaagcggaggggcagggcaaggcaccatgttaccccttcccccacctcatctgcagatcctagccacaagctctgcggtgggggctgagcgggacccccctgcactgggcctgctctgagatgccccttctgtgcctgtggcctgtgcccctgtggccagcatcccagcacacttgcccccagcccttgatttcctgcaagagtctgcacgtggggcacttgtagcccaggacctgaagcaacctgcccaggtctccgagtgcctggggccacccagagaccaggctggggctccttcctccaccccttccatccttggccctggggcagcctgggttccagccccagctccggctcactaggagggtgaccttgggcaggtggcttattgttgctgggccttggtctcctcgtttggaaggcagagagagcggcagctcctctgtgggagggtctgcctgctgggagtcctggccctggtcatcagctggggcgcgctgggcttggagctggctgtgtccgtgggctccagcgacttctgtgtggaccctgacgcctacgtgaccaaaatggtggaggagtactcggtgctgagtggg

SEQ ID NO: 22627 - DNA, 587 bp, Homo sapiens
  misc_feature 1..587: note = ENST00000498454
  source 1..587: mol_type = unassigned DNA; mol_type = unassigned DNA
gtcttgctggtgtccccgcgttggagggtcctggggagggagaggcgggcggacccagcagcgcccatggacttggtctcctctctggagcagaagctgtcgggcagccacaaggcactggtggagatgcaggatgtcgtggctgagcttctgaggaccgtcccctgggagcagccggccactaaggaccccctcctccgcgtccaggaggtgctgaatggcacggaggtgaacctgcagcacctcaccgccctggtggactgccgcagcctgcatctggactacgtgcaagcgctgaccggcttctgctatgacggcgtggagggcctcatctacctggccctcttctccttcgtcacagccctcatgttcagctccatcgtctgcagcgtcccgcacacctggcagcaaaagagaggccctgatgaggacggggaggaggaggccgctccagggccgcggcaggcgcacgacagcctctaccgcgtccacatgcccagcctgtacagctgtggcagcagctacggcagtgagaccagcatcccggccgcggcccacaccgtcagcaacgccccggtcactgagta

SEQ ID NO: 22628 - DNA, 756 bp, Homo sapiens
  misc_feature 1..756: note = ENST00000429448
  source 1..756: mol_type = unassigned DNA; mol_type = unassigned DNA
gaccccctcctccgcgtccaggaggtgctgaatggcacggaggtgaacctgcagcacctcaccgccctggtggactgccgcagcctgcatctggactacgtgcaagcgctgaccggcttctgctatgacggcgtggagggcctcatctacctggccctcttctccttcgtcacagccctcatgttcagctccatcgtctgcagcgtcccgcacacctggcagcaaaagagaggccctgatgaggacggggaggaggaggccgctccagggccgcggcaggcgcacgacagcctctaccgcgtccacatgcccagcctgtacagctgtggcagcagctacggcagtgagaccagcatcccggccgcggcccacaccgtcagcaacgccccggtcactgagtacatgagccagaacgctaatttccagaacccccgctgtgagaacaccccactcattgggcgcgagtccccgccgccctcacgctatctggctgccctggactctggcagccacgcgggctggcagtttaagcccatggacagtgcccgaacgctgtggtagctgttccctcagagcgacagtacacctccagcatgagagccaaatacctcgccacgagccagcctcgccctgactccagcggcagccactagaccgcgcccggcagccacccaccccacgtgccaacttcccctccccgtgccagcactgccgcttccacctgggccacccaccggaccctcgcacgccgtgcca

SEQ ID NO: 22629 - DNA, 582 bp, Homo sapiens
  misc_feature 1..582: note = ENST00000426208
  source 1..582: mol_type = unassigned DNA; mol_type = unassigned DNA
agcttgccaagcacacacggccctagggcgcccagctgagacggcaccttggcacccgggcccgctgcagcccgctccggtcagctgcaccccagtcaggagcctttccagcgggtcggaggagaacggaagtttggggagacccgcgcgattcgcctggctgcattttacatttctttctccggcagctggggtcacgaaggctgctctcgccggcggtgttggaacgtggacacgtgcgctttgcgggaatgcatatcagtccacgtgggccaagcgggagttcagattggcaatgcctgctgggagctcttctgcctggaacacggcatccaggcagacggcacttttgatgctcaagctagcaagatcaacgatgatgactccttcaccacctttttcagcgagactggcaatgggaagcatgtgccccgggccgtcatgatagatctggagcctactgtagtggatgaggttcgggcaggaacctaccgccagctcttccatccagagcagctgatcacaggaaaggaggatgcagccaacaactatgcccggggccactacacggtgggcaaggag

SEQ ID NO: 22630 - DNA, 1518 bp, Homo sapiens
  misc_feature 1..1518: note = ENST00000316027
  source 1..1518: mol_type = unassigned DNA; mol_type = unassigned DNA
tttgtgacctgcccgcccctccccggcactgtgatgccggggggcagctgcgggcccggcgcgcctgtccccggcgtccccccctcccggtgtgtcacaacggcggaggcggctgtatctggagcagtcggggcgggcaggcccagctgagagcgggaatgcatatcagtccacgtgggccaagcgggagttcagattggcaatgcctgctgggagctcttctgcctggaacacggcatccaggcagacggcacttttgatgctcaagctagcaagatcaacgatgatgactccttcaccacctttttcagcgagactggcaatgggaagcatgtgccccgggccgtcatgatagatctggagcctactgtagtggatgaggttcgggcaggaacctaccgccagctcttccatccagagcagctgatcacaggaaaggaggatgcagccaacaactatgcccggggccactacacggtgggcaaggagagcattgacctggtgctggaccgcatacggaagctgacagatgcttgctctggcctgcagggcttcctgattttccacagttttggtgggggcactggctccggcttcacttctctgctgatggaacgcctctccctggattatggcaagaaatccaagctggagtttgccatctacccagccccccaggtctctactgcagtggtggagccctacaactccatcctgaccacccacaccacactggaacattcagattgtgctttcatggtggacaacgaagccatctatgacatctgccgcaggaaccttgacattgagcgccctacctataccaacctcaaccgcctcatcagtcagattgtgtcctcaatcactgcttctctccgctttgacggggccctcaatgtggacctcactgagttccagaccaacctggtgccctacccccgcatccacttcccgctggtcacctacgcgcccatcatctctgccgagaaagcctatcacgaacagctctctgtggccgagataaccagctcctgctttgagcccaacagccagatggtgaagtgcgacccgagacatggcaagtacatggcctgctgcatgctctaccggggcgacgtggtgcccaaggatgtgaatgtcgctattgctgccatcaagaccaagaggaccatccagtttgtagactggtgtcccacaggcttcaaggtgggcatcaactaccagcccccgaccgtggtccccgggggagacctggccaaggtgcagcgggccgtctgcatgctcagcaacaccacggccattgcggaggcctgggcccgcctcgaccacaagttcgacctcatgtacgccaagcgggcctttgtgcattggtatgtgggagaggggatggaagaaggagaattttctgaggccagggaagacttagctgccctggagaaggattatgaagaagtggggactgattcgtttgaagaagaaaatgaaggggaggaattttaaatatataccttccccttg

SEQ ID NO: 22631 - DNA, 2018 bp, Homo sapiens
  misc_feature 1..2018: note = ENST00000330423
  source 1..2018: mol_type = unassigned DNA; mol_type = unassigned DNA
aggcggctgtatctggagcagtcggggcgggcaggcccagctgagaggtgcgcgggcgaggacagcggcagcgatgcgggaatgcatatcagtccacgtgggccaagcgggagttcagattggcaatgcctgctgggagctcttctgcctggaacacggcatccaggcagacggcacttttgatgctcaagctagcaagatcaacgatgatgactccttcaccacctttttcagcgagactggcaatgggaagcatgtgccccgggccgtcatgatagatctggagcctactgtagtggatgaggttcgggcaggaacctaccgccagctcttccatccagagcagctgatcacaggaaaggaggatgcagccaacaactatgcccggggccactacacggtgggcaaggagagcattgacctggtgctggaccgcatacggaagctgacagatgcttgctctggcctgcagggcttcctgattttccacagttttggtgggggcactggctccggcttcacttctctgctgatggaacgcctctccctggattatggcaagaaatccaagctggagtttgccatctacccagccccccaggtctctactgcagtggtggagccctacaactccatcctgaccacccacaccacactggaacattcagattgtgctttcatggtggacaacgaagccatctatgacatctgccgcaggaaccttgacattgagcgccctacctataccaacctcaaccgcctcatcagtcagattgtgtcctcaatcactgcttctctccgctttgacggggccctcaatgtggacctcactgagttccagaccaacctggtgccctacccccgcatccacttcccgctggtcacctacgcgcccatcatctctgccgagaaagcctatcacgaacagctctctgtggccgagataaccagctcctgctttgagcccaacagccagatggtgaagtgcgacccgagacatggcaagtacatggcctgctgcatgctctaccggggcgacgtggtgcccaaggatgtgaatgtcgctattgctgccatcaagaccaagaggaccatccagtttgtagactggtgtcccacaggcttcaaggtgggcatcaactaccagcccccgaccgtggtccccgggggagacctggccaaggtgcagcgggccgtctgcatgctcagcaacaccacggccattgcggaggcctgggcccgcctcgaccacaagttcgacctcatgtacgccaagcgggcctttgtgcattggtatgtgggagaggggatggaagaaggagaattttctgaggccagggaagacttagctgccctggagaaggattatgaagaagtggggactgattcgtttgaagaagaaaatgaaggggaggaattttaaatatataccttccccttggctgtgtctctttatttatgctgtgccattcaaagcacatgttcaagagaacagaacactctccccgccccagcctgattcctgccttacccaggaggagggtgcctggccccagtacccagggtggcacgactgggctaagtggacactgagcttcatcaggccctccctgggtaggagcagctttgtgtcactaaagaaagtgagggccactgtctccggcgggtgaggctgcagcccagtttcacatgcgaggaggcctaatcaggagtttcaattccagatcgggctgggtccagccccaaaacatggcctgctggctggggagtgggaacactcagagaaaggggagatctgggcctgggaagattccggggcaggggtgagcggacgttcacatgagtgggtctatagcccgctccgggcatcatctagacttagcatgcattcactcccccatcacatattccaatacacaccctgtcctaggcactgagagctggagagttggtgataagcgagacgaacacatttcctgccctcatacacacataaataaagtgaatgagatcatgtc

SEQ ID NO: 22632 - DNA, 1700 bp, Homo sapiens
  misc_feature 1..1700: note = ENST00000416740
  source 1..1700: mol_type = unassigned DNA; mol_type = unassigned DNA
ggcgtaggctgaaggagagtttctgccatgatcgccagttcttccttgggccttcttcaccagtgcaggaatcttgtggtttggaattagccccttgcttcatctttgcaaccaccctccttttttctttcctggtataaaaggtcaaccctgggaagcaacctttagagcaaagcacaaaacagctgtgtcttctttggatctaagtcctggtccagctgctatagagctggggcacctgcagcctcaacgccaactggcaatggggggctggggcctggctggcctgcaaggtgaatgttatggggatgtagggcaaaggcatgctgggggcccagactctctgacctcgttgcttccctctccccacagcgggaatgcatatcagtccacgtgggccaagcgggagttcagattggcaatgcctgctgggagctcttctgcctggaacacggcatccaggcagacggcacttttgatgctcaagctagcaagatcaacgatgatgactccttcaccacctttttcagcgagactggcaatgggaagcatgtgccccgggccgtcatgatagatctggagcctactgtagtggatgaggttcgggcaggaacctaccgccagctcttccatccagagcagctgatcacaggaaaggaggatgcagccaacaactatgcccggggccactacacggtgggcaaggagagcattgacctggtgctggaccgcatacggaagctgacagatgcttgctctggcctgcagggcttcctgattttccacagttttggtgggggcactggctccggcttcacttctctgctgatggaacgcctctccctggattatggcaagaaatccaagctggagtttgccatctacccagccccccaggtctctactgcagtggtggagccctacaactccatcctgaccacccacaccacactggaacattcagattgtgctttcatggtggacaacgaagccatctatgacatctgccgcaggaaccttgacattgagcgccctacctataccaacctcaaccgcctcatcagtcagattgtgtcctcaatcactgcttctctccgctttgacggggccctcaatgtggacctcactgagttccagaccaacctggtgccctacccccgcatccacttcccgctggtcacctacgcgcccatcatctctgccgagaaagcctatcacgaacagctctctgtggccgagataaccagctcctgctttgagcccaacagccagatggtgaagtgcgacccgagacatggcaagtacatggcctgctgcatgctctaccggggcgacgtggtgcccaaggatgtgaatgtcgctattgctgccatcaagaccaagaggaccatccagtttgtagactggtgtcccacaggcttcaaggtgggcatcaactaccagcccccgaccgtggtccccgggggagacctggccaaggtgcagcgggccgtctgcatgctcagcaacaccacggccattgcggaggcctgggcccgcctcgaccacaagttcgacctcatgtacgccaagcgggcctttgtgcattggtatgtgggagaggggatggaagaaggagaattttctgaggccagggaagacttagctgccctggagaaggattatgaagaagtggggactgattcgtttgaagaagaaaa

SEQ ID NO: 22633 - DNA, 1391 bp, Homo sapiens
  misc_feature 1..1391: note = ENST00000608634
  source 1..1391: mol_type = unassigned DNA; mol_type = unassigned DNA
ctttgacggggccctcaatgtggacctcactgagttccagaccaacctggtgccctacccccgcatccacttcccgctggtcacctacgcgcccatcatctctgccgagaaagcctatcacgaacagctctctgtggccgagataaccagctcctgctttgagcccaacagccagatggtgaagtgcgacccgagacatggcaagtacatggcctgctgcatgctctaccggggcgacgtggtgcccaaggatgtgaatgtcgctattgctgccatcaagaccaagaggaccatccagtttgtagactggtgtcccacaggcttcaaggtgggcatcaactaccagcccccgaccgtggtccccgggggagacctggccaaggtgcagcgggccgtctgcatgctcagcaacaccacggccattgcggaggcctgggcccgcctcgaccacaagttcgacctcatgtacgccaagcgggcctttgtgcattgccaaaggatccagttggggatctcctgttcatctatgacctctttggtctctgccagtctggagccgttcctcaaagctgtctttgattttcatgaatcgtttgaagatggcagaccagctgatctgcagaatgcccctcgatttgggttggccaggacccgcgtcctggcgaaggggttccggttactgaccttcgatgggaacagcacagaagtgataccgcgctggctccactctgtcctctggtggcacgcaattccagtgttccccgcactgatgactttcttgtaccgaatatttacattaattacattctttatagttataatgtaatattacatatgagaccatggggttcatctgattaggtctgcccaatttagcctgccctgcttgctttgggtcacttgcttttgttattttttttctgtgaagctgaaggccgcgccactgagcgctgtaacttaaccttgccggcttccttacagataacatgtatgtcactactgtcatgatcgttcaaattgtttttcaggaacttggggcagctcctgcctagttcaaaccagttgagaccgtgagctttcaagtaggcttgtgcaaacaaaagaagtggccttttgacatcagaggccccaagcgacaccctcagatcacgctaaggctgtcattttttgaacatgtgccctgtgaagtgccacgaaccctgactatgcttgcagtggtcaccgactgcctcattttcccccactgccaatcacctttgcccataccttacaccaccctgcttctctcaccggtaaatatccctaagacttatctttggggaggaagatttgagagctgttctcctgcctcctcactgggctgccttgcgaataaatcttttctcttttac

SEQ ID NO: 22634 - DNA, 2020 bp, Homo sapiens
  misc_feature 1..2020: note = ENST00000259818
  source 1..2020: mol_type = unassigned DNA; mol_type = unassigned DNA
ggggggctcgggctgggggcgcggcctgtgccggccgccccaccctccttgcataaaagccggagcccgcggggccggcgctctcagcccgtcggttcccgagcgccttcccggtgaccccgcagtgggtgtgtgaggggaggacggacagacccagacgccgccggaccaggaggacgctgacgaggcaccatgcgtgagatcgtgcacatccaggcgggccagtgcggcaaccagatcggcgccaagttttgggaggtcatcagtgatgagcatgggattgaccccactggcagttaccatggagacagtgatttgcagctggagagaatcaatgtttactacaatgaagccactggtaacaaatatgttcctcgggccatcctcgtggatctggagccaggcacgatggattcggttaggtctggaccattcggccagatcttcagaccagacaatttcgtgtttggccagagtggagccgggaataactgggccaagggccactacacagagggagccgagctggtcgactcggtcctggatgtggtgaggaaggagtcagagagctgtgactgtctccagggcttccagctgacccactctctggggggcggcacggggtccgggatgggcaccctgctcatcagcaagatccgggaagagtacccagaccgcatcatgaacaccttcagcgtcatgccctcacccaaggtgtcagacacggtggtggagccctacaacgccaccctctcggtccaccagctggtggaaaacacagatgaaacctactgcattgacaacgaggccctgtatgacatctgcttccgcaccctgaagctgaccacccccacctacggggacctcaaccacctggtgtcggccaccatgagcggggtcaccacctgcctgcgcttcccgggccagctgaacgcagacctgcgcaagctggcggtgaacatggtgcccttccctcgcctgcacttcttcatgcccggcttcgcgcccctgaccagccggggcagccagcagtaccgggcgctcacggtgcccgagctcacccagcagatgttcgactccaagaacatgatggccgcctgcgacccgcgccacggccgctacctgacggtggctgccatcttccggggccgcatgtccatgaaggaggtggacgagcagatgctcaacgtgcagaacaagaacagcagctacttcgtggagtggatccccaacaacgtgaagacggccgtgtgcgacatcccgccccgcggcctgaagatgtcggccaccttcatcggcaacagcacggccatccaggagctgttcaagcgcatctccgagcagttcacggccatgttccggcgcaaggccttcctgcactggtacacgggcgagggcatggacgagatggagttcaccgaggccgagagcaacatgaacgacctggtgtccgagtaccagcagtaccaggacgccacggccgacgaacaaggggagttcgaggaggaggagggcgaggacgaggcgtagatgcccccgcgagacgggttagggaaagcggaggaggaaagcgagggggtggggggcttcccgggacgataacctggcagtggaaggaaagaagcatggtctactttaggtgtgcgctgggtctctggtgctcttcactgttgcctgtcactttttttttccttttttgtaatattgatgacatcaatgtaacatttgagatatttctgaattactgttgtaatggctaaaatcacataaacgtttgtgtcggaatggtgtcctctctttctcttcctttttctctttattaacgatttaaatgtaactttctgaacacattgcattgaattcttcctttaacaaaaagcaaaggcgtaggtaaaagctcaaatgaatttattctttcggtatggtaaaattgaaccaatcacagttaagatgagagatcaacctgagttttaaaatacctttaataaatattagttgaaaaaatgtctacttgaaagca

SEQ ID NO: 22635 - DNA, 1923 bp, Homo sapiens
  misc_feature 1..1923: note = ENST00000473006
  source 1..1923: mol_type = unassigned DNA; mol_type = unassigned DNA
ggaaatggcgccctagaaaagccaggatgctactccctccgccgatttgtaggacaaagcaggcaaagctctctcgtggaagctcggctctctcagtcccgaccgaggccattataactcaaattcacaacctccggggatgcgaaaacacccggccttactgaggaacaaaggttttgggaggtcatcagtgatgagcatgggattgaccccactggcagttaccatggagacagtgatttgcagctggagagaatcaatgtttactacaatgaagccactggtaacaaatatgttcctcgggccatcctcgtggatctggagccaggcacgatggattcggttaggtctggaccattcggccagatcttcagaccagacaatttcgtgtttggccagagtggagccgggaataactgggccaagggccactacacagagggagccgagctggtcgactcggtcctggatgtggtgaggaaggagtcagagagctgtgactgtctccagggcttccagctgacccactctctggggggcggcacggggtccgggatgggcaccctgctcatcagcaagatccgggaagagtacccagaccgcatcatgaacaccttcagcgtcatgccctcacccaaggtgtcagacacggtggtggagccctacaacgccaccctctcggtccaccagctggtggaaaacacagatgaaacctactgcattgacaacgaggccctgtatgacatctgcttccgcaccctgaagctgaccacccccacctacggggacctcaaccacctggtgtcggccaccatgagcggggtcaccacctgcctgcgcttcccgggccagctgaacgcagacctgcgcaagctggcggtgaacatggtgcccttccctcgcctgcacttcttcatgcccggcttcgcgcccctgaccagccggggcagccagcagtaccgggcgctcacggtgcccgagctcacccagcagatgttcgactccaagaacatgatggccgcctgcgacccgcgccacggccgctacctgacggtggctgccatcttccggggccgcatgtccatgaaggaggtggacgagcagatgctcaacgtgcagaacaagaacagcagctacttcgtggagtggatccccaacaacgtgaagacggccgtgtgcgacatcccgccccgcggcctgaagatgtcggccaccttcatcggcaacagcacggccatccaggagctgttcaagcgcatctccgagcagttcacggccatgttccggcgcaaggccttcctgcactggtacacgggcgagggcatggacgagatggagttcaccgaggccgagagcaacatgaacgacctggtgtccgagtaccagcagtaccaggacgccacggccgacgaacaaggggagttcgaggaggaggagggcgaggacgaggcgtagatgcccccgcgagacgggttagggaaagcggaggaggaaagcgagggggtggggggcttcccgggacgataacctggcagtggaaggaaagaagcatggtctactttaggtgtgcgctgggtctctggtgctcttcactgttgcctgtcactttttttttccttttttgtaatattgatgacatcaatgtaacatttgagatatttctgaattactgttgtaatggctaaaatcacataaacgtttgtgtcggaatggtgtcctctctttctcttcctttttctctttattaacgatttaaatgtaactttctgaacacattgcattgaattcttcctttaacaaaaagcaaaggcgtaggtaaaagctcaaatgaatttattctttcggtatggtaaaattgaaccaatcacagttaagatgagagatcaacctgagttttaaaatacctttaataaatattagttg

SEQ ID NO: 22636 - DNA, 2552 bp, Homo sapiens
  misc_feature 1..2552: note = ENST00000264071
  source 1..2552: mol_type = unassigned DNA; mol_type = unassigned DNA
atttctgcgggtggccaagcctggctgggggctgggacgggggagactgcactggtggctccctaaggggcctcacccccaaggcaggggtcggagcacgtggcgtcccggacttctctgggaggccccctggggagggaggtccctgcaccacctccccccaccccagccccctccatcatcccggggcgggaccaaggggcggagcgggagggtgaccggccgtgacgcgtgccccgcccgctcatatagcggctcccgggggcgcagggaccgtgctccgccgtctccgccgcatcttccaccctcgccgccgccgcagctccccgcgctcgtgccaccgccgccgcgtccaccctcagcgccaccgccatgcgggagatcgtgcacctgcaggccggccagtgcggcaaccagatcggggccaagttttgggaggttatcagtgacgaacatggcatcgaccccacaggcacataccatggggacagtgacctgcaactggagaggatcaacgtgtactacaacgaggccacaggaggaaattatgtccccagagcggtgctggtggacctggaacccggcaccatggactctgtccgttctggccccttcggtcagatctttcggccggacaacttcgtgtttggccaatccggagccggcaacaactgggcaaaggggcactacacggagggcgcagagctggtggacgctgtcctggacgtagtccggaaggaggccgagagctgcgactgccttcagggcttccagctgacccactcgctggggggtggcacggggtccggaatgggcacgctgctcatcagtaagatccgcgaggagttcccagaccgcatcatgaacaccttcagcgtggtgccctcgcccaaagtgtcagacacggtggtggagccctacaacgccacgctgtctgtgcaccagctggtggagaatacggatgagacctactgcatcgacaacgaggcactctacgacatctgtttccgcaccctcaagctgaccacccccacctacggggacctcaaccacctggtgtcggccaccatgagcggggtcaccacctgcctgcgcttcccgggccagctgaacgccgacctgcgcaagctggccgtcaacatggttccctttcctcgcctgcacttcttcatgcccggcttcgcacccctgaccagccggggcagccagcagtaccgggccctgacggtgcccgagctcacccagcagatgttcgatgccaagaacatgatggcggcgtgcgacccgcgccacggccgctacctgaccgtggccgccgtgttccggggccgcatgtccatgaaggaggtggacgagcagatgctgagcgtgcagagcaagaacagcagctacttcgtggagtggatccccaacaacgtgaagacggccgtgtgcgacatcccgccccgcggcctgaagatggccgcgaccttcatcggcaacagcacggccatccaggagctgttcaagcgcatctccgagcagttcacggccatgttccggcgcaaggccttcttgcactggtacacgggcgagggcatggacgagatggagttcaccgaggccgagagcaacatgaatgacctggtatctgagtaccagcagtaccaggacgccacggccgaggagggcgagttcgaggaggaggcggaggaggaggtggcctaggctgctcccatcgcttcccacctgtcccctcgaggcttctgacctttgatccgctaggccccccatctctgaaccctagagccccgctttccctccaaggctgactccccgctgaccctaacaatacctttggagctcgctttacctctggctacttcatctccgaccctggctcccctttgagccctaatttatctttaacccccttgagctcttccaaccttgacattcccaggaggagccccgcttcaccccttctgactctggaaaccgcacctttaactttgcagaccttccttcacccctgacttctgcttcacctttgacctctgccccccatgaatcccattttacctctagacctataagttctggtttatgtttgacccctccctctgagctgcacttcaccgctgaccttgcctcacctttaaccccccacctgagccccagctcctacctctgaccccaacttctctttgatctctgaatcccctctgactccaacttctctttcaccctctatgagtcccattttacttctacacctgcaagtcctggtttatattggacccctccctccgagctgcagttcacctttgaccttgcctcacctttcaccccccaccccccacagcgtcagctcctacctctgaccccagcttctctctgattcccacaggccccatgcatcctccctgcctcactcccctcagcccctgccgaccttagcttatctgggagagaaacaaggcctggtgcctgtgaggaagagaggtcacccctaccctccctccccgcttccctgcctcaccctcaataaataaattaattgttgtcatgga

SEQ ID NO: 22637 - DNA, 562 bp, Homo sapiens
  misc_feature 1..562: note = ENST00000594276
  source 1..562: mol_type = unassigned DNA; mol_type = unassigned DNA
gtgctccgccgtctccgccgcatcttccaccctcgccgccgccgcagctccccgcgctcgtgccaccgccgccgcgtccaccctcagcgccaccgccatgcgggagatcgtgcacctgcaggccggccagtgcggcaaccagatcggggccaagttttgggaggttatcagtgacgaacatggcatcgaccccacaggcacataccatggggacagtgacctgcaactggagaggatcaacgtgtactacaacgaggagttcccagaccgcatcatgaacaccttcagcgtggtgccctcgcccaaagtgtcagacacggtggtggagccctacaacgccacgctgtctgtgcaccagctggtggagaatacggatgagacctactgcatcgacaacgaggcactctacgacatctgtttccgcaccctcaagctgaccacccccacctacggggacctcaaccacctggtgtcggccaccatgagcggggtcaccacctgcctgcgcttcccgggccagctgaacgccgacctgcgcaagctggccgtcaacatggttccc

SEQ ID NO: 22638 - DNA, 579 bp, Homo sapiens
  misc_feature 1..579: note = ENST00000594075
  source 1..579: mol_type = unassigned DNA; mol_type = unassigned DNA
gtgctccgccgtctccgccgcatcttccaccctcgccgccgccgcagctccccgcgctcgtgccaccgccgccgcgtccaccctcagcgccaccgccatgcgggagatcgtgcacctgcaggccggccagtgcggcaaccagatcggggccaagttttgggaggttatcagtgacgaacatggcatcgaccccacaggcacataccatggggacagtgacctgcaactggagaggatcaacgtgtactacaacgaggccgagagctgcgactgccttcagggcttccagctgacccactcgctggggggtggcacggggtccggaatgggcacgctgctcatcagtaagatccgcgaggagttcccagaccgcatcatgaacaccttcagcgtggtgccctcgcccaaagtgtcagacacggtggtggagccctacaacgccacgctgtctgtgcaccagctggtggagaatacggatgagacctactgcatcgacaacgaggcactctacgacatctgtttccgcaccctcaagctgaccacccccacctacggggacctcaaccacctggtgtcggc

SEQ ID NO: 22639 - DNA, 530 bp, Homo sapiens
  misc_feature 1..530: note = ENST00000600216
  source 1..530: mol_type = unassigned DNA; mol_type = unassigned DNA
gtgctccgccgtctccgccgcatcttccaccctcgccgccgccgcagctccccgcgctcgtgccaccgccgccgcgtccaccctcagcgccaccgccatgcgggagatcgtgcacctgcaggccggccagtgcggcaaccagatcggggccaagttttgggagggcgcagagctggtggacgctgtcctggacgtagtccggaaggaggccgagagctgcgactgccttcagggcttccagctgacccactcgctggggggtggcacggggtccggaatgggcacgctgctcatcagtaagatccgcgaggagttcccagaccgcatcatgaacaccttcagcgtggtgccctcgcccaaagtgtcagacacggtggtggagccctacaacgccacgctgtctgtgcaccagctggtggagaatacggatgagacctactgcatcgacaacgaggcactctacgacatctgtttccgcaccctcaagctgaccacccccacctacggggacctcaaccacctggtgtcgg

SEQ ID NO: 22640 - DNA, 1050 bp, Homo sapiens
  misc_feature 1..1050: note = ENST00000595324
  source 1..1050: mol_type = unassigned DNA; mol_type = unassigned DNA
gtgctccgccgtctccgccgcatcttccaccctcgccgccgccgcagctccccgcgctcgtgccaccgccgccgcgtccaccctcagcgccaccgccatgcgggagatcgtgcacctgcaggccggccagtgcggcaaccagatcggggccaagttttgggaggttatcagtgacgaacatggcatcgaccccacaggcacataccatggggacagtgacctgcaactggagaggatcaacgtgtactacaacgaggccacaggaggaaattatgtccccagagcggtgctggtggacctggaacccggcaccatggactctgtccgttctggccccttcggtcagatctttcggccggacaacttcgtgtttggtgagtcccccagcagggagccagaggctggaaaacctccttattcctgctaacaccacagagtcaacagccaccaccggggcccacagaccagagatggggtggacagggcaccaggcaccagccctgcatccagggctgtgatgaggggatgctcaggccactgtgagagccctgaggagggcggatacagagaaggattcagggaagtcttcctggaggaggtggcattttaattcaacggtctgaaccggaaccagactgcctgggtgcacatcccaattctgccacttcatgcattcaacaaacagtgagcactcactgcataccaggccctgttctagaagctggagatccaggccaatccggagccggcaacaactgggcaaaggggcactacacggagggcgcagagctggtggacgctgtcctggacgtagtccggaaggaggccgagagctgcgactgccttcagggcttccagctgacccactcgctggggggtggcacggggtccggaatgggcacgctgctcatcagtaagatccgcgaggagttcccagaccgcatcatgaacaccttcagcgtggtgccctcgcccaaagtgtcagacacggtggtggagccctacaacgccacgctgtctgtgcaccagctggtggagaatacggatgag

SEQ ID NO: 22641 - DNA, 590 bp, Homo sapiens
  misc_feature 1..590: note = ENST00000601152
  source 1..590: mol_type = unassigned DNA; mol_type = unassigned DNA
atatagcggctcccgggggcgcagggaccgtgctccgccgtctccgccgcatcttccaccctcgccgccgccgcagctccccgcgctcgtgccaccgccgccgcgtccaccctcagcgccaccgccatgcgggagatcgtgcacctgcaggcacataccatggggacagtgacctgcaactggagaggatcaacgtgtactacaacgaggccacaggaggaaattatgtccccagagcggtgctggtggacctggaacccggcaccatggactctgtccgttctggccccttcggtcagatctttcggccggacaacttcgtgtttggccaatccggagccggcaacaactgggcaaaggggcactacacggagggcgcagagctggtggacgctgtcctggacgtagtccggaaggaggccgagagctgcgactgccttcagggcttccagctgacccactcgctggggggtggcacggggtccggaatgggcacgctgctcatcagtaagatccgcgaggagttcccagaccgcatcatgaacaccttcagcgtggtgccctcgcccaaagtgtcagacacggtggtg

SEQ ID NO: 22642 - DNA, 565 bp, Homo sapiens
  misc_feature 1..565: note = ENST00000598006
  source 1..565: mol_type = unassigned DNA; mol_type = unassigned DNA
tatagcggctcccgggggcgcagggaccgtgctccgccgtctccgccgcatcttccaccctcgccgccgccgcagctccccgcgctcgtgccaccgccgccgcgtccaccctcagcgccaccgccatgcgggagatcgtgcacctgcaggccggccagtgcggcaaccagatcggggccaaggcacataccatggggacagtgacctgcaactggagaggatcaacgtgtactacaacgaggccacaggaggaaattatgtccccagagcggtgctggtggacctggaacccggcaccatggactctgtccgttctggccccttcggtcagatctttcggccggacaacttcgtgtttggccaatccggagccggcaacaactgggcaaaggggcactacacggagggcgcagagctggtggacgctgtcctggacgtagtccggaaggaggccgagagctgcgactgccttcagggcttccagctgacccactcgctggggggtggcacggggtccggaatgggcacgctgctcatcagtaagatccgcgaggagttcccagac

SEQ ID NO: 22643 - DNA, 545 bp, Homo sapiens
  misc_feature 1..545: note = ENST00000596291
  source 1..545: mol_type = unassigned DNA; mol_type = unassigned DNA
cttcttgctgcctcatcctcgccccgacaccatgcctctaggtcccccgttcaccttgctgggggagaggtggcagctagggagctagttgggggctgggggcagtcctcggcttggccaccggcttcccctctctcaactcttccgaccacctctctctctagttttgggaggttatcagtgacgaacatggcatcgaccccacaggcacataccatggggacagtgacctgcaactggagaggatcaacgtgtactacaacgaggccacaggaggaaattatgtccccagagcggtgctggtggacctggaacccggcaccatggactctgtccgttctggccccttcggtcagatctttcggccggacaacttcgtgtttggccaatccggagccggcaacaactgggcaaaggggcactacacggagggcgcagagctggtggacgctgtcctggacgtagtccggaaggaggccgagagctgcgactgccttcagggcttccagctgacccactcgctggggggtggcacggggtccgga

SEQ ID NO: 22644 - DNA, 636 bp, Homo sapiens
  misc_feature 1..636: note = ENST00000597686
  source 1..636: mol_type = unassigned DNA; mol_type = unassigned DNA
tgcagcttcaggacaagccctccaggaacctaccgccccccacccgcaaaccagatcgccgctccggagcccccagcccactgggagggctcgcggttactgcaaggattctggcgaatgaggtctaaatagaatgagaaggggggctgcggaccgagaaactgagggaccgtgctccgccgtctccgccgcatcttccaccctcgccgccgccgcagctccccgcgctcgtgccaccgccgccgcgtccaccctcagcgccaccgccatgcgggagatcgtgcacctgcaggccggccagtgcggcaaccagatcggggccaagttttgggaggttatcagtgacgaacatggcatcgaccccacaggcacataccatggggacagtgacctgcaactggagaggatcaacgtgtactacaacgaggccacaggaggaaattatgtccccagagcggtgctggtggacctggaacccggcaccatggactctgtccgttctggccccttcggtcagatctttcggccggacaacttcgtgtttggccaatccggagccggcaacaactgggcaaaggggcactacacggagggcgcagagctggtggacgctgtcctggacgtagtccggaagga

SEQ ID NO: 22645 - DNA, 548 bp, Homo sapiens
  misc_feature 1..548: note = ENST00000596926
  source 1..548: mol_type = unassigned DNA; mol_type = unassigned DNA
gtgctccgccgtctccgccgcatcttccaccctcgccgccgccgcagctccccgcgctcgtgccaccgccgccgcgtccaccctcagcgccaccgccatgcgggagatcgtgcacctgcaggccggccagtgcggcaaccagatcggggccaagttttgggaggttatcagtgacgaacatggcatcgaccccacaggcacataccatggggacagtgacctgcaactggagaggatcaacgtgtactacaacgaggccacaggaggaaattatgtccccagagcggtgctggtggacctggaacccggcaccatggactctgtccgttctggccccttcggtcagatctttcggccggacaacttcgtgtttgtagagacggggtttcaccgtgttagccaggatggtctcgatctcctgacctcgtgatccgcccacctcggcctcccaaagtgctgggattacaggccaatccggagccggcaacaactgggcaaaggggcactacacggagggcgcagagctggtggacgctgtcctggacgta

SEQ ID NO: 22646 - DNA, 553 bp, Homo sapiens
  misc_feature 1..553: note = ENST00000594290
  source 1..553: mol_type = unassigned DNA; mol_type = unassigned DNA
gtgctccgccgtctccgccgcatcttccaccctcgccgccgccgcagctccccgcgctcgtgccaccgccgccgcgtccaccctcagcgccaccgccatgcgggagatcgtgcacctgcaggccggccagtgcggcaaccagatcggggccaagttttgggaggttatcagtgacgaacatggcatcgaccccacaggcacataccatggggacagtgacctgcaactggagaggatcaacgtgtactacaacgaggccacaggaggaaattatgtccccagagcggtgctggtggacctggaacccggcaccatggactctgtccgttctggccccttcggtcagatctttcggccggacaacttcgtgtttgacagggtctgtctgtcctgctgtcacccaggctagagtgcagtggcatgatcacggctcactgtcacctccacctctgggcacacgtgatcctcttgcctcagtctcccaagtagctggacctacaggccaatccggagccggcaacaactgggcaaaggggcactacacggagggcgc

SEQ ID NO: 22647 - DNA, 543 bp, Homo sapiens
  misc_feature 1..543: note = ENST00000601640
  source 1..543: mol_type = unassigned DNA; mol_type = unassigned DNA
actatgcagcttcaggacaagccctccaggaacctaccgccccccacccgcaaaccagatcgccgctccggagcccccagcccactgggagggctcgcggttactgcaaggattctggcgaatgaggtctaaatagaatgagaaggggggctgcggaccgagaaactgagctccccgcgctcgtgccaccgccgccgcgtccaccctcagcgccaccgccatgcgggagatcgtgcacctgcaggccggccagtgcggcaaccagatcggggccaagttttgggaggttatcagtgacgaacatggcatcgaccccacaggcacataccatggggacagtgacctgcaactggagaggatcaacgtgtactacaacgaggccacaggaggaaattatgtccccagagcggtgctggtggacctggaacccggcaccatggactctgtccgttctggccccttcggtcagatctttcggccggacaacttcgtgtttggccaatccggagccggcaacaactgggcaaaggggcactacacgga

SEQ ID NO: 22648 - DNA, 565 bp, Homo sapiens
  misc_feature 1..565: note = ENST00000598635
  source 1..565: mol_type = unassigned DNA; mol_type = unassigned DNA
acccgcaaaccagatcgccgctccggagcccccagcccactgggagggctcgcggttactgcaaggattctggcgaatgaggtctaaatagaatgagaaggggggctgcggaccgagaaactgagcggctcccgggggcgcagggaccgtgctccgccgtctccgccgcatcttccaccctcgccgccgccgcagctccccgcgctcgtgccaccgccgccgcgtccaccctcagcgccaccgccatgcgggagatcgtgcacctgcaggccggccagtgcggcaaccagatcggggccaagttttgggaggttatcagtgacgaacatggcatcgaccccacaggcacataccatggggacagtgacctgcaactggagaggatcaacgtgtactacaacgaggccacaggaggaaattatgtccccagagcggtgctggtggacctggaacccggcaccatggactctgtccgttctggccccttcggtcagatctttcggccggacaacttcgtgtttggccaatccggagccggcaacaactgggcaaaggggcactacac

SEQ ID NO: 22649 - DNA, 978 bp, Homo sapiens
  misc_feature 1..978: note = ENST00000540184
  source 1..978: mol_type = unassigned DNA; mol_type = unassigned DNA
attccgggctcgaaggctgtgcggtctgccaggagctgcggccccgtccggcccgggctgtgtcttccatgaagaaatgatgaagatgcgacaggctaagctggattatcagaggctactacttgagaagaggcaaaggaaaaagcgccttgagccatttatggtgcagcccaatccagaagccaggctacgtcgggcaaagccaagggccagtgatgagcagactcccttggtgaactgtcatactccccacagcaatgtcatcttacatggtattgatggtccagctgctgtcctgaaaccagacgaagttcatgctccatcagtaagctcctctgttgtggaagaagatgctgaaaacaccgtggatactgcttccaagccaggacttcaggagcgtctccaaaagcatgatatctctgaaagtgtgaacttcgatgaggagactgatggaatatcccagtcagcatgtttagaaagacccaattctgcatcaagccagaattcaaccttttcctcattctgtcagaagactgaagacacgggatacaggcacttccggttctgctactgccgcccaaccagctgataacctcctgggagacatagacgacctggaggactttgtgtatagtcctgcccctcaaggtgtcacagtaagatgtcggataatccgggataaaaggggaatggatcggggtctcttccccacctactatatgtacttggaaaaagaagaaaatcagaagatatttcttcttgcagctagaaagcggaaaaagagcaaaacagccaactaccttatctccattgatccagttgatttatctcgtgaaggagaaagttatgtcggcaagcttagatccaacctcatggggaccaagtttacagtttatgaccgtggcatctgccccatgaagggccggggtttggtaggagcggcccacacccggcaggagctggctgccatctcctatg

SEQ ID NO: 22650 - DNA, 548 bp, Homo sapiens
  misc_feature 1..548: note = ENST00000544943
  source 1..548: mol_type = unassigned DNA; mol_type = unassigned DNA
agccactctagcgacggcggggaagagtgtctagaaagcggaaaaagagcaaaacagccaactaccttatctccattgatccagttgatttatctcgtgaaggagaaagttatgtcggcaagcttagatccaacctcatggggaccaagtttacagtttatgaccgtggcatctgccccatgaagggccggggtttggtaggagcggcccacacccggcaggagctggctgccatctcctatgaaacaaacgtacttggatttaaaggtcctaggaaaatgtctgtgatcattcctggaatgacactgaatcataagcagatcccctatcagccacaaaacaaccatgacagtttgctctcaaggtggcagaacagaactatggaaaatctggttgagctgcacaacaaggcccccgtctggaacagtgacactcagtcctatgtcctcaacttccgtggccgggtcactcaggcgtctgtgaagaacttccagatagtccacaaaaatgaccctgattatatagtcatgcagtttggacgtgtggca

SEQ ID NO: 22651 - DNA, 1229 bp, Homo sapiens
  misc_feature 1..1229: note = ENST00000538354
  source 1..1229: mol_type = unassigned DNA; mol_type = unassigned DNA
actctagcgacggcggggaagagtgtgtacgtggtgggggcttcctcggtggcgggcatggaggcttcgcgctgccggctcagtcccagcggcgacagtgtcttccatgaagaaatgatgaagatgcgacaggctaagctggattatcaggtattgatggtccagctgctgtcctgaaaccagacgaagttcatgctccatcagtaagctcctctgttgtggaagaagatgctgaaaacaccgtggatactgcttccaagccaggacttcaggagcgtctccaaaagcatgatatctctgaaagtgtgaacttcgatgaggagactgatggaatatcccagtcagcatgtttagaaagacccaattctgcatcaagccagaattcaaccgatacaggcacttccggttctgctactgccgcccaaccagctgataacctcctgggagacatagacgacctggaggactttgtgtatagtcctgcccctcaaggtgtcacagtaagatgtcggataatccgggataaaaggggaatggatcggggtctcttccccacctactatatgtacttggaaaaagaagaaaatcagaagatccaacctcatggggaccaagtttacagtttatgaccgtggcatctgccccatgaagggccggggtttggtaggagcggcccacacccggcaggagctggctgccatctcctatgaaacaaacgtacttggatttaaaggtcctaggaaaatgtctgtgatcattcctggaatgacactgaatcataagcagatcccctatcagccacaaaacaaccatgacagtttgctctcaaggtggcagaacagaactatggaaaatctggttgagctgcacaacaaggcccccgtctggaacagtgacactcagtcctatgtcctcaacttccgtggccgggtcactcaggcgtctgtgaagaacttccagatagtccacaaaaatgaccctgattatatagtcatgcagtttggacgtgtggcagatgacgtgttcacactggattacaactacccactttgtgcagtacaggcctttggcatcggtctttctagctttgacagtaagctggcgtgtgaatgagagaacagtcaggcagggagcccttctccccacagagctttcaggagcagacagtggcctccccttcccctccctgccccaggacttaaagagcaatagtttgccccttttggaat

SEQ ID NO: 22652 - DNA, 1373 bp, Homo sapiens
  misc_feature 1..1373: note = ENST00000545331
  source 1..1373: mol_type = unassigned DNA; mol_type = unassigned DNA
actctagcgacggcggggaagagtgtgtacgtggtgggggcttcctcggtggcgggcatggaggcttcgcgctgccggctcagtcccagcggcgacagtgtcttccatgaagaaatgatgaagatgcgacaggctaagctggattatcaggtattgatggtccagctgctgtcctgaaaccagacgaagttcatgctccatcagtaagctcctctgttgtggaagaagatgctgaaaacaccgtggatactgcttccaagccaggacttcaggagcgtctccaaaagcatggatacaggcacttccggttctgctactgccgcccaaccagctgataacctcctgggagacatagacgacctggaggactttgtgtatagtcctgcccctcaaggtgtcacagtaagatgtcggataatccgggataaaaggggaatggatcggggtctcttccccacctactatatgtacttggaaaaagaagaaaatcagaagatatttcttcttgcagctagaaagcggaaaaagagcaaaacagccaactaccttatctccattgatccagttgatttatctcgtgaaggagaaagttatgtcggcaagcttagatccaacctcatggggaccaagtttacagtttatgaccgtggcatctgccccatgaagggccggggtttggtaggagcggcccacacccggcaggagctggctgccatctcctataaccatgacagtttgctctcaaggtggcagaacagaactatggaaaatctggttgagctgcacaacaaggcccccgtctggaacagtgacactcagtcctatgtcctcaacttccgtggccgggtcactcaggcgtctgtgaagaacttccagatagtccacaaaaatgaccctgattatatagtcatgcagtttggacgtgtggcagatgacgtgttcacactggattacaactacccactttgtgcagtacaggcctttggcatcggtctttctagctttgacagtaagctggcgtgtgaatgagagaacagtcaggcagggagcccttctccccacagagctttcaggagcagacagtggcctccccttcccctccctgccccaggacttaaagagcaatagtttgccccttttggaatgatctctgaatatataaaacacacacacaaagagcaatagtttgccccttttggaacgacccctgaatatataaaacacacacacgaagagcaatagtttgccccttttggaacgacccctgaatatataaaacacacacgaagagcaatagtttgccccttttggaacgacccctgaatatataaaacacacacacgaagagcaatagtttgccccttttggaacga

SEQ ID NO: 22653 - DNA, 3076 bp, Homo sapiens
  misc_feature 1..3076: note = ENST00000448120
  source 1..3076: mol_type = unassigned DNA; mol_type = unassigned DNA
gcgacggcggggaagagtgtgtacgtggtgggggcttcctcggtggcgggcatggaggcttcgcgctgccggctcagtcccagcggcgacagtgtcttccatgaagaaatgatgaagatgcgacaggctaagctggattatcagaggctactacttgagaagaggcaaaggaaaaagcgccttgagccatttatggtgcagcccaatccagaagccaggctacgtcgggcaaagccaagggccagtgatgagcagactcccttggtgaactgtcatactccccacagcaatgtcatcttacatggtattgatggtccagctgctgtcctgaaaccagacgaagttcatgctccatcagtaagctcctctgttgtggaagaagatgctgaaaacaccgtggatactgcttccaagccaggacttcaggagcgtctccaaaagcatgatatctctgaaagtgtgaacttcgatgaggagactgatggaatatcccagtcagcatgtttagaaagacccaattctgcatcaagccagaattcaaccgatacaggcacttccggttctgctactgccgcccaaccagctgataacctcctgggagacatagacgacctggaggactttgtgtatagtcctgcccctcaaggtgtcacagtaagatgtcggataatccgggataaaaggggaatggatcggggtctcttccccacctactatatgtacttggaaaaagaagaaaatcagaagatatttcttcttgcagctagaaagcggaaaaagagcaaaacagccaactaccttatctccattgatccagttgatttatctcgtgaaggagaaagttatgtcggcaagcttagatccaacctcatggggaccaagtttacagtttatgaccgtggcatctgccccatgaagggccggggtttggtaggagcggcccacacccggcaggagctggctgccatctcctatgaaacaaacgtacttggatttaaaggtcctaggaaaatgtctgtgatcattcctggaatgacactgaatcataagcagatcccctatcagccacaaaacaaccatgacagtttgctctcaaggtggcagaacagaactatggaaaatctggttgagctgcacaacaaggcccccgtctggaacagtgacactcagtcctatgtcctcaacttccgtggccgggtcactcaggcgtctgtgaagaacttccagatagtccacaaaaatgaccctgattatatagtcatgcagtttggacgtgtggcagatgacgtgttcacactggattacaactacccactttgtgcagtacaggcctttggcatcggtctttctagctttgacagtaagctggcgtgtgaatgagagaacagtcaggcagggagcccttctccccacagagctttcaggagcagacagtggcctccccttcccctccctgccccaggacttaaagagcaatagtttgccccttttggaatgatctctgaatatataaaacacacacacaaagagcaatagtttgccccttttggaacgacccctgaatatataaaacacacacacgaagagcaatagtttgccccttttggaacgacccctgaatatataaaacacacacgaagagcaatagtttgccccttttggaacgacccctgaatatataaaacacacacacgaagagcaatagtttgccccttttggaacgacccctgaatatataaaacacacacacaccccgcgcactctcactccttttccaggtttcatagacttggtgagggatcacagcttagcatgggtgagagatgatttaaagcacagggagattcttgtcacattggggtctccaaagctagaatgggatttcatgtgcttggaaacttgcagtagaatcagggactgacatcgcagttcctctcctctcttcattccctcacagcagattggccggcaccaatcttagtcaagagtggctgtgatcacatttgtgatcaattatgtgagaattttatataattgtcttcatttcaattaaggctgaaagcataaactctagaggtgactcagtcaggactgacagtaatgtgataattgccttcattttcaacccaggagtgcctctcacagctatatgactacggatccattagtgaggagcgacacacacacctgtaggcatcctgtgcaaacactttgtcattatcaagagagatggcagtattgaccatttagtttagttaaaaaaaaaaaaaaaaaggtggcaggagaggctttggggaggatcagccagcagacatgagcactgctggcccgtgtggcagagctgtggactttcttctcggctccctcaaccctggctcaggcacagaaggtgttttgctacgtttttttgattattacacccctccacgtattatgtgactcttacaccagttcacccttcccagaatgtatccaaaccttgagaatgcaggagctctgtgagctccaccgtcagcaccattcagctgcatcccttgtgcacagaactgtttgccagcgttgggtgggacacccgtggcggctgctccctcagacctcccttctgtggactgacctctcacctccgcctgttgttcctgcaccacatcagataagcatgtgaaggagggccaactggcagctgcgggacccttggcttgtcccccaccgacaagtcccacctgctgggtgaggacgagactgtttccatctcaggcatgtatcccaccaagtgcctccctcacagccatgcccagaagcctcacacctcgtcaccaccaccaccccccaccccatcctgaggcactgcctggcagataaccctggttggccacagaagctattaatacacgacagcatgtggggaaggacttatggtgggccaggtggacctcatcctgcttcttcctccctctggtttaaagagatatataaactaatttcacataatttgtgtgtgcaggtgattggtttttacataagtcctatttataccttttatatgttacagaaataaaagttaatttatataaaaatg

SEQ ID NO: 22654 - DNA, 1951 bp, Homo sapiens
  misc_feature 1..1951: note = ENST00000397132
  source 1..1951: mol_type = unassigned DNA; mol_type = unassigned DNA
ggaagagtgtgtacgtggtgggggcttcctcggtggcgggcatggaggcttcgcgctgccggctcagtcccagcggcgacagtgtcttccatgaagaaatgatgaagatgcgacaggctaagctggattatcagaggctactacttgagaagaggcaaaggaaaaagcgccttgagccatttatggtgcagcccaatccagaagccaggctacgtcgggcaaagccaagggccagtgatgagcagactcccttggtgaactgtcatactccccacagcaatgtcatcttacatggtattgatggtccagctgctgtcctgaaaccagacgaagttcatgctccatcagtaagctcctctgttgtggaagaagatgctgaaaacaccgtggatactgcttccaagccaggacttcaggagcgtctccaaaagcatgatatctctgaaagtgtgaacttcgatgaggagactgatggaatatcccagtcagcatgtttagaaagacccaattctgcatcaagccagaattcaaccgatacaggcacttccggttctgctactgccgcccaaccagctgataacctcctgggagacatagacgacctggaggactttgtgtatagtcctgcccctcaaggtgtcacagtaagatgtcggataatccgggataaaaggggaatggatcggggtctcttccccacctactatatgtacttggaaaaagaagaaaatcagaagatatttcttcttgcagctagaaagcggaaaaagagcaaaacagccaactaccttatctccattgatccagttgatttatctcgtgaaggagaaagttatgtcggcaagcttagatccaacctcatggggaccaagtttacagtttatgaccgtggcatctgccccatgaagggccggggtttggtaggagcggcccacacccggcaggagctggctgccatctcctatgaaacaaacgtacttggatttaaaggtcctaggaaaatgtctgtgatcattcctggaatgacactgaatcataagcagatcccctatcagccacaaaacaaccatgacagtttgctctcaaggtggcagaacagaactatggaaaatctggttgagctgcacaacaaggcccccgtctggaacagtgacactcagtcctatgtcctcaacttccgtggccgggtcactcaggcgtctgtgaagaacttccagatagtccacaaaaatgaccctgattatatagtcatgcagtttggacgtgtggcagatgacgtgttcacactggattacaactacccactttgtgcagtacaggcctttggcatcggtctttctagctttgacaaatgtatccaaaccttgagaatgcaggagctctgtgagctccaccgtcagcaccattcagctgcatcccttgtgcacagaactgtttgccagcgttgggtgggacacccgtggcggctgctccctcagacctcccttctgtggactgacctctcacctccgcctgttgttcctgcaccacatcagataagcatgtgaaggagggccaactggcagctgcgggacccttggcttgtcccccaccgacaagtcccacctgctgggtgaggacgagactgtttccatctcaggcatgtatcccaccaagtgcctccctcacagccatgcccagaagcctcacacctcgtcaccaccaccaccccccaccccatcctgaggcactgcctggcagataaccctggttggccacagaagctattaatacacgacagcatgtggggaaggacttatggtgggccaggtggacctcatcctgcttcttcctccctctggtttaaagagatatataaactaatttcacataatttgtgtgtgcaggtgattggtttttacataagtcctatttataccttttatatgttacagaaataaaagttaattta

SEQ ID NO: 22655 - DNA, 542 bp, Homo sapiens
  misc_feature 1..542: note = ENST00000541678
  source 1..542: mol_type = unassigned DNA; mol_type = unassigned DNA
cattcctggaatgacactgaatcataagcagatcccctatcagccacaaaacaaccatgacagtttgctctcaaggtggcagaacagaactatggaaaatctggttgagctgcacaacaaggcccccgtctggaacagtgacactcagtcctatgtcctcaacttccgtggccgggtcactcaggcgtctgtgaagaacttccagatagtccacaaaaatgaccctgattatatagtcatgcagtttggacgtgtggcagatgacgtgttcacactggattacaactacccactttgtgcagtacaggcctttggcatcggtctttctagctttgacacagattggccggcaccaatcttagtcaagagtggctgtgatcacatttgtgatcaattatgagtgcctctcacagctatatgactacggatccattagtgaggagcgacacacacacctgtaggcatcctgtgcaaacactttgtcattatcaagagagatggcagtattgaccatttagtttagttaaaaaaaaaaaaaaaaa

SEQ ID NO: 22656 - DNA, 449 bp, Homo sapiens
  misc_feature 1..449: note = ENST00000538704
  source 1..449: mol_type = unassigned DNA; mol_type = unassigned DNA
cccctatcagccacaaaacaaccatgacagtttgctctcaaggtggcagaacagaactatggaaaatctggttgagctgcacaacaaggcccccgtctggaacagtgacactcagtcctatgtcctcaacttccgtggccgggtcactcaggcgtctgtgaagaacttccagatagtccacaaaaatgaccctgattatatagtcatgcagtttggacgtgtggcagatgacgtgttcacactggattacaactacccactttgtgcagtacaggcctttggcatcggtctttctagctttgacagagtgcctctcacagctatatgactacggatccattagtgaggagcgacacacacacctgtaggcatcctgtgcaaacactttgtcattatcaagagagatggcagtattgaccatttagtttagttaaaaaaaaaaaaaaaaa

SEQ ID NO: 22657 - DNA, 2930 bp, Homo sapiens
  misc_feature 1..2930: note = ENST00000504119
  source 1..2930: mol_type = unassigned DNA
agagaccctccccaatcccggcctgccaccacctggctcgcgcgcagccccggcccagaatgccttaacctgcgccgattgctgccgccgaggtgcccctcccctgtagggaccccgacgccgccagccccttcctcctttcccgcaggttagcctggcaaggaagataaagacatttgcaaccaagatggtaatcactagtgaaaatgatgaagacagaggaggtcaagaaaaagaaagtaaagaggagagtgtcttggcaatgctggggattatcgggaccattctgaacctgattgtgatcatatttgtctacatatacaccaccctgtgaatggcccagagcgtcctcagaggcctcagaatggccaaagacggaagtcctgcgtgtcggcgcatcactgaccagaccctgcgagaacaagcaggcttgacccgcacataccacccaatcaaatgcaccttcaaactttacaaaaggtcacacaaatagaccgatcctgctgcagggagcagacactaaagcacaatgattccaacaaaactcattcacagcactaggaactcaacgtctttggcagggggcccagaagaatgcttggaagaccagcctctgacaccatcagtgagcggatgggtgcagaaattcattattccagatcgctgacagatatcacatatttgaaaagatgaatagggcggacatggctcagatgtgtgtctcccaggacaagtgtttcatcttcacttgacgagctatttagtggaaaaaccacaggcgcagccctttgacaggcatcccattcatcaaaagtgtctaactatttgatactggggagataacttatttttcttttttcattggcttgacatgtgtatctgttcatgtcaaggtttataaatatatatttttaataaatgtgctctattttttagcatgaaccaaatacttggagaggcactcccagatccatagagctttccttagttttatctgctttgtcccctcctcccccaactacagatgttctgttgtggagccattctagtccttttgtctcatcttgagtcttttaccttgcgcttttgttctctctctctcctctctctctgcctctttggtctgaaggacattttcccatactgtcagccatggttttgggtgcatgttttaagattgtccattgagtggctttttgttgttatctcggagatataaaatgattgtgggcatgcagaccttagatgcaccctatctttactgagaattatgcatgaataagggctgagtgatagatcagcttaaaattaaaaggactacctttgaggaagaagagcgtggctatatttgcagatgaacttttgaacagaatattcagcttcttaccggcagcgttattgtttcattcttgtgaccattcgtttatcagattttgattttagcggtcatgtaccgcgagagttgggaagaacaagggggaaagctcgggattaggtgcattactccttcctttgcaagatacctgggatcctcctcaaaagcgggtggggtataaatgacacaagaactcccccaggagatctcatggtgattcaggctgtgaggacagccctgtgacaggtgacttttcagggacatgaggaggggatttaatgattgccctaaaggacttctgtatttttaaagcccctggtttacacccacatgaagctatttcctctctggcagggatggttgcataaaaacaaattagctcccttctggctccctgaaatgggcccttgcctggctacagtggcatggccttaaagagagggttagtattccttctgccattgccagctgtattagtctgttttcacactgctgaaaaagacatccccaagactgggcaatttacaaagaaagaggtttattggacttacagttccacgtggctgaggaggcctcacaattacggtggaaggtgaaaggcacgtctcacatggtggcagacaagagaagtgaacatgtgcaaggagactcccatttttaaaacagatctcgtgagactttttcactatcatgcaaacagcatgggaaacctgcccccgtgattcagttacctcccaccgggtccctcccacaacacatgggtattcaagatgagatttgggtggggttacagccaaactctatcaccagccttgcccctgggcagaagcagcagcagtctgcctggctggattcaaatgattctgaggcttctatagtctatgcctgcagatctctccctcacccatgctatagtgtctgaaattccaccattagagagtcatttcttgggctctgttaaatggaccaggctcttttataaagaaaatgcccctgagcagctggctctggcattgatttatgatatcttctcttccctgccagaaggaaggaagctaaggtgcatgtagggcgtactgtgtgcccaggcactgtgccagatgctttggatacttggagtcattgaattcttgtagtaaccctgtgagagagggagtcttttctccacattgtagaagaaggaaaaagggctcagagaggtcaagaaatgtccctgagatcacatggcttctagtggagtcaagatccaaacccaatgtgtctgattccttagcccttgggggtccggaggctgctgaacaagaaaggaggtggagaggagagaaagctgcaggcataccaccgcacacccttctccctcccctgtaaaaacaaccctgggaactccctggacactagcagaatatcatacactaaggataagggatgagaggaggctggttagaaataaagcagtgtcagggggaaggagctactcagtaggctctgtgtgattctagaaagactgtatgaaaattctgaacagtgaacagaataaacaataaaggtgcaatgg

SEQ ID NO: 22658 - DNA, 3197 bp, Homo sapiens
  misc_feature 1..3197: note = ENST00000503525
  source 1..3197: mol_type = unassigned DNA; mol_type = unassigned DNA
gtgctgctggcgcccggcccccgcggggtgcagctctgcgcgttctcatgctgtctctctctctttccctccgcgctgcctctccgaggtcctcccgccgagccccggcgcggggcatgaggagcccccgggtgccgcccagagaccagcaggctgcgcgcacacctagccagcggcagacggggacatgagcagcgcgcacggggtcccgcgcccggcggccagccctatccggcggcggccagcgggtcaacgctgcccgggagaatgaggcaggagccggcggcagcctcctttttttccttctcctcgccttcctgcggctccggcgctccgggtccgggccgggctgcggctctgctgcgtgccccgcgcgcccctcaaccgcctccggatgcgcttctcggttagcctggcaaggaagataaagacatttgcaaccaagatggtaatcactagtgaaaatgatgaagacagaggaggtcaagaaaaagaaagtaaagaggagagtgtcttggcaatgctggggattatcgggaccattctgaacctgattgtgatcatatttgtctacatatacaccaccctgtgaatggcccagagcgtcctcagaggcctcagaatggccaaagacggaagtcctgcgtgtcggcgcatcactgaccagaccctgcgagaacaagcaggcttgacccgcacataccacccaatcaaatgcaccttcaaactttacaaaaggtcacacaaatagaccgatcctgctgcagggagcagacactaaagcacaatgattccaacaaaactcattcacagcactaggaactcaacgtctttggcagggggcccagaagaatgcttggaagaccagcctctgacaccatcagtgagcggatgggtgcagaaattcattattccagatcgctgacagatatcacatatttgaaaagatgaatagggcggacatggctcagatgtgtgtctcccaggacaagtgtttcatcttcacttgacgagctatttagtggaaaaaccacaggcgcagccctttgacaggcatcccattcatcaaaagtgtctaactatttgatactggggagataacttatttttcttttttcattggcttgacatgtgtatctgttcatgtcaaggtttataaatatatatttttaataaatgtgctctattttttagcatgaaccaaatacttggagaggcactcccagatccatagagctttccttagttttatctgctttgtcccctcctcccccaactacagatgttctgttgtggagccattctagtccttttgtctcatcttgagtcttttaccttgcgcttttgttctctctctctcctctctctctgcctctttggtctgaaggacattttcccatactgtcagccatggttttgggtgcatgttttaagattgtccattgagtggctttttgttgttatctcggagatataaaatgattgtgggcatgcagaccttagatgcaccctatctttactgagaattatgcatgaataagggctgagtgatagatcagcttaaaattaaaaggactacctttgaggaagaagagcgtggctatatttgcagatgaacttttgaacagaatattcagcttcttaccggcagcgttattgtttcattcttgtgaccattcgtttatcagattttgattttagcggtcatgtaccgcgagagttgggaagaacaagggggaaagctcgggattaggtgcattactccttcctttgcaagatacctgggatcctcctcaaaagcgggtggggtataaatgacacaagaactcccccaggagatctcatggtgattcaggctgtgaggacagccctgtgacaggtgacttttcagggacatgaggaggggatttaatgattgccctaaaggacttctgtatttttaaagcccctggtttacacccacatgaagctatttcctctctggcagggatggttgcataaaaacaaattagctcccttctggctccctgaaatgggcccttgcctggctacagtggcatggccttaaagagagggttagtattccttctgccattgccagctgtattagtctgttttcacactgctgaaaaagacatccccaagactgggcaatttacaaagaaagaggtttattggacttacagttccacgtggctgaggaggcctcacaattacggtggaaggtgaaaggcacgtctcacatggtggcagacaagagaagtgaacatgtgcaaggagactcccatttttaaaacagatctcgtgagactttttcactatcatgcaaacagcatgggaaacctgcccccgtgattcagttacctcccaccgggtccctcccacaacacatgggtattcaagatgagatttgggtggggttacagccaaactctatcaccagccttgcccctgggcagaagcagcagcagtctgcctggctggattcaaatgattctgaggcttctatagtctatgcctgcagatctctccctcacccatgctatagtgtctgaaattccaccattagagagtcatttcttgggctctgttaaatggaccaggctcttttataaagaaaatgcccctgagcagctggctctggcattgatttatgatatcttctcttccctgccagaaggaaggaagctaaggtgcatgtagggcgtactgtgtgcccaggcactgtgccagatgctttggatacttggagtcattgaattcttgtagtaaccctgtgagagagggagtcttttctccacattgtagaagaaggaaaaagggctcagagaggtcaagaaatgtccctgagatcacatggcttctagtggagtcaagatccaaacccaatgtgtctgattccttagcccttgggggtccggaggctgctgaacaagaaaggaggtggagaggagagaaagctgcaggcataccaccgcacacccttctccctcccctgtaaaaacaaccctgggaactccctggacactagcagaatatcatacactaaggataagggatgagaggaggctggttagaaataaagcagtgtcagggggaaggagctactcagtaggctctgtgtgattctagaaagactgtatgaaaattctgaacagtgaacagaataaacaataaaggtgcaatggaaaaaaata

SEQ ID NO: 22659 - DNA, 767 bp, Homo sapiens
  misc_feature 1..767: note = ENST00000554321
  source 1..767: mol_type = unassigned DNA; mol_type = unassigned DNA
atgctgtctctctctctttccctccgcgctgcctctccgaggtcctcccgccgagccccggcgcggggcatgaggagcccccgggtgccgcccagagaccagcaggctgcgcgcacacctagccagcggcagacggggacatgagcagcgcgcacggggtcccgcgcccggcggccagccctatccggcggcggccagcgggtcaacgctgcccgggagaatgaggcaggagccggcggcagcctcctttttttccttctcctcgccttcctgcggctccggcgctccgggtccgggccgggctgcggctctgctgcgtgccccgcgcgcccctcaaccgcctccggatgcgcttctcgatctcagcccgctgtcgccttctctctgaccctggtcccttccactgcaggctgttgctccggtgtctctgggctgctccaccacgtggtgcctgcccatcatggcatccaccaccaggtggcctttttcttggttagcctggcaaggaagataaagacatttgcaaccaagatggtaatcactagtgaaaatgatgaagacagaggaggtcaagaaaaagaaagtaaagaggagagtgtcttggcaatgctggggattatcgggaccattctgaacctgattgtgatcatatttgtctacatatacaccaccctgtgaatggcccagagcgtcctcagaggcctcagaatggccaaagacggaagtcctgcgtgtcggcgcatcactgaccagaccctgcgagaaca

SEQ ID NO: 22660 - DNA, 731 bp, Homo sapiens
  misc_feature 1..731: note = ENST00000503191
  source 1..731: mol_type = unassigned DNA; mol_type = unassigned DNA
gaagatctgcctccttcctcttcggcttcatgcatgatcgtaagtttcctgaggcctcctcagccatgcttcctgcatagcctgcagaaatgctggagtacaatggcaccatctcgactcaccacaacctctgcctcccgggttcaagcgagtctcctgcctcagtctcccaagtagctgggattacagaatcttttagctgaaaaagtagagcagctgatggaatggagttccagacgctcaatcttccgaatgaatggtgataaattccgaaaatttataaaggcaccacctcgaaactattccatgattgttatgttcactgctcttcagcctcagcggcagtgttctgtgtgcagctcaacatgaactctgctcctacattcatgcattttcctccaaaaggcagacctaagagagctgatacttttgacctccaaagaattggatttgcagctgagcaactagcaaagtggattgctgacagaacggatgttcatattcgggttttcagaccacccaactactctggtaccattgctttggccctgttagtgtcgcttgttggaggtttgctttatttgagaaggaacaacttggagttcatctataacaagactggttgggccatggtgtctctgtgtatagtctttgctatgacttctggccagatgtggaaccatatccgtggacctccatatgctcataagaacccacacaatggacaagtg

SEQ ID NO: 22661 - DNA, 3683 bp, Homo sapiens
  misc_feature 1..3683: note = ENST00000382020
  source 1..3683: mol_type = unassigned DNA; mol_type = unassigned DNA
gcctttccaggtcttctcccggtgaaccggatgctctgtcagtctcctcctctgcgtcctcggccgcggcccgggtccctcgcaaagccgctgccatcccggagggcccagccagcgggctcccggaggctggccgggcaggcgtggtgcgcggtaggagctgggcgcgcacggctaccgcgcgtggaggagacactgccctgccgcgatgggggcccggggcgctccttcacgccgtaggcaagcggggcggcggctgcggtacctgcccaccgggagctttcccttccttctcctgctgctgctgctctgcatccagctcgggggaggacagaagaaaaaggagaatcttttagctgaaaaagtagagcagctgatggaatggagttccagacgctcaatcttccgaatgaatggtgataaattccgaaaatttataaaggcaccacctcgaaactattccatgattgttatgttcactgctcttcagcctcagcggcagtgttctgtgtgcaggcaagctaatgaagaatatcaaatactggcgaactcctggcgctattcatctgctttttgtaacaagctcttcttcagtatggtggactatgatgaggggacagacgtttttcagcagctcaacatgaactctgctcctacattcatgcattttcctccaaaaggcagacctaagagagctgatacttttgacctccaaagaattggatttgcagctgagcaactagcaaagtggattgctgacagaacggatgttcatattcgggttttcagaccacccaactactctggtaccattgctttggccctgttagtgtcgcttgttggaggtttgctttatttgagaaggaacaacttggagttcatctataacaagactggttgggccatggtgtctctgtgtatagtctttgctatgacttctggccagatgtggaaccatatccgtggacctccatatgctcataagaacccacacaatggacaagtgagctacattcatgggagcagccaggctcagtttgtggcagaatcacacattattctggtactgaatgccgctatcaccatggggatggttcttctaaatgaagcagcaacttcgaaaggcgatgttggaaaaagacggataatttgcctagtgggattgggcctggtggtcttcttcttcagttttctactttcaatatttcgttccaagtaccacggctatccttatagctttttaattaaatgaagccaagtgggatttgcataaagtgaatgtttaccatgaagataaactgttcctgactttatactattttgaattcattcatttcattgtgatcagctagcttattcttgtgtactttttttaaactgtgggttttcctagtaaatttaatttacagaaatcaatggtagcatttagtaatctacaaaggaaatatcaaagtgtttttcaagcctgttatattcagtgtgtgccacaggattgaaataaatgacaatgtaattatgaattcatgttttagagctgtttactcattagtaaaggaccgcaatgttagtaaagaaaacctatgaaatgtatgttaaagattcttagtattgtacagggataaagcaaatgcatgaaaatatgtcatgtactgaaaattaaacttacttcagtttcagttataaaggacgtgcactgttacgaatagtgttttgttattaattataactagataaaggtatataggacagggaactggatgaatggtacctacaatttggatgcctaaccaaggactagagctccttcttgagatctaaatctaaagtaaatgtgcattaaagcagtgtgcttcaaaggcatcagacgatgaaagcaacataccacaactaggagttatttctcaaacttaaatgtcctctgggaatccagacttaaaaataagagcaaacttaacacactatccattttcgagcaaacctaacccactatatccattttgctcatgtgttttatgcaaccagctttccatcaaatcctcaatctttgaatccaggtaaaaggttaattatcctaggattagtgaatgattcaatgaagctttcttgaaaacaaacataggagtgtaatgtactattatgtttgtatcctgttttagtttataaagcactttcacatacattatggtatttcttcctcacaataaccttgtaaattagtcaggaaatgtaaattttatctgactcatagaactaatggaagctgaaagccaaaaataaagtttataaccaggccttcaaactctcaaacatggatttttatattctgtggagttatccaaattaattagggtttaggaaagcagttcttcttgagtcagttcaataagtgtttgctttttgtttttaaggtttgttatctaattttcattaagatttgagtaacagaccatggagaattgttttcattgggagttccagctatatagcctcaaacaagaaacgggtgtacaaccattgagtttacttacttaaatctgtgaatttcaatgaagaatgggaatataaaggcctactggggcatgtttatcaagttatatcccagggcaatgtgtatgctagcaggatgaatgctatcttttcaaaacataatattcagtgaaaattacgtaataattgtaagtttataatcatactcccaaatctgttactaaaaataacataaattctcctagttcatgtacttagatgaataaatttagttttggaatgacgtttatggaaaagcaatagatgaacttaatcatttgatcactgcctatcactaggcagaacttgacctgtaattcttaatccattgtagattttttacattttactcaaaacttcatacatagagactctcaggtcaaattttacaagtattaaacatttgttaattataatcacttttgtttgtatccttaaatctcagaattatcttgcagttaatatgcagctgattaaatgatattacaaattatctctaatctcactgtaaatcttttaatcatatcaaagtcaggtcatcctcagacactataactaagatagataaggagtactttactataccatattagtaaaggttttctagctcttattttctaatttcctctgagcatttaaaattacatccagtgataaaaacaatatttttttttcagaatttcatgctttaaaaagctgtggcttctctatagacaactgttacattagggaagtgattctagagcaaaatatactgcctcaacataagtcgttactgactggaaaatgctataggcagaattgcaaagagtggctcaaacatatagtttgcttgcagaatgtaacgtgcaaaatcacatacatgcgatgtatttacctttgctagacaatgagaattgaataattgatttgtacctggtatgttatatcctccagtgtcactttttaaccagattcactgtgcgttccaaactgtcataaaaattgattatatgtttaacaattgtttttctactacagtggagagaaaaatcccaattataaaattccacctaaaggagtttcattttgtaataacatctgattaataacttgttgcattttgcttaacatactgttcctggcattagatattcacatgagtaagcccagtagca

SEQ ID NO: 22662 - DNA, 1627 bp, Homo sapiens
  misc_feature 1..1627: note = ENST00000515859
  source 1..1627: mol_type = unassigned DNA; mol_type = unassigned DNA
ttccaggtcttctcccggtgaaccggatgctctgtcagtctcctcctctgcgtcctcggccgcggcccgggtccctcgcaaagccgctgccatcccggagggcccagccagcgggctcccggaggctggccgggcaggcgtggtgcgcggtaggagctgggcgcgcacggctaccgcgcgtggaggagacactgccctgccgcgatgggggcccggggcgctccttcacgccgtaggcaagcggggcggcggctgcggtacctgcccaccgggagctttcccttccttctcctgctgctgctgctctgcatccagctcgggggaggacagaagaaaaaggagaatcttttagctgaaaaagtagagcagctgatggaatggagttccagacgctcaatcttccgaatgaatggtgataaattccgaaaatttataaaggcaccacctcgaaactattccatgattgttatgttcactgctcttcagcctcagcggcagtgttctgtgtgcaggcaagctaatgaagaatatcaaatactggcgaactcctggcgctattcatctgctttttgtaacaagctcttcttcagtatggtggactatgatgaggggacagacgtttttcagcagctcaacatgaactctgctcctacattcatgcattttcctccaaaaggcagacctaagagagctgatacttttgacctccaaagaattggatttgcagctgagcaactagcaaagtggattgctgacagaacggatgttcatattcgggttttcagaccacccaactactctggtaccattgctttggccctgttagtgtcgcttgttggaggtttgctttatttgagaaggaacaacttggagttcatctataacaagactggttgggccatggtgtctctgtgtatagtctttgctatgacttctggccagatgtggaaccatatccgtggacctccatatgctcataagaacccacacaatggacaagtgatgccgctatcaccatggggatggttcttctaaatgaagcagcaacttcgaaaggcgatgttggaaaaagacggataatttgcctagtgggattgggcctggtggtcttcttcttcagttttctactttcaatatttcgttccaagtaccacggctatccttatagctttttaattaaatgaagccaagtgggatttgcataaagtgaatgtttaccatgaagataaactgttcctgactttatactattttgaattcattcatttcattgtgatcagctagcttattcttgtgtactttttttaaactgtgggttttcctagtaaatttaatttacagaaatcaatggtagcatttagtaatctacaaaggaaatatcaaagtgtttttcaagcctgttatattcagtgtgtgccacaggattgaaataaatgacaatgtaattatgaattcatgttttagagctgtttactcattagtaaaggaccgcaatgttagtaaagaaaacctatgaaatgtatgttaaagattcttagtattgtacagggataaagcaaatgcatgaaaatatgtcatgtactgaaaattaaacttacttcagtttcagttataaaggacgtgcact

SEQ ID NO: 22663 - DNA, 1546 bp, Homo sapiens
  misc_feature 1..1546: note = ENST00000506802
  source 1..1546: mol_type = unassigned DNA; mol_type = unassigned DNA
gtcttctcccggtgaaccggatgctctgtcagtctcctcctctgcgtcctcggccgcggcccgggtccctcgcaaagccgctgccatcccggagggcccagccagcgggctcccggaggctggccgggcaggcgtggtgcgcggtaggagctgggcgcgcacggctaccgcgcgtggaggagacactgccctgccgcgatgggggcccggggcgctccttcacgccgtaggcaagcggggcggcggctgcggtacctgcccaccgggagctttcccttccttctcctgctgctgctgctctgcatccagctcgggggaggacagaagaaaaaggagaatcttttagctgaaaaagtagagcagctgatggaatggagttccagacgctcaatcttccgaatgaatggtgataaattccgaaaatttataaaggcaccacctcgaaactattccatgattgttatgttcactgctcttcagcctcagcggcagtgttctgtgtgcaggcaagctaatgaagaatatcaaatactggcgaactcctggcgctattcatctgctttttgtaacaagctcttcttcagtatggtggactatgatgaggggacagacgtttttcagcagctcaacatgaactctgctcctacattcatgcattttcctccaaaaggcagacctaagagagctgatacttttgacctccaaagaattggatttgcagctgagcaactagcaaagtggattgctgacagaacggatgttcatattcgggttttcagaccacccaactactctggtaccattgctttggccctgttagtgtcgcttgttggaggtttgctttatttgagaaggaacaacttggagttcatctataacaagactggttgggccatggtgtctctgtgtatagtctttgctatgacttctggccagatgtggaaccatatccgtggacctccatatgctcataagaacccacacaatggacaagtgagctacattcatgggagcagccaggctcagtttgtggcagaatcacacattattctggtactgaatgccgctatcaccatggggatggttcttctaaatgaagcagcaacttcgaaaggcgatgttggaaaaagacggactttttaattaaatgaagccaagtgggatttgcataaagtgaatgtttaccatgaagataaactgttcctgactttatactattttgaattcattcatttcattgtgatcagctagcttattcttgtgtactttttttaaactgtgggttttcctagtaaatttaatttacagaaatcaatggtagcatttagtaatctacaaaggaaatatcaaagtgtttttcaagcctgttatattcagtgtgtgccacaggattgaaataaatgacaatgtaattatgaattcatgttttagagctgtttactcattagtaaaggaccgcaatgttagtaaagaaaacctatgaaatgtatgttaaagattcttagtattgtacagggataaagcaaatgcatgaaaatatgtcatg

SEQ ID NO: 22664 - DNA, 1452 bp, Homo sapiens
  misc_feature 1..1452: note = ENST00000510836
  source 1..1452: mol_type = unassigned DNA; mol_type = unassigned DNA
tcctcggccgcggcccgggtccctcgcaaagccgctgccatcccggagggcccagccagcgggctcccggaggctggccgggcaggcgtggtgcgcggtaggagctgggcgcgcacggctaccgcgcgtggaggagacactgccctgccgcgatgggggcccggggcgctccttcacgccgtaggcaagcggggcggcggctgcggtacctgcccaccgggagctttcccttccttctcctgctgctgctgctctgcatccagctcgggggaggacagaagaaaaaggagaatcttttagctgaaaaagtagagcagctgatggaatggagttccagacgctcaatcttccgaatgaatggtgataaattccgaaaatttataaaggcaccacctcgaaactattccatgattgttatgttcactgctcttcagcctcagcggcagtgttctgtgtgcaggcaagctaatgaagaatatcaaatactggcgaactcctggcgctattcatctgctttttgtaacaagctcttcttcagtatggtggactatgatgaggggacagacgtttttcagcagctcaacatgaactctgctcctacattcatgcattttcctccaaaaggcagacctaagagagctgatacttttgacctccaaagaattggatttgcagctgagcaactagcaaagtggattgctgacagaacggatgttcatattcgggttttcagaccacccaactactctggtaccattgctttggccctgttagtgtcgcttgttggaggtttgctttatttgagaaggaacaacttggagttcatctataacaagactggttgggccatggtgtctctgtgtatagtctttgctatgacttctggccagatgtggaaccatatccgtggacctccatatgctcataagaacccacacaatggacaagtgatgccgctatcaccatggggatggttcttctaaatgaagcagcaacttcgaaaggcgatgttggaaaaagacggactttttaattaaatgaagccaagtgggatttgcataaagtgaatgtttaccatgaagataaactgttcctgactttatactattttgaattcattcatttcattgtgatcagctagcttattcttgtgtactttttttaaactgtgggttttcctagtaaatttaatttacagaaatcaatggtagcatttagtaatctacaaaggaaatatcaaagtgtttttcaagcctgttatattcagtgtgtgccacaggattgaaataaatgacaatgtaattatgaattcatgttttagagctgtttactcattagtaaaggaccgcaatgttagtaaagaaaacctatgaaatgtatgttaaagattcttagtattgtacagggataaagcaaatgcatgaaaatatgtcatgtactgaaaattaaact

SEQ ID NO: 22665 - DNA, 1266 bp, Homo sapiens
  misc_feature 1..1266: note = ENST00000509380
  source 1..1266: mol_type = unassigned DNA; mol_type = unassigned DNA
ctcggccgcggcccgggtccctcgcaaagccgctgccatcccggagggcccagccagcgggctcccggaggctggccgggcaggcgtggtgcgcggtaggagctgggcgcgcacggctaccgcgcgtggaggagacactgccctgccgcgatgggggcccggggcgctccttcacgccgtaggcaagcggggcggcggctgcggtacctgcccaccgggagctttcccttccttctcctgctgctgctgctctgcatccagctcgggggaggacagaagaaaaaggagaatcttttagctgaaaaagtagagcagctgatggaatggagttccagacgctcaatcttccgaatgaatggtgataaattccgaaaatttataaaggcaccacctcgaaactattccatgattgttatgttcactgctcttcagcctcagcggcagtgttctgtgtgcaggcaagctaatgaagaatatcaaatactggcgaactcctggcgctattcatctgctttttgtaacaagctcttcttcagtatggtggactatgatgaggggacagacgtttttcagcagctcaacatgaactctgctcctacattcatgcattttcctccaaaaggcagacctaagagagctgatacttttgacctccaaagaattggatttgcagctgagcaactagcaaagtggattgctgacagaacggatgttcatattcgggttttcagaccacccaactactctggtaccattgctttggccctgttagtgtcgcttgttggaggtttgctttatttgagaaggaacaacttggagttcatctataacaagactggttgggccatggtgtctctgtgtatagtctttgctatgacttctggccagatgtggaaccatatccgtggacctccatatgctcataagaacccacacaatggacaagtgagctacattcatgggagcagccaggctcagtttgtggcagaatcacacattattctggtactgacatcttagcagtatactttatctggataaagtgatgactatcgaaacacatcaggaataccgagctgaaggatgaaaagctgtgttgagatcatccttttattgtatggcaggaattctccaaggtttaatttcatggatcattgacatcaagctgagatttaggattcaaataaatttcacaagcagtgtgaatgttttcatatagatcttagcagtgatacataaaagaattaaaagtctgtattctcttta

SEQ ID NO: 22666 - DNA, 1498 bp, Homo sapiens
  misc_feature 1..1498: note = ENST00000503731
  source 1..1498: mol_type = unassigned DNA; mol_type = unassigned DNA
cggccgcggcccgggtccctcgcaaagccgctgccatcccggagggcccagccagcgggctcccggaggctggccgggcaggcgtggtgcgcggtaggagctgggcgcgcacggctaccgcgcgtggaggagacactgccctgccgcgatgggggcccggggcgctccttcacgccgtaggcaagcggggcggcggctgcggtacctgcccaccgggagctttcccttccttctcctgctgctgctgctctgcatccagctcgggggaggacagaagaaaaaggagaatcttttagctgaaaaagtagagcagctgatggaatggagttccagacgctcaatcttccgaatgaatggtgataaattccgaaaatttataaaggcaccacctcgaaactattccatgattgttatgttcactgctcttcagcctcagcggcagtgttctgtgtgcaggcaagctaatgaagaatatcaaatactggcgaactcctggcgctattcatctgctttttgtaacaagctcttcttcagtatggtggactatgatgaggggacagacgtttttcagcagctcaacatgaactctgctcctacattcatgcattttcctccaaaaggcagacctaagagagctgatacttttgacctccaaagaattggatttgcagctgagcaactagcaaagtggattgctgacagaacggatgttcatattcgggttttcagaccacccaactactctggtaccattgctttggccctgttagtgtcgcttgttggaggtttgctttatttgagaaggaacaacttggagttcatctataacaagactggttgggccatggtgtctctgtgtatagtctttgctatgacttctggccagatgtggaaccatatccgtggacctccatatgctcataagaacccacacaatggacaagtgagctacattcatgggagcagccaggctcagtttgtggcagaatcacacattattctggtactgaatgccgctatcaccatggggatggttcttctaaatgaagcagcaacttcgaaaggcgatgttggaaaaagacggataatttgcctagtgggattgggcctggtggtcttcttcttcagttttctactttcaatatttcgttccaagtaccacggctatccttatagtgatctggactttgagtgagaagatgtgatttggaccatggcacttaaaaactctataacctcagctttttaattaaatgaagccaagtgggatttgcataaagtgaatgtttaccatgaagataaactgttcctgactttatactattttgaattcattcatttcattgtgatcagctagcttattcttgtgtactttttttaaactgtgggttttcctagtaaatttaatttacagaaatcaatggtagcatttagtaatctacaaaggaaatatcaaagtgtttttcaagcctgttatattcagtgtgtgccacaggat

SEQ ID NO: 22667 - DNA, 727 bp, Homo sapiens
  misc_feature 1..727: note = ENST00000507400
  source 1..727: mol_type = unassigned DNA; mol_type = unassigned DNA
agtttgatctcagactgcagtgctagcaatgagcgagactccgtgggtgtaggaccctccgagccagaatcttttagctgaaaaagtagagcagctgatggaatggagttccagacgctcaatcttccgaatgaatggtgataaattccgaaaatttataaaggcaccacctcgaaactattccatgattgttatgttcactgctcttcagcctcagcggcagtgttctgtgtgcaggcaagctaatgaagaatatcaaatactggcgaactcctggcgctattcatctgctttttgtaacaagctcttcttcagtatggtggactatgatgaggggacagacgtttttcagcagctcaacatgaactctgctcctacattcatgcattttcctccaaaaggcagacctaagagagctgatacttttgacctccaaagaattggatttgcagctgagcaactagcaaagtggattgctgacagaacggatgttcatattcgggttttcagaccacccaactactctggtaccattgctttggccctgttagtgtcgcttgttggaggtttgctttatttgagaaggaacaacttggagttcatctataacaagactggttgggccatggtgtctctgtgtatagtctttgctatgacttctggccagatgtggaaccatatccgtggacctccatatgctcataagaacccacacaatggacaagtg

SEQ ID NO: 22668 - DNA, 493 bp, Homo sapiens
  misc_feature 1..493: note = ENST00000509177
  source 1..493: mol_type = unassigned DNA; mol_type = unassigned DNA
agaatcttttagctgaaaaagtagagcagctgatggaatggagttccagacgctcaatcttccgaatgaatggtgataaattccgaaaatttataaaggcaccacctcgaaactattccatgattgttatgttcactgctcttcagcctcagcggcagtgttctgtgtgcaggcaagctaatgaagaatatcaaatactggcgaactcctggcgctattcatctgctttttgtaacaagctcttcttcagtatggtggactatgatgaggggacagacgtttttcagcaggtaaagagttatatcgtattcatatatttaacatagttgtttgtggtcgatacatttttgtttgtcacataaaaatacaattcattcatcgtctgaacctgggaggcggaggttgcagtgagccgagattgtgccactgcattccaggtggaggacagagcaagacttttacacacacacacacacacacacacacacacaca

SEQ ID NO: 22669 - DNA, 1203 bp, Homo sapiens
  misc_feature 1..1203: note = ENST00000511783
  source 1..1203: mol_type = unassigned DNA; mol_type = unassigned DNA
aatcttttagctgaaaaagtagagcagctgatggaatggagttccagacgctcaatcttccgaatgaatggtgataaattccgaaaatttataaaggcaccacctcgaaactattccatgattgttatgttcactgctcttcagcctcagcggcagtgttctgtgtgcaggcaagctaatgaagaatatcaaatactggcgaactcctggcgctattcatctgctttttgtaacaagctcttcttcagtatggtggactatgatgaggggacagacgtttttcagcagctcaacatgaactctgctcctacattcatgcattttcctccaaaaggcagacctaagagagctgatacttttgacctccaaagaattggatttgcagctgagcaactagcaaagtggattgctgacagaacggatgttcatattcgggttttcagaccacccaactactctggtaccattgctttggccctgttagtgtcgcttgttggaggtttgctttatttgagaaggaacaacttggagttcatctataacaagactggttgggccatggtgtctctgtgtatagtctttgctatgacttctggccagatgtggaaccatatccgtggacctccatatgctcataagaacccacacaatggacaagtgagctacattcatgggagcagccaggctcagtttgtggcagaatcacacattattctggtactgaatgccgctatcaccatggggatggttcttctaaatgaagcagcaacttcgaaaggcgatgttggaaaaagacggataatttgcctagtgggattgggcctggtggtcttcttcttcagttttctactttcaatatttcgttccaagtaccacggctatccttatagtgatctggactttgagtgagaagatgtgatttggaccatggcacttaaaaactctataacctcaggcaaaagtcctcagataaaaatgtctaccaaaagactgacacgtggagttaatcatttgacagatgcaatgcttccacccccaacaaatatactttcttaacttctgtttgttatcacttagggaaaaaaggcagtcaacaaatatatttcattctatctaggaaaaatgtagccaaatcttttttcccattaacaaataatgtaagccttaatattcaagggtaataaaaaatacaagtcttccaaa

SEQ ID NO: 22670 - DNA, 457 bp, Homo sapiens
  misc_feature 1..457: note = ENST00000508446
  source 1..457: mol_type = unassigned DNA; mol_type = unassigned DNA
tgacttctggccagatgtggaaccatatccgtggacctccatatgctcataagaacccacacaatggacaagtgtttaaccattctggaacattgtgttcagagccagaaaaattaatagattttattcacatctatgtctacggcttccttgacaactactgcagatgccgctatcaccatggggatggttcttctaaatgaagcagcaacttcgaaaggcgatgttggaaaaagacggactttttaattaaatgaagccaagtgggatttgcataaagtgaatgtttaccatgaagataaactgttcctgactttatactattttgaattcattcatttcattgtgatcagctagcttattcttgtgtactttttttaaactgtgggttttcctagtaaatttaatttacagaaatcaatggtagcatttagtaatctacaaaggaaatatcaaa

SEQ ID NO: 22671 - DNA, 573 bp, Homo sapiens
  misc_feature 1..573: note = ENST00000507316
  source 1..573: mol_type = unassigned DNA; mol_type = unassigned DNA
agtttaaccattctggaacattgtgttcagagccagaaaaattaatagattttattcacatctatgtctacggcttccttgacaactactgcagatgccgctatcaccatggggatggttcttctaaatgaagcagcaacttcgaaaggcgatgttggaaaaagacggataatttgcctagtgggattgggcctggtggtcttcttcttcagttttctactttcaatatttcgttccaagtaccacggctatccttatagtgatctggactttgagtgagaagatgtgatttggaccatggcacttaaaaactctataacctcagggagaagtcctcagataaaaatgtctaccaaaagactgacacgtggagttaatcatttgacagatgcaatgcttccacccccaacaaatatactttcttaacttctgtttgttatcacttagggaaaaaaggcagtcaacaaatatatttcattctatctaggaaaaatgtagccaaatcttttttcccattaacaaataatgtaagccttaatattcaagggtaataaaaaatacaagtcttccaaa

SEQ ID NO: 22672 - DNA, 555 bp, Homo sapiens
  misc_feature 1..555: note = ENST00000511342
  source 1..555: mol_type = unassigned DNA; mol_type = unassigned DNA
tactgcagatgccgctatcaccatggggatggttcttctaaatgaagcagcaacttcgaaaggcgatgttggaaaaagacggataatttgcctagtgggattgggcctggtggtcttcttcttcagttttctactttcaatatttcgttccaagtaccacggctatccttataggtaatatctttatactaacatgaatgtttttatttttaactaatagaacagagtttcagtggttaatatataattaaggatgaatgtaaagttgctgtgtggtttttttaaattcagttaagcaagtttttgagcacctgccatgtgttcagcatagtgaagtacacaaaggagatataaggcatggttcttgttccctgacagcatgtagtttctttctagacatacatatttttatataacaaatgaggtttaagctcattttgaggacttgaaaatttttatcttcccttagtttgtcgtgatttcgacttcatttgcaagattgttttctcatataattcactgttcattgtctaataaactttgtattatcttttg

SEQ ID NO: 22673 - DNA, 3942 bp, Homo sapiens
  misc_feature 1..3942: note = ENST00000222567
  source 1..3942: mol_type = unassigned DNA
aaaacgagcgccggggacatgggattgtgcttgcgtcaacggcgcgcgccgtgggaaccttgacaagcagcatggctgcaggttgctcagaggcgccgcggccagcggcggcttctgatgggtctctggtagggcaggctggcgtcctgccttgcctagagttgccgacttatgccgctgcttgtgcgctggtgaacagtcgctactcatgcctggtggccgggccgcaccaaaggcacatcgcgctgtcgccccgctaccttaacaggaaacgcaccggcattcgagaacagcttgatgcggagctccttcgctattctgagagccttttaggtgtccctattgcatatgataacatcaaagttgtgggagagcttggagatatttatgatgatcaaggacacattcatcttaacattgaagccgattttgttattttctgccctgaaccagggcagaagcttatgggtatagttaataaagtgtcttctagccacattggctgtttagtacatgggtgtttcaatgcctccattcctaaacctgagcagttgtcagctgagcagtggcaaaccatggagataaacatgggtgatgaactagaatttgaagtatttcgtttagactcagatgctgctggagtattctgcattcggggaaaactaaatatcacaagtttacaattcaagcgctctgaagtttctgaagaagttacagaaaatggcactgaggaagctgctaaaaaacctaaaaagaagaaaaagaagaaagacccagagacatatgaagtggacagtggtaccacaaagctagcagatgatgcagatgacactccaatggaagagtcagccctgcagaatactaataatgcgaatggcatctgggaggaggagccaaagaaaaagaagaagaagaaaaagcaccaggaagttcaggaccaggaccctgttttccaaggcagtgactccagtggttaccaaagtgaccataaaaagaaaaaaaagaaaagaaaacacagtgaagaggccgaatttaccccacctttgaaatgctcaccaaaaagaaaagggaaaagtaattttctttagtgtattttaaacacgattcagtttttaaaagatcgatctacatacaatagatgaataaatgttttcagtgatatgaaaaggttaagtatgccagtagtttacaaaacagaaaatacttaactaggagtaggaggctttatatgctaaaaatgataaaactgactgtaaattaatttggggaaagccagtattgttaaaataccattttatacaaaataaaaagctgctctcactgtcagctctcatattcttccaggttttgcactctacataaaattatttctacaatgtcaagactagccaaaggactttataatacaatattatattactaaagaatgagttaagtttgagattttgatgatttgattttgtgtgtgtttaataggcttcaccttattacatgctattttattttgcttttttaaaaactcaggacattaactaattttaggttttcctttatcatggctttctacagtatttctattgtttaacataaaatagtttgccaaagaagtttctgaagtcttcacagctcttaaaagccaggccagtactgactgtgtggtggtaaatgctattcattattttcttttctttcttccaagtgcatgtgtgtccttgtcttcttaagtctgagaggttgctggaaaggactgttttcttgtacttgttcatttgtgcctcagccattctagttttgttgtgtgttggaggacagtctaatgaagacaggataaatgtgattctgactagtgggaaatttcagattactttttaatgattggaatgggctataagatattgtgctgaagagaaaacagttgttctgttcactgctttcattgagaaaatgtggaatgtctcttgactaattgacaaagtgtaatgaaatgacaagctggttgaagctggtaatcaatgcatggccatatttattcattttccacacacttgaccatctactttgtataacacattctgctaaggcccagggatacaatggcaaacaagatagatgtagttccttcccttgtggcatgtcataagagaaacagatgtgcatatacacacaataaataagaaaattaataattgtattaagtggtatgaaaaaaagggggaggattgttcactcactgttacctgtgttagtatctgcaaatgcatgaatggttgaactcccatgtcagcatttttgttgccatttatttagtaccagacatagtgctggtctcacagcttaatatttggtaatgaataaattctgctagtggtatatgttgatctgaacttacaatgatgggatatagaattggcagagtggcagatgttcacaattgtctacaagtagatgtgctagacaatggaaggatgcaggccaacctctttgattacaattgagattcatgtgactattgagccctggaaatgtagcttgtccaaattgagatgtgctgtcagtataaaatacataccagattttaaagatgtaccaaaaaatgtaaactatctcaatttttatattggtgaaatcaatatgtcttggtatagtggcttaaataaaacaattttagcctttctcagtttatttttctgcaaaaagattaaaaattgtacatgaagctcatgttaactttcttttggtcagtgctattttaaaggaagtatgagttgaaaaaaaattgaaataaactatatcatattactaggacttaatatagtggcatacccaggaaatgcttagtaagtgttcccttcacattttaaaatttgagtatacaatcatgtttgacaatatagaaatttaatttttagtgaaacaattctaaaccccttttccatagacacaagaaagatggcaaatttatgctattcctggaaaaatacattgtggcttagcaaataagcaagttcccacgttacttttgttttgcttcaagtaatacttctgccagttgtgttttatgaattaaacagggaacggcatgctgaacttgaaactagatttgttcctgcttttttcacaatgtgagtagttttgaaaagtcagatctggccatttgtctttcctagaatagcataactttgttcattgttttttttgtttgtctttctgacacagaaagactgatgatggtgtccactatgtattcttcaaaacatttggcacatgctgcactaacctagtctatcttttctatcttggaatttgctcatacaaaccctatagcctagactagatcccttaccctctctccagttcctatcattcacccatttcactgtgcaagacacctcactagtcaccagtgatacagaaatgacttttaagcagtttctgctcttaagggcttaccgttttgtctataagatacacaagtataaatgacaagtacaaataacaatgaatgtttaatgctttacgtttagtgtttaagcttgttgttggaagagcagcattttgacccttggagaagaaaaactagctgtggcattccaggtggagaacctgacagaggactaagaagttatctaatgtaaaagacctcaggcaccaccttcgcataaactttttccagacaaggctaaatgtgcatgcttcataaccataattcttatttttctttaataaatatttttctacttgtaacactgtgcattatttcaaactgtttacctgtttgtaaagcttgtctcttaatcaaatttgtcttgaccaaataagtttcctgagggctggaattatgccttaactatatctatagtatttaacagtgaatcctttgtataatgaaagcatcaacagataattttaaattgataaataaaaagcacagtttcaaatggt

SEQ ID NO: 22674 - DNA, 427 bp, Homo sapiens
  misc_feature 1..427: note = ENST00000462263
  source 1..427: mol_type = unassigned DNA
ttaactttgtggatgtgttctttatgttacgctctttcttccttcttcttcccagggtatagttaataaagtgtcttctagccacattggctgtttagtacatgggtgtttcaatgcctccattcctaaacctgagcagttgtcagctgagcagtggcaaaccatggagataaacatgggtgatgaactagaatttgaagtatttcgtttagactcagatgctgctggagtattctgcattcggggaaaactaaatatcacaagtttacaattcaagcgctctgaagtttctgaagaagttacagaaaatggcactgaggaagctgctaaaaaacctaaaaagaagaaaaagaagaaagacccagagacatatgaagtggacagtggtaccacaaagctagcagatgatgcagatgacactccaatg

SEQ ID NO: 22675 - DNA, 1000 bp, Homo sapiens
  misc_feature 1..1000: note = ENST00000407724
  source 1..1000: mol_type = unassigned DNA
agagttatagggccccgcgttaagtccatgagcttccgtgagggtactctgccggttttgctgcggaagtcacctcgtggcgtaggggagaggtaacaccgagaagaggcagcggcggtggcgccaagacgattggtgccaaacagggcagaacgcaactcagctctgggtttgtgaatagcacaatggaagaagctggactttgtgggttaagagagaaagcagatatgttgtgtaactctgaatcacatgatattcttcaacatcaagactcaaattgcagtgccacaagtaataaacatttattggaagatgaagaaggccgtgactttataacaaagaacaggagttgggtgagcccagtgcactgcacacaagagtcaagaagggagcttcctgagcaagaagtagcccctccgtctggtcagcaagctttacaatgcaacaggaacaaagaaaaagtcttagagagacaaggtctttccctgtcacccaggctggagcgcggtggtacattcatgggtcatggcagccttaaactccctgagctcgtgatcctgtctcttcagactctagagtagctggggctacaggcgtacaccaccacacatggctaattttttatttttcttttgttgtagagatgggctgtcattctcttgcccaggctggtcttggtatactgtcctgtagcagtatattttggctacctgtactggcattggcttttccaagtgtcaagattacagaagttttattattgatgcaagccctaaacactctttcgactccagaggagaagctggcagctctctgtaagaaatatgctgatcttggaaattcacctcttctatagaagagtttgttttgaactatacgatttgaaacaaaattctttttttggagactatggaaacattctcaacagggaaaccctactagactttgtaaagcaaataatggaaaagatacagaactttttgaagaatcatgggaaatt

SEQ ID NO: 22676 - DNA, 2098 bp, Homo sapiens
  misc_feature 1..2098: note = ENST00000459719
  source 1..2098: mol_type = unassigned DNA
gtgagggtactctgccggttttgctgcggaagtcacctcgtggcgtaggggagaggtaacaccgagaagaggcagcggcggtggcgccaagacgattggtgccaaacagggcagaacgcaactcagctctggggtgggttcctgtccagaggggtagagaagagtggctgagggcgcgccctgatctcagcgggaagagtgcgaccccgagggcgcgctagtttgtgaatagcacaatggaagaagctggactttgtgggttaagagagaaagcagatatgttgtgtaactctgaatcacatgatattcttcaacatcaagactcaaattgcagtgccacaagtaataaacatttattggaagatgaagaaggccgtgactttataacaaagaacaggagttgggtgagcccagtgcactgcacacaagagtcaagaagggagcttcctgagcaagaagtagcccctccgtctggtcagcaagctttacaatgcaacaggaacaaagaaaaagtcttagagagacaaggtctttccctgtcacccaggctggagcgcggtggtacattcatgggtcatggcagccttaaactccctgagctcgtgatcctgtctcttcagactctagagtagctggggctacaggcgtacaccaccacacatggctaattttttatttttcttttgttgtagagatgggctgtcattctcttgcccaggctggtcttggtatactgtcctgtagcagtatattttggctacctgtactggcattggcttttccaagtgtcaagattacaggtgtgagctagtataccctgcccagtgtttctttcttacttggctttggtgtgaatgagaaaagaatttagtactaaaattttatgtgcatacagaagcattatttgaagtcagcctgttttccctcaacctctagtactctgtaaagtataccaaaagtcaaggttttaaagaactgtgttacatattagagagaacaaatcaaaagttacctatctccatcgttaccagtagaacattagtatgtattttgaagcaccatttgactctttctatttcagctacttgcttgtcccttgcaaagttattatagtactcttttaaaacttttcttcaagggaagagctattttgacttccttttctttgatctaaacctaacacccagaatatgcttagcagatcatcccaaaacaatcataacttgtttaaattgttcatagcaaaagttacatattataaagagttatgagtgtcttaggcagtgaatagtaactgaatatccttttatagttgtccttcactagcaggaagccttattccctgcccttttacatatcttaacttagaatgttactgtctaaatagtggttaggcaagagtagttcttaaacgtgcagtaattatcttgcactacatttaagggctaaatagctagtagtggtgcttgataattgaagaaatttgtacagctggaggaagtacctgctaaattttcaaaagttacctgaatttaataggtaaatctgtttttaattagagctatatcattttactctgaatgtcttaacatagaagtttacataaaatttacagattggattgatttcagccttcttctggtactttttaaaatcttattaatcattaggaaaagaagttttattattgatgcaagccctaaacactctttcgactccagaggagaagctggcagctctctgtaagaaatatgctgatcttggaaattcacctcttctatagaagagtttgttttgaactatacgatttgaaacaaaattctttttttggagactatggaaacattctcaacagggaaaccctactagactttgtaaagcaaataatggaaaagatacagaactttttgaagaatcatgggaaatttttataattaaataaatgctaaaattctgttttgtgaaacatttatgggaattatcactgacagtttttgtacactttcaaatagtgttaaagcagcaactccatgttgtaaatgcacaaaacaaatatttagttaataatcaactccaagaataaagctgtaacaataat

SEQ ID NO: 22677 - DNA, 832 bp, Homo sapiens
  misc_feature 1..832: note = ENST00000447520
  source 1..832: mol_type = unassigned DNA
tcacctcgtggcgtaggggagaggtaacaccgagaagaggcagcggcggtggcgccaagacgattggtgccaaacagggcagaacgcaactcagctctgggtttgtgaatagcacaatggaagaagctggactttgtgggttaagagagaaagcagatatgttgtgtaactctgaatcacatgatattcttcaacatcaagactcaaattgcagtgccacaagtaataaacatttattggaagatgaagaaggccgtgactttataacaaagaacaggagttgggtgagcccagtgcactgcacacaagagtcaagaagggagcttcctgagcaagaagtagcccctccgtctggtcagcaagctttacaatgcaacaggaacaaagaaaaagtcttaggaaaagaagttttattattgatgcaagccctaaacactctttcgactccagaggagaagctggcagctctctgtaagaaatatgctgatcttggaaattcacctcttctatagaagagtttgttttgaactatacgatttgaaacaaaattctttttttggagactatggaaacattctcaacagggaaaccctactagactttgtaaagcaaataatggaaaagatacagaactttttgaagaatcatgggaaatttttataattaaataaatgctaaaattctgttttgtgaaacatttatgggaattatcactgacagtttttgtacactttcaaatagtgttaaagcagcaactccatgttgtaaatgcacaaaacaaatatttagttaataatcaactccaagaataaagctgtaacaataatagtta

SEQ ID NO: 22678 - DNA, 1915 bp, Homo sapiens
  misc_feature 1..1915: note = ENST00000445715
  source 1..1915: mol_type = unassigned DNA
tcacctcgtggcgtaggggagaggtaacaccgagaagaggcagcggcggtggcgccaagacgattggtgccaaacagggcagaacgcaactcagctctgggtttgtgaatagcacaatggaagaagctggactttgtgggttaagagagaaagcagatatgttgtgtaactctgaatcacatgatattcttcaacatcaagactcaaattgcagtgccacaagtaataaacatttattggaagatgaagaaggccgtgactttataacaaagaacaggagttgggtgagcccagtgcactgcacacaagagtcaagaagggagcttcctgagcaagaagtagcccctccgtctggtcagcaagctttacaatgcaacaggaacaaagaaaaagtcttaggaaaagaagttttattattgatgcaagccctaaacactctttcgactccagaggagaagctggcagctctctgtaagaaatatgctgatcttggaaattcacctcttctatagaagagtttgttttgaactatacgatttgaaacaaaattctttttttggagactatggaaacattctcaacagggaaaccctactagactttgtaaagcaaataatggaaaagatacagaactttttgaagaatcatgggaaatttttataattaaataaatgctaaaattctgttttgtgaaacatttatgggaattatcactgacagtttttgtacactttcaaatagtgttaaagcagcaactccatgttgtaaatgcacaaaacaaatatttagttaataatcaactccaagaataaagctgtaacaataatagttactggaggaaagcaggaatgttcagaggcaaatgaagattctgcagaataagcaagctcagattgtcaaagagaaagttcacttgcagagtgaatacagcaagaccatcttggcaagaagcaagctagaatctctttgcagggaacttcagcaaaattaatgtcaaaataagacattaaaggaggaacatatgcagcagaaaaaagaggaggaagaagttcttaaagaagtaactgcacatttccaaattactttaactgaaactcaagcccagctggaacagcatgaaatacacaatgccaaactgcagcaggagaacatggaaatgggagaaaagctaaagaagctcactgaccagtatgcactgagggaagagcaaattaataaagcgttcaaacataaggaattacgacaacagcttgtagatgccagacttcaacaaacagcacagctgataaaagaagctgatgaaagacatcagagagagagagagtttttattaaaagaagcaacagaatcgaggcacaaatatgaagaaatgaaacaagaagaagcacaactgaaagagcagcttttcctttatatggataagtttgaagaattccagactaccatggcaaaaaccaatgaactttttacagccttcaagcaggaaacggaaaagctgacaaagaaaattaaaaaactggaaaaagaaatggtaatatggtataccaaatgggaaaataataatacaacacttctgcaaatggctgaagagaaaactattcgtgataaaaattataaggtctttcaaataaaattggagcggttagagaagctgtacaaggctcttcaaatagaaaggaatgaactcagtgagaaactgggaattctgaaagggcaggtctctgtgaaagtagcagatgtagatttagcagtgcctgtgacgcattcctgtgctgacctggattcttccaatatgctgaacacttcctctaaaagagccccaggagtccatctggaggctgaccccaaaggaatgaatgaagtaaaatgctactcaaaagccctctccacaggatctcctctaggcattgattaa

SEQ ID NO: 22679 - DNA, 2018 bp, Homo sapiens
  misc_feature 1..2018: note = ENST00000538014
  source 1..2018: mol_type = unassigned DNA
gtagctgcagctgcgcattgcacccccagctacgcagtctcctttccttctcagtcacaggaccggatggcaagtggccgcagccagtcggtgagaccgactgagctctggggcttcagttcttgacgctacctacatggctacatctccagccaaggatgagaggatgcagaaataatatttgtgttgttttaaaaatcttagatcaattaaaaagaaaaatgactctgtcattctttgtttgtgaatagcacaatggaagaagctggactttgtgggttaagagagaaagcagatatgttgtgtaactctgaatcacatgatattcttcaacatcaagactcaaattgcagtgccacaagtaataaacatttattggaagatgaagaaggccgtgactttataacaaagaacaggagttgggtgagcccagtgcactgcacacaagagtcaagaagggagcttcctgagcaagaagtagcccctccgtctggtcagcaagctttacaatgcaacaggaacaaagaaaaagtcttagagagacaaggtctttccctgtcacccaggctggagcgcggtggtacattcatgggtcatggcagccttaaactccctgagctcgtgatcctgtctcttcagactctagagtagctggggctacaggcgtacaccaccacacatggctaattttttatttttcttttgttgtagagatgggctgtcattctcttgcccaggctggtcttggtatactgtcctgtagcagtatattttggctacctgtactggcattggcttttccaagtgtcaagattacaggtgtgagctagtataccctgcccagtgtttctttcttacttggctttggtgtgaatgagaaaagaatttagtactaaaattttatgtgcatacagaagcattatttgaagtcagcctgttttccctcaacctctagtactctgtaaagtataccaaaagtcaaggttttaaagaactgtgttacatattagagagaacaaatcaaaagttacctatctccatcgttaccagtagaacattagtatgtattttgaagcaccatttgactctttctatttcagctacttgcttgtcccttgcaaagttattatagtactcttttaaaacttttcttcaagggaagagctattttgacttccttttctttgatctaaacctaacacccagaatatgcttagcagatcatcccaaaacaatcataacttgtttaaattgttcatagcaaaagttacatattataaagagttatgagtgtcttaggcagtgaatagtaactgaatatccttttatagttgtccttcactagcaggaagccttattccctgcccttttacatatcttaacttagaatgttactgtctaaatagtggttaggcaagagtagttcttaaacgtgcagtaattatcttgcactacatttaagggctaaatagctagtagtggtgcttgataattgaagaaatttgtacagctggaggaagtacctgctaaattttcaaaagttacctgaatttaataggtaaatctgtttttaattagagctatatcattttactctgaatgtcttaacatagaagtttacataaaatttacagattggattgatttcagccttcttctggtactttttaaaatcttattaatcattaggaaaagaagttttattattgatgcaagccctaaacactctttcgactccagaggagaagctggcagctctctgtaagaaatatgctgatcttgtgagtatttatttaatggagcaaggaacacagaaaataaaatctatgtgtgcttgataagatttttaaatattattttgatgtaactttaaatgtaaaatgatattttatctcaaaattgaaaacaatctcctttctttagtacttatgattggtgtgtgtgacttcatcttatgaaatgatgtatagaacataataatacttttttaaatgtgaaataaatttcctaaaacttaa

SEQ ID NO: 22680 - DNA, 2761 bp, Homo sapiens
  misc_feature 1..2761: note = ENST00000447202
  source 1..2761: mol_type = unassigned DNA
tttccttctcagtcacaggaccggatggcaagtggccgcagccagtcggtgagaccgactgagctctggggcttcagttcttgacgctacctacatggctacatctccagccaaggatgagagtttgtgaatagcacaatggaagaagctggactttgtgggttaagagagaaagcagatatgttgtgtaactctgaatcacatgatattcttcaacatcaagactcaaattgcagtgccacaagtaataaacatttattggaagatgaagaaggccgtgactttataacaaagaacaggagttgggtgagcccagtgcactgcacacaagagtcaagaagggagcttcctgagcaagaagtagcccctccgtctggtcagcaagctttacaatgcaacaggaacaaagaaaaagtcttaggtaataatctctgctctgtggttggatgttgtcacatactggtctttttgttttacattttctgcagcatgagtgattatgaacttggcctgtttggaggtaaatgttgcctggtaaacttgtttcttcacttggtttagtccacctatcatctccagttatgtgtagggaacaaaaatagcaaaatacgaagcccagttataagaaacttaattatttctctgtgtaacaagaactgaagttttaagaaagtttgaggccaatatgatgtaattagtatttgatttaccttgctttttgtacctttgaaaataacctaatagtatgaaaacaatatgtatgctaattttgcttaaaagattatacactgaaatttagagaggatataatgttatctgtagtgtagaaagagttaaataagactgatttttagaatttgttttatcccttccactcttagcttgacaattaggattaagaatatgatatgtcaaatttcatgactgaaatctgaaatgccttaatagttgccctcagtgtttcatccttatactaacatttacattgatatatatgacttatatgtgacactgaaacttggaatttttattcttaatccattttctgttaccctggaagacaaaaaaaaaagtatggtaatatataaagtaattgtaattccttgaaaataagacagatatcttcaaaattgatagccccaattatatgtgtaaaatatagcttgaggttaaaattatttaaaaagttttaaatgaaaatctttatgaaaatgtcagttatattatagttgtttcttacacatacacattcaataacaatatttatttattcttttttctagagagacaaggtctttccctgtcacccaggctggagcgcggtggtacattcatgggtcatggcagccttaaactccctgagctcgtgatcctgtctcttcagactctagagtagctggggctacaggcgtacaccaccacacatggctaattttttatttttcttttgttgtagagatgggctgtcattctcttgcccaggctggtcttggtatactgtcctgtagcagtatattttggctacctgtactggcattggcttttccaagtgtcaagattacaggtgtgagctagtataccctgcccagtgtttctttcttacttggctttggtgtgaatgagaaaagaatttagtactaaaattttatgtgcatacagaagcattatttgaagtcagcctgttttccctcaacctctagtactctgtaaagtataccaaaagtcaaggttttaaagaactgtgttacatattagagagaacaaatcaaaagttacctatctccatcgttaccagtagaacattagtatgtattttgaagcaccatttgactctttctatttcagctacttgcttgtcccttgcaaagttattatagtactcttttaaaacttttcttcaagggaagagctattttgacttccttttctttgatctaaacctaacacccagaatatgcttagcagatcatcccaaaacaatcataacttgtttaaattgttcatagcaaaagttacatattataaagagttatgagtgtcttaggcagtgaatagtaactgaatatccttttatagttgtccttcactagcaggaagccttattccctgcccttttacatatcttaacttagaatgttactgtctaaatagtggttaggcaagagtagttcttaaacgtgcagtaattatcttgcactacatttaagggctaaatagctagtagtggtgcttgataattgaagaaatttgtacagctggaggaagtacctgctaaattttcaaaagttacctgaatttaataggtaaatctgtttttaattagagctatatcattttactctgaatgtcttaacatagaagtttacataaaatttacagattggattgatttcagccttcttctggtactttttaaaatcttattaatcattaggaaaagaagttttattattgatgcaagccctaaacactctttcgactccagaggagaagctggcagctctctgtaagaaatatgctgatcttgtgagtatttatttaatggagcaaggaacacagaaaataaaatctatgtgtgcttgataagatttttaaatattattttgatgtaactttaaatgtaaaatgatattttatctcaaaattgaaaacaatctcctttctttagtacttatgattggtgtgtgtgacttcatcttatgaaatgatgtatagaacataataatacttttttaaatgtgaaataaatttcctaaaactt

SEQ ID NO: 22681 - DNA, 699 bp, Homo sapiens
  misc_feature 1..699: note = ENST00000588613
  source 1..699: mol_type = unassigned DNA
agatgggctgtcattctcttgcccaggctggtcttggtatactgtcctgtagcagtatattttggctacctgtactggcattggcttttccaagtgtcaagattacaggaaaagaagttttattattgatgcaagccctaaacactctttcgactccagaggagaagctggcagctctctgtaagaaatatgctgatcttctggaggaaagcaggaatgttcagaggcaaatgaagattctgcagaataagcaagctcagattgtcaaagagaaagttcacttgcagagtgaatacagcaagaccatcttggcaagaagcaagctagaatctctttgcagggaacttcagcaaaattaatgtcaaaataagacattaaaggaggaacatatgcagcagaaaaaagaggaggaagaagttcttaaagaagtaactgcacatttccaaattactttaactgaaactcaagcccagctggaacagcatgaaatacacaatgccaaactgcagcaggagaacatggaaatgggagaaaagctaaagaagctcactgaccagtatgcactgagggaagaggtaaacggcgtttggtttgtttatagacagctgctcaccagtagcaaaagctacaccctaccgtaaagtaaaaactctttcacaggacagtattttagaacttttgtgtatgcacagtggaaat

SEQ ID NO: 22682 - DNA, 510 bp, Homo sapiens
  misc_feature 1..510: note = ENST00000589075
  source 1..510: mol_type = unassigned DNA
ctggtcttggtatactgtcctgtagcagtatattttggctacctgtactggcattggcttttccaagtgtcaagattacaggaaaagaagttttattattgatgcaagccctaaacactctttcgactccagaggagaagctggcagctctctgtaagaaatatgctgatcttggaaattcacctcttctatagaagagtttgttttgaactatacgatttgaaacaaaattctttttttggagactatggaaacattctcaacagggaaaccctactagactttgtaaagcaaataatggaaaagatacagaactttttgaagaatcatgggaaatttttataattaaataaatgctaaaattctgttttgtgaaacatttatgggaattatcactgacagtttttgtacactttcaaatagtgttaaagcagcaactccatgttgtaaatgcacaaaacaaatatttagttaataatcaactccaagaataaagctgtaacaataata

SEQ ID NO: 22683 - DNA, 378 bp, Homo sapiens
  misc_feature 1..378: note = ENST00000585549
  source 1..378: mol_type = unassigned DNA
tacctgtactggcattggcttttccaagtgtcaagattacaggaaaagaagttttattattgatgcaagccctaaacactctttcgactccagaggagaagctggcagctctctgtaagaaatatgctgatcttggaacttcagcaaaattaatgtcaaaataagacattaaaggaggaacatatgcagcagaaaaaagaggaggaagaagttcttaaagaagtaactgcacatttccaaattactttaactgaaactcaagcccagctggaacagcatgaaatacacaatgccaaactgcagcaggagaacatggaaatgggagaaaagctaaagaagctcactgaccagtatgcactgagggaagaggtaaacggc

SEQ ID NO: 22684 - DNA, 336 bp, Homo sapiens
  misc_feature 1..336: note = ENST00000587095
  source 1..336: mol_type = unassigned DNA
cctgtactggcattggcttttccaagtgtcaagattacaggaaaagaagttttattattgatgcaagccctaaacactctttcgactccagaggagaagctggcagctctctgtaagaaatatgctgatcttgaggaacatatgcagcagaaaaaagaggaggaagaagttcttaaagaagtaactgcacatttccaaattactttaactgaaactcaagcccagctggaacagcatgaaatacacaatgccaaactgcagcaggagaacatggaaatgggagaaaagctaaagaagctcactgaccagtatgcactgagggaagaggtaaacggc

SEQ ID NO: 22685 - DNA, 453 bp, Homo sapiens
  misc_feature 1..453: note = ENST00000488280
  source 1..453: mol_type = unassigned DNA
aaaaagcagtgtactagaagctggaggaaagcaggaatgttcagaggcaaatgaagattctgcagaataagcaagctcagattgtcaaagagaaagttcacttgcagagtgaatacagcaagaccatcttggcaagaagcaagctagaatctctttgcagggaacttcagcaaaattaatgtcaaaataagacattaaaggaggaacatatgcagcagaaaaaagaggaggaagaagttcttaaagaagtaactgcacatttccaaattactttaactgaaactcaagcccagctggaacagcatgaaatacacaatgccaaactgcagcaggagaacatggaaatgggagaaaagctaaagaagctcactgaccagtatgcactgagggaagaggtaaacggcgtttggtttgtttatagacagctgctcaccagtagcaaaagctacaccc

SEQ ID NO: 22686 - DNA, 7299 bp, Homo sapiens
  misc_feature 1..7299: note = ENST00000253320
  source 1..7299: mol_type = unassigned DNA
atagtcagtgtgagtttgagaaagaaaaacacactgtagagctctactataaaagttaataggatagattgttaaactacattctgccatctttggctatttggttgctaaatactttagaatattacttacagctaggctgattataacagaagaaggattaagtatgacagcttgtctcaataatggaagtaaaaagcagagatcctggaaagaatctgccatccatcagaggaatttgtctgactttgtggtattgctagggggtgtatggttggagtattattttgatggtgctggatcaccctcatcacagtaaactcaagaacataggacagcttgtgaaataggttcttacttgtaaggaggaacatatgcagcagaaaaaagaggaggaagaagttcttaaagaagtaactgcacatttccaaattactttaactgaaactcaagcccagctggaacagcatgaaatacacaatgccaaactgcagcaggagaacatggaaatgggagaaaagctaaagaagctcactgaccagtatgcactgagggaagaggtaaacggcgtttggtttgtttatagacagctgctcaccagtagcaaaagctacaccctaccgtaaagtaaaaactctttcacaggacagtattttagaacttttgtgtatgcacagtggaaattacatgtttattaggaaaagagtagaaacctgtaaacagaatgactaaattggagcatcacttggcccaagtgtcagtggagtaggataagtaaagggatttctaggagatgtgtaccacttgtctcccatatgatgctacaagattgtcaatatagcatacagatatttttctcttatgcagtctaataatacagatttgttccctaaatactctgtatctcagatttctgtgacaatctgaacaatataaataggagaattgtgctatttgtgagaataaggaacctactaattacccatcaccaagtcacattgtttgtgtaatcaatgaagtaaaaagtttgtggaggactcaatagttgtcgaacctagtcattggagttattttataaattgatgtggaagttgtatgatggctaaataaaaaacaaataggtgataacctgcttatttgtttttattttttctttacttttagaggtctatacatagggtaagatttcaattttcaaaggatgcatccccttcctttattatgctttaagctagtaaaatatatatttaaatccttacttagtagattaaaattggaaatagaaagtgacaatttaaaaattaataaaacagtaaatattactttatgcatatcaaaatgttattttgagttacaccttttcatgctacttttgaaaacatttttctttaagattttgagtatcttttaaaccattttcctctatgtttcaagaacatttcaaacttattatggaagctgcaaacttatagtagaatatatcacttggctttagcaattatttacttttgtttctagcaactcttgtttccatctatttttaagcaaatccaagatattatatcattttatttattactattcaaatatgcatcatgaaataagattctttttaagccataatcactgtactatttttactccaaaaggttaaacaattgctatgtaatcacataccttctcactgtactatttaaatatctgttacttcccttttccttcaggttgtttacatcaacatcaaaataaggtttatacattttattgttttaatatgtctcaagtctttttagtatataagcttcccccccctcttttttttccttggaatgtatttattaaagaaattttttaggcctatatagtgaacttttaaaattaaatttgttttatattataaagcatattatgaatatcatcagtttttttaaaagaatcctttaaattccattgttttaaataatggtattaaaaatgattaattttattttattttttattattttactctttaggatttatattattttaactgtattaaactctccaaatttgctatagaagtagcagattgggagaggacatgtgttcaagttgtactacttgtatgtcttgtttagatattacagtctttttcttttatcagaaaataattgaataatgataaaatcagttgcagattaagacagattatctgttgcagtcttctcaaaacttaatttaagtacattattttcagctagcatttcttccttcacatagaacctccatgtgtggagggatttcctaatgagtctattgtatgtacaatagcacttaatgacatagcttttaaataataacaggattttaccaaatgtttaatatgtgccaggcatcaagcaccttacacagtttaattattgcatagatttggacagcaactctgcaagttaggtatggtcatgaacctttgcagataaggaaactgtgtttcacaaggagaagaaattgtcctggatcatacaataagctaggatttgctccagaccatttttttcattttatcaggctacctacaattaaggaatttcagaagattttgtgaacaaaaaatgtccaggaattatgtgtgtaataaatgaatttgatattttgatctccttatccatctttttcttgataaaatatcagcttttttttttccaatgtagggcagaagcaagaagtacagatattttgatggggacagcccacgtctgatagggtgggacatggggcagcagttagagggttgtgctctttctagtgtgggatagtttgcaagatgatatgttgtagccacttctgcagtgacggggacagaaggagtcagtgttcttaactacagtggtagcagcagaaaagaagggtaagcagggttctagaaatttgtgttatgttttctccccactgtatttatttctttggttagtggtgcaagaaattctgttttcctgtagcaaattaataaagcgttcaaacataaggaattacgacaacagcttgtagatgccagacttcaacaaacagcacagctgataaaagaagctgatgaaagacatcagagagagagagagtttgtaagttctacttcttggaaaaaaaaaaaagatcgccaaaattgtaaccaaagccatttaaaacaaactcctcacttaacatagtgccagggcatgcaattttgtttcttactctctggatgtgggatatgcgagtgtgtgtgtgtgtgtgtgtgtgtgtgtattaagctttctgtttctgatgaaattttcatatgaaatttactggagataagattaaattagtggaaaaacaagataattttgctttctatgtagtggtcaccaagttaaagaattgtgccagttattaggcaagataggctttgagatttagggacagttaaattttacaccaacttagtgaacatgagacttctacctagtgttacatttcatttttaaataagcaatttaaaaattggtaaatgatttgtttactttgattatattctggtataattttctgacaaaattatctgtgtcttggtcagcattgttgctagaatatgtattcagattttgtctgtccataattgagaacacagaaaaaatctaatttgactatacccatttacccccatggaaatgaaactatattctatgaatgaaaaatgattttaataatgtggtgtattacattttcttcattcaagtaatgtaggccctgagtagagcatgttatgaatatttagttccttagtgttttctcattcaagcctctcatattgaatgagtctagggtttggagagatgtttcacacagcatgtctcttcagtgcaagctgacagatatcagtgcacaattaaagaaacttaattgcacctttcaacttggagtataaattttgtatgtatctatgtatatctatgtgtgtattttgtggtttaaggcttatttacataatatgtgacattttacctcagaaattcagtgactgaatttcacagctgcttcccatgcatctttattatctatgtttctgaaaaactcaaatactaactaatctcttttcttcccttagctgttcctttcctgtggttttaaaaaagtgaccagaaactaggtctctattttcattgctttgctgcatattcttttaacctgcttttatcttttacagagttgaggggctttctaaataacctagacaatgtcaagattcttagctgcgttttctgtctaaaagtgtagatgtctagttattcctcatgtaaaacacaacatttcaaccctgagtactataaactttattatgcttctaggttactttttctctttaagcaattattcctacattcctaagtgttcaccagtggaacagataagagatagaagtagttagaaattgagataattgggttgacctgtcattgttgccaggataattactggaagattaagcctatctgttagacattttgaccatgtttataattgttgttagtattctgtcagaatgtatctgttttctagttattaaaagaagcaacagaatcgaggcacaaatatgaagaaatgaaacaagaagaagcacaactgaaagagcagcttttcctttatatggataagtttgaagaattccagactaccatggcaaaaaccaatgaactttttacagccttcaagcaggaaacggaaaagctgacaaagaaaattaaaaaactggaaaaagaaatggtaatatggtataccaaatgggaaaataataatacaacacttctgcaaatggctgaagagaaaactattcgtgataaaaattataaggtctttcaaataaaattggagcggttagagaagctgtacaaggctcttcaaatagaaaggaatgaactcagtgagaaactgggaattctgaaagggcaggtctctgtgaaagtagcagatgtagatttagcagtgcctgtgacgcattcctgtgctgacctggattcttccaatatgctgaacacttcctctaaaagagccccaggagtccatctggaggctgaccccaaaggaatgaatgaagtaaaatgctactcaaaagccctctccacaggatctcctctaggcattgattaagattaagtgtgatcattgtactgatggatatattttgtgtacatgtttctcttttagttgtaactattgattttgtaatgaaaatttcctctcctttttctaccatatctctgtttttttagaactactcaactgtgtggtaacagaaagcttcttaccaatttccccaactatgttgcacatcagcctcattttccccctttattggaatgcatgttttcattgccttctcctttcaaagtgtacgtttgtgtgttcatcaccttaaattatcttaatttgagacttttttataatggtttcgtaatgtgaaatcaaatactaatttaaactctggagcccataatatctacataaaagaaaatataaactgactaatattgtcaagtcatttaaatgataagtaaaacttcaatggattaagaaacaagcatggcatatttgattcagatcagttttttgacaatatttgtatgactttccaaattgatgtgactgtaaactttgaattcctcaaaattgacagaatatatatatatatatatatatatatatatatatatatgtatgtacacacacacagagagatcatttaaatgtaaatgatgttaagaaaaaccaaaacagtagcatatgcaggcaagtcattggaccaataggcttaatatttatgaaactgacaattgttctgctttagtttcaggttacaattatgtttaaagaaaaaaaaatcagtatctagatctctgcacttggcatggaaaattttgaactatttattccttaattttcttttatttcagtttctcatagagctaaatggttttacatatattctcttgtcagatttgtggtctaatagaggtagaaaatggaaattttcccagtacttagaaatatggtacttaggaagaagtctaggatgtgaattacatatacacttcccctagtgactatgataatcaagggggcagatagcagaggaaaataagttaacatgaaatttgacaaattttattactttgccaaaattagcaaaacaaaaatactcaccttcccctgctcaccccccaactttttataaatattcaattcagctacaaaacaaaatactggacccacttctttcagaagagatgaagataccttatatgccctaaagttaataccagcagtcatattttatcagatgtaaatctggatgtaagctcttaatgttatactaaggcagtttcttaggctgtgacacttctttgtggtacttgttttgtgtgaaaggtaaattttggggagaaaacaatgtgaaaaacagaacttgttctgttgtttttggcatactgtttatgttagatacactgtgttacaatacaatattacgaagatctgcattgtattttggaatttggtttcctttcagaattattgctctggctagcattggaaacaacaacaacaacaaaacccaaaggaaccctttgcagaagattcccttgtaaatggccctgtggcatgcccagtatctgcaatgttctagaatagaagttggcaaacctctctgtttgccaagcctgcagagttgaacatgtccataaatgtatacaatctgaccctgttttttggccctgtttctggacactgtagctgaccaagaaaatgtttaaatgttgcgatcaattaaatttttttgttgtatcattctggagttgtaatatgtatagtggcaggggattccaagctatagaaaaaacatgagtctagaatgacagagtgtgtcatcttcaaatgtgtattaatatatttcttgatgatgagaccaatatttctaagttaatggaactattttattacacctgataatcacagttcaattcttgtctgttgcagaattatctacctctttcaaactgtaaatgaaaataactgtgaaaaaaaggatgcagtactgataaaaacactgctttgtttttatctcacctcttttttaaggatatgattttataagaggcagttctcttttgcttttcaagacttctgtagagtttgtgttttttgtttttgtttttgtttttgtttttgtttttttacctaatgtgaatcttattttatctactcaacttcgttcaggttaactaaagatatagatataatggttaa

SEQ ID NO: 22687 - DNA, 1074 bp, Homo sapiens
  misc_feature 1..1074: note = ENST00000593000
  source 1..1074: mol_type = unassigned DNA
gggaaaataatgtggaagaaactaactgtggagcagcatcttacttatatttaattatagtatagtgaatatctggatcagcagatgatacttattttatagtagggcatttgcttttctctaattatctacttagaaaaagctgcttgcttttaaatgagagatttctggtcataaataagggggaggaattatagtttaaaagcaacacctcatgggagcaataaatgaactcacatagcagtagcttctttttcgcgagctttatctgtaggtctgtacttttaacatacattattttggataataaggaggaacatatgcagcagaaaaaagaggaggaagaagttcttaaagaagtaactgcacatttccaaattactttaactgaaactcaagcccagctggaacagcatgaaatacacaatgccaaactgcagcaggagaacatggaaatgggagaaaagctaaagaagctcactgaccagtatgcactgagggaagaggtaaacggcgtttggtttgtttatagacagctgctcaccagtagcaaaagctacaccctaccgtaaagtaaaaactctttcacaggacagtattttagaacttttgtgtatgcacagtggaaattacatgtttattaggaaaagagtagaaacctgtaaacagaatgactaaattggagcatcacttggcccaagtgtcagtggagtaggataagtaaagggatttctaggagatgtgtaccacttgtctcccatatgatgctacaagattgtcaatatagcatacagatatttttctcttatgcagtctaataatacagatttgttccctaaatactctgtatctcagatttctgtgacaatctgaacaatataaataggagaattgtgctatttgtgagaataaggaacctactaattacccatcaccaagtcacattgtttgtgtaatcaatgaagtaaaaagtttgtggaggactcaatagttgtcgaacctagtcattggagttattttataaattgatgtggaagttgtatgatggctaaataaaaaacaaataggtgataa

SEQ ID NO: 22688 - DNA, 841 bp, Homo sapiens
  misc_feature 1..841: note = ENST00000592697
  source 1..841: mol_type = unassigned DNA
tataaactttattatgcttctaggttactttttctctttaagcaattattcctacattcctaagtgttcaccagtggaacagataagagatagaagtagttagaaattgagataattgggttgacctgtcattgttgccaggataattactggaagattaagcctatctgttagacattttgaccatgtttataattgttgttagtattctgtcagaatgtatctgttttctagttattaaaagaagcaacagaatcgaggcacaaatatgaagaaatgaaacaagaagaagcacaactgaaagagcaggtcacgtatgtttgtcggcacatgcaagaaatggttcaaaacatgagggacatatacagaacctgtgactacttgtggtcagcacaagcttttcctttatatggataagtttgaagaattccagactaccatggcaaaaaccaatgaactttttacagccttcaagcaggaaacggaaaagctgacaaagaaaattaaaaaactggaaaaagaaatggtaatatggtataccaaatgggaaaataataatacaacacttctgcaaatggctgaagagaaaactattcgtgataaaaattataaggtctttcaaataaaattggagcggttagagaagctgtacaaggctcttcaaatagaaaggaatgaactcagtgagaaactgggaattctgaaagggcaggtctctgtgaaagtagcagatgtagatttagcagtgcctgtgacgcattcctgtgctgacctggattcttccaatatgctgaacacttcctctaaaagagccccaggagtccatctggaggctgacccc

SEQ ID NO: 22689 - DNA, 2926 bp, Homo sapiens
  misc_feature 1..2926: note = ENST00000582401
  source 1..2926: mol_type = unassigned DNA
gacgtttccgcctcctgcttgaaactaacccctctttttctccaaaggagtgcttgtggagatcggatcttttctccagcaattgggggaaagaaggctttttctctgaattagcttagtgtaaccagcggcgtatattttttaggcgccttttcgaaaacctagtagttaatattcatttgtttaaatcttattttatttttaagctcaaactgcttaagaataccttaattccttaaagtgaaataattttttgcaaaggggtttcctcgatttggagctttttttttcttccaccgtcatttctaactcttaaaaccaactcagttccatcatggtgatgttcaagaagatcaagtcttttgaggtggtctttaacgaccctgaaaaggtgtacggcagtggcgagaaggtggctggccgggtgatagtggaggtgtgtgaagttactcgtgtcaaagccgttaggatcctggcttgcggagtggctaaagtgctttggatgcagggatcccagcagtgcaaacagacttcggagtacctgcgctatgaagacacgcttcttctggaagaccagccaacaggtgagaatgagatggtgatcatgagacctggaaacaaatatgagtacaagttcggctttgagcttcctcaggggcctctgggaacatccttcaaaggaaaatatgggtgtgtagactactgggtgaaggcttttcttgaccgcccgagccagccaactcaagagacaaagaaaaactttgaagtagtggatctggtggatgtcaatacccctgatttaatggcacctgtgtctgctaaaaaagaaaagaaagtttcctgcatgttcattcctgatgggcgggtgtctgtctctgctcgaattgacagaaaaggattctgtgaaggtgatgagatttccatccatgctgactttgagaatacatgttcccgaattgtggtccccaaagctgccattgtggcccgccacacttaccttgccaatggccagaccaaggtgctgactcagaagttgtcatcagtcagaggcaatcatattatctcagggacatgcgcatcatggcgtggcaagagccttcgggttcagaagatcaggccttctatcctgggctgcaacatccttcgagttgaatattccttactgatctatgttagcgttcctggatccaagaaggtcatccttgacctgcccctggtaattggcagcagatcaggtctaagcagcagaacatccagcatggccagccgaaccagctctgagatgagttgggtagatctgaacatccctgataccccagaagctcctccctgctatatggatgtcattcctgaagatcaccgattggagagcccaaccactcctctgctagatgacatggatggctctcaagacagccctatctttatgtatgcccctgagttcaagttcatgccaccaccgacttatactgaggtggatccctgcatcctcaacaacaatgtgcagtgagcatgtggaagaaaagaagcagctttacctacttgtttctttttgtctctcttcctggacactcactttttcagagactcaacagtctctgcaatggagtgtgggtccaccttagcctctgacttcctaatgtaggaggtggtcagcaggcaatctcctgggccttaaaggatgcggactcatcctcagccagcgcccatgttgtgatacaggggtgtttgttggatgggtttaaaaataactagaaaaactcaggcccatccattttctcagatctccttgaaaattgaggccttttcgatagtttcgggtcaggtaaaaatggcctcctggcgtaagcttttcaaggttttttggaggctttttgtaaattgtgataggaactttggaccttgaacttacgtatcatgtggagaagagccaatttaacaaactaggaagatgaaaagggaaattgtggccaaaactttgggaaaaggaggttcttaaaatcagtgtttcccctttgtgcacttgtagaaaaaaaagaaaaaccttctagagctgatttgatggacaatggagagagctttccctgtgattataaaaaaggaagctagctgctctacggtcatctttgcttagagtatactttaacctggcttttaaagcagtagtaactgccccaccaaaggtcttaaaagccatttttggagcctattgcactgtgttctcctactgcaaatattttcatatgggaggatggttttctcttcatgtaagtccttggaattgattctaaggtgatgttcttagcactttaattcctgtcaaattttttgttctccccttctgccatcttaaatgtaagctgaaactggtctactgtgtctctagggttaagccaaaagacaaaaaaaattttactacttttgagattgccccaatgtacagaattatataattctaacgcttaaatcatgtgaaagggttgctgctgtcagccttgcccactgtgacttcaaacccaaggaggaactcttgatcaagatgcccaaccctgtgatcagaacctccaaatactgccatgagaaactagagggcaggtcttcataaaagccctttgaacccccttcctgccctgtgttaggagatagggatattggcccctcactgcagctgccagcacttggtcagtcactctcagccatagcactttgttcactgtcctgtgtcagagcactgagctccacccttttctgagagttattacagccagaaagtgtgggctgaagatggttggtttcatgtttttgtattatgtatctttttgtatggtaaagactatattttgtacttaaccagatatatttttaccccagatggggatattctttgtaaaaaatgaaaataaagtttttttaatggaaaaaaaaa

SEQ ID NO: 22690 - DNA, 1509 bp, Homo sapiens
  misc_feature 1..1509: note = ENST00000488537
  source 1..1509: mol_type = unassigned DNA
gtagactactgggtgaaggcttttcttgaccgcccgagccagccaactcaagagacaaagaaaaactttgaagtagtggatctggtggatgtcaatacccctgatttaatggcacctgtgtctgctaaaaaagaaaagaaagtttcctgcatgttcattcctgatgggcgggtgtctgtctctgctcgaattgacagaaaaggattctgtgaaggtaaaatcctagtgcttatggcagttaaaacaggaactgggtttaggggcaagggcatgggactggggtagaggaagtgtcattaactatactgagtatcagtaagttttcatctttctcattgctaggtgatgagatttccatccatgctgactttgagaatacatgttcccgaattgtggtccccaaagctgccattgtggcccgccacacttaccttgccaatggccagaccaaggtgctgactcagaagttgtcatcagtcagaggcaatcatattatctcagggacatgcgcatcatggcgtggcaagagccttcgggttcagaagatcaggccttctatcctgggctgcaacatccttcgagttgaatattccttactggtgggtagatgcagggtggcttcagcagagaaattgttcatctgttaccacagctgtcttgtttctccagacctctggtgtaataaactgccatcttcctttctagatctatgttagcgttcctggatccaagaaggtcatccttgacctgcccctggtaattggcagcagatcaggtctaagcagcagaacatccagcatggccagccgaaccagctctgagatgagttgggtagatctgaacatccctgataccccagaagctcctccctgctatatggatgtcattcctgaagatcaccgattggagagcccaaccactcctctgctagatgacatggatggctctcaagacagccctatctttatgtatgcccctgagttcaagttcatgccaccaccgacttatactgaggtgaggattgtcatctttactgttaaatttgtcctaagctttctataagaagttgacttagacggattgctaaactggtttgttctttttgttcttacctgaactgaaatagtctgtttctttctttaggtggatccctgcatcctcaacaacaatgtgcagtgagcatgtggaagaaaagaagcagctttacctacttgtttctttttgtctctcttcctggacactcactttttcagagactcaacagtctctgcaatggagtgtgggtccaccttagcctctgacttcctaatgtaggaggtggtcagcaggcaatctcctgggccttaaaggatgcggactcatcctcagccagcgcccatgttgtgatacaggggtgtttgttggatgggtttaaaaataactagaaaaactcaggcccatccattttctcagatctccttgaaaattgaggccttttcgatagtttcgggtcaggtaaaaatggcctcc

SEQ ID NO: 22691 - DNA, 509 bp, Homo sapiens
  misc_feature 1..509: note = ENST00000486597
  source 1..509: mol_type = unassigned DNA
ccagcatttcttgggcaggattcttatgtggccatattttcttttctagctcctccctgctatatggatgtcattcctgaagatcaccgattggagagcccaaccactcctctgctagatgacatggatggctctcaagacagccctatctttatgtatgcccctgagttcaagttcatgccaccaccgacttatactgaggtggatccctgcatcctcaacaacaatgtgcagtgagcatgtggaagaaaagaagcagctttacctacttgtttctttttgtctctcttcctggacactcactttttcagagactcaacagtctctgcaatggagtgtgggtccaccttagcctctgacttcctaatgtaggaggtggtcagcaggcaatctcctgggccttaaaggatgcggactcatcctcagccagcgcccatgttgtgatacaggggtgtttgttggatgggtttaaaaataactagaaaaactcaggcccatccattttctca

SEQ ID NO: 22692 - DNA, 1225 bp, Homo sapiens
  misc_feature 1..1225: note = ENST00000425134
  source 1..1225: mol_type = unassigned DNA
atgtgtgcataagttgcttattctttgtctacttcctatttgagatgttagtagagaactgtcctgggtgaatctttcagtattgcagggcttggcaacttgctgcccgacaaaatacatcagaatttctctttaagaacaatatgggatggattaaaaaatatatatatgggatgaaattgggggtacttcaataccttgcatgccacccaagcattccttatcacacagatgcattttaagtgtaacagcaagcctaatggctactcgattttctttcccttcaggtgagaatgagatggtgatcatgagacctggaaacaaatatgagtacaagttcggctttgagcttcctcaggggcctctgggaacatccttcaaaggaaaatatgggtgtgtagactactgggtgaaggcttttcttgaccgcccgagccagccaactcaagagacaaagaaaaactttgaagtagtggatctggtggatgtcaatacccctgatttaatggcacctgtgtctgctaaaaaagaaaagaaagtttcctgcatgttcattcctgatgggcgggtgtctgtctctgctcgaattgacagaaaaggattctgtgaaggtgatgagatttccatccatgctgactttgagaatacatgttcccgaattgtggtccccaaagctgccattgtggcccgccacacttaccttgccaatggccagaccaaggtgctgactcagaagttgtcatcagtcagaggcaatcatattatctcagggacatgcgcatcatggcgtggcaagagccttcgggttcagaagatcaggccttctatcctgggctgcaacatccttcgagttgaatattccttactgatctatgttagcgttcctggatccaagaaggtcatccttgacctgcccctggtaattggcagcagatcaggtctaagcagcagaacatccagcatggccagccgaaccagctctgagatgagttgggtagatctgaacatccctgataccccagaagctcctccctgctatatggatgtcattcctgaagatcaccgattggagagcccaaccactcctctgctagatgacatggatggctctcaagacagccctatctttatgtatgcccctgagttcaagttcatgccaccaccgacttatactgaggtggatccctgcatcctcaacaacaatgtgcagtgagcatgtggaaga

SEQ ID NO: 22693 - DNA, 3504 bp, Homo sapiens
  misc_feature 1..3504: note = ENST00000269601
  source 1..3504: mol_type = unassigned DNA
agcacgcacggcgtcggtgcgtgcgcgcccagacgttctgccgggtggcagtcccagcggagtttgcgtgtgcgggcgggaccggatttcgtccgtgggcccgggggcggcgggggccggggagtgaggggccggctgagcccacctcgctgggccctccctggcgccccgccttgggcggcggcgagcgcgcgggccgccatgtcgtacatgctcccgcacctgcacaacggctggcaggtggaccaggccatcctctcggaggaggaccgcgtggtcgtcatccgcttcggccacgactgggatcctacgtgcatgaagatggacgaggtcctgtacagcatcgccgagaaggttaaaaattttgcagttatttatcttgtggatattacagaagtgcctgacttcaacaaaatgtatgagttatacgatccatgtactgtcatgtttttcttcaggaacaagcacatcatgattgacttggggactggcaacaacaacaagattaactgggccatggaggacaagcaggagatggtggacatcatcgagacggtgtaccgcggggcccgcaaaggccgcggcctggtggtgtcccccaaggactactccaccaagtaccgctactgaggcgccctcagtctgcgcggataaatgtcgtggagccctttttgtatggaaacgttttaagctatttaaagcctttggaaaatacaggaagctccagggctggagcacctctgagatggaattgataacatggtcttaactcaccgaaataaacaagcacgtggtgagaggagcaggcctacttgtttgttctcaggaaacttaatgaatagattactgattttcctagtcaaagttaattcttacccttggagtaaaacgaaggtgtttatcctgtgagcctgtgcgttttgcatactgggttggtttgctggggctgcggtgacagcatatgccgcgagctgggctttaacagagatgtgtgctctcacagctttgcaggcgggggtctgagatcagggtgtcgcgggtggggggtcactgctgaggccgtgaggggaatctgctcaggcctgtccctggcttctgggggctgctggtggtattttcagttccttggtgtgtggatacttcgccccatctctgccttcacctgtgtcctccctgtgtgggtgctggtgtccaaaatttccccttttcgtagtgacaccagctgtgttggattggggcccaccctgctccagcatggcctaatcttaactaattacatttgcaaggatcttatgtccacaaaagtcacagtctgaggtgctgggggttaggacttcaatatataaattttgcggttacacaattcaatccatgacagaatccaaaggtttactctggttataaaaacagtacaataaaatattgtttatagccttccctgtaaggaataggagagctattttttattcttcccaagattgtatttgatgtaaacatattttctgtagaagccatggcccttcagttcatatagttagaaaatttccttattggccaggcacggtggctcacacctgtaatcccagcactttgggaggccgaggtgggcagatcacgaagtcaggtgttcgagaccagcctggccaacatggtgaaatcccgtctctactaaaaatacaaaaattagctgggcatggtggcgcgtgcctgtaatcccagctacttggaaggctgaggcaggagaattgcttgaacccgggaggtggaggtttcagtgagccgagatcacaccactgcactccagcctgggcaacagagcaagactccgtctcaaaaaaagaaaagaaaatgtccttattacagtctcaggtttctcttgccctctgtcatcctagcagtgtggatggttggttgggatcttcgtgtcccgtctcagcacactcgagctctgaagtgaaagtgaggaagggcagggatgggggcacttgagcacaccgtgggccctctgacctcagacccaggctctgccccaccaagtgaccttgggcagggtaccttctctgagctttgtttcctccttggtaaaggcggataatagtgtctgccctgcacacagatgtggacgcagaagcacgtggtgcctgccgggcacaggagtggtgcacagggctcgctgctgtcgggagattgattgctgttgtggaaacgggagggtacttacagaatgaagcacattttttacatacagtacaaatgagtgtgtgctttttaaatggatttaaaattcaaatgcaaatctgcagtttaatctcccaagtgctgatttttctatgtataaagtaggagagtgcaacagcgtatcggaatgaggggctagggagaacgtgtatgtgacctcgagtacctggcatgtaacagacactcagtattacactcctgctatttctccagagcaggtgaaacagacggccaggaagcacacgaagagacactcagcatcactgcttgttaaggaaggtgcaaatcaaaaccacagtgagacgccacttcacacctacaagttcggctagatacaaaaagatcgcaacaagcgtttgcaaggatgtggagaaattggagccctcacacactgctggtggcaaagtggtaacacaggcaggcaggtcgtcaaaaagttaaacatgggccgggtgcaggtgtctcaagcctgtaatcccagcactttggaaggctgagacaggcagattgcttgagcccaggagttcacgaccagcctgggcaacctggtgagaccctgtctctacaaaaaatacagaacaattagctgggcatggtggtgcgtgcctgtgggcccagctactcggcgggctgaggcaggaggatcacttaagccccagaggtcaaggctgcagtaagccatggttgtgccactgcactccagcctgggcaactgagcaagaccctgtctcaaaaaaataaaaaaagataaacatggtgttaccatttgacccagcagtttcatacccaggagaattgaacgcatatgtccacatagaaactcgtacacagaagccaaaatgtggaaacccacgtgtccatcaacagatgaacggttaaacaaaatgtccatccatagaacggaatattattcagtcataaacagaatgaagtactgtaagtgaaaagccagttactacatattgtgtgattccatttatacggaatttctagaataggcacatccatagagacggattagtggttgcttaagactgggagggagggggaaataggaggtgacagctaatgggcagttttatttttgatgtaatgaaaatgtgcttacataagccgagcaggcataaacagaaaaagtgccctaagattgtgataatggtacaattctgtcaattgcataattggtggatgatgtgtgaattatgtctcttaggataacagctttactggcgttaccagaaaaagataaaataattacattccaca

SEQ ID NO: 22694 - DNA, 1185 bp, Homo sapiens
  misc_feature 1..1185: note = ENST00000585474
  source 1..1185: mol_type = unassigned DNA
gggtgggcagggcgaagactgaagcgagaagggcagcgcgaggtgggcgactaccagagcgaagcgagcggcgtgtaagcggggtgaagacaacgccaggttaaaaattttgcagttatttatcttgtggatattacagaagtgcctgacttcaacaaaatgtatgagttatacgatccatgtactgtcatgtttttcttcaggaacaagcacatcatgattgacttggggactggcaacaacaacaagattaactgggccatggaggacaagcaggagatggtggacatcatcgagacggtgtaccgcggggcccgcaaaggccgcggcctggtggtgtcccccaaggactactccaccaagtaccgctactgaggcgccctcagtctgcgcggataaatgtcgtggagccctttttgtatggaaacgttttaagctatttaaagcctttggaaaatacaggaagctccagggctggagcacctctgagatggaattgataacatggtcttaactcaccgaaataaacaagcacgtggtgagaggagcaggcctacttgtttgttctcaggaaacttaatgaatagattactgattttcctagtcaaagttaattcttacccttggagtaaaacgaaggtgtttatcctgtgagcctgtgcgttttgcatactgggttggtttgctggggctgcggtgacagcatatgccgcgagctgggctttaacagagatgtgtgctctcacagctttgcaggcgggggtctgagatcagggtgtcgcgggtggggggtcactgctgaggccgtgaggggaatctgctcaggcctgtccctggcttctgggggctgctggtggtattttcagttccttggtgtgtggatacttcgccccatctctgccttcacctgtgtcctccctgtgtgggtgctggtgtccaaaatttccccttttcgtagtgacaccagctgtgttggattggggcccaccctgctccagcatggcctaatcttaactaattacatttgcaaggatcttatgtccacaaaagtcacagtctgaggtgctgggggttaggacttcaatatataaattttgcggttacacaattcaatccatgacagaatccaaaggtttactctggttataaaaacagtacaataaaatattgtttatagccttccct

SEQ ID NO: 22695 - DNA, 752 bp, Homo sapiens
  misc_feature 1..752: note = ENST00000588162
  source 1..752: mol_type = unassigned DNA
cccagcggagtttgcgtgtgcgggcgggaccggatttcgtccgtgggcccgggggcggcgggggccggggagtgaggggccggctgagcccacctcgctgggccctccctggcgccccgccttgggcggcggcgagcgcgcgggccgccatgtcgtacatgctcccgcacctgcacaacggctggcaggtggaccaggccatcctctcggaggaggaccgcgtggtcgtcatccgcttcggccacgactgggatcctacgtgcatgaagatggacgaggtcctgtacagcatcgccgagaaggaacaagcacatcatgattgacttggggactggcaacaacaacaagattaactgggccatggaggacaagcaggagatggtggacatcatcgagacggtgtaccgcggggcccgcaaaggccgcggcctggtggtgtcccccaaggactactccaccaagtaccgctactgaggcgccctcagtctgcgcggataaatgtcgtggagccctttttgtatggaaacgttttaagctatttaaagcctttggaaaatacaggaagctccagggctggagcacctctgagatggaattgataacatggtcttaactcaccgaaataaacaagcacgtggtgagaggagcaggcctacttgtttgttctcaggaaacttaatgaatagattactgattttcctagtcaaagttaattcttacccttggagtaaaacgaaggtgtttatcctgtg

SEQ ID NO: 22696 - DNA, 546 bp, Homo sapiens
  misc_feature 1..546: note = ENST00000592957
  source 1..546: mol_type = unassigned DNA
gcgaagcgagcggcgtgtaagcggggtgaagacaacgccagtcctgaccttggaaggaggatacccaccactggaggctggagccactggaaagaggcgttaaaaattttgcagttatttatcttgtggatattacagaagtgcctgacttcaacaaaatgtatgagttatacgatccatgtactgtcatgtttttcttcaggaacaagcacatcatgattgacttggggactggcaacaacaacaagattaactgggccatggaggacaagcaggagatggtggacatcatcgagacggtgtaccgcggggcccgcaaaggccgcggcctggtggtgtcccccaaggactactccaccaagtaccgctactgaggcgccctcagtctgcgcggataaatgtcgtggagccctttttgtatggaaacgttttaagctatttaaagcctttggaaaatacaggaagctccagggctggagcacctctgagatggaattgataacatggtcttaactcaccgaaataaacaagcacgtggtgagagga

SEQ ID NO: 22697 - DNA, 803 bp, Homo sapiens
  misc_feature 1..803: note = ENST00000355491
  source 1..803: mol_type = unassigned DNA
cggagtttgcgtgtgcgggcgggaccggatttcgtccgtgggcccgggggcggcgggggccggggagtgaggggccggctgagcccacctcgctgggccctccctggcgccccgccttgggcggcggcgagcgcgcgggccgccatgtcgtacatgctcccgcacctgcacaacggctggcaggtggaccaggccatcctctcggaggaggaccgcgtggtcgtcatccgcttcggccacgactgggatcctacgtgcatgaagatggacgaggtcctgtacagcatcgccgagaaggttaaaaattttgcagttatttatcttgtggatattacagaagtgcctgacttcaacaaaatgtatgagttatacgatccatgtactgtcatgtttttcttcagttaccatagaggttggtgaattagctacatgagcattagaccattctccaaaagtggagcctcctactcggaacaagcacatcatgattgacttggggactggcaacaacaacaagattaactgggccatggaggacaagcaggagatggtggacatcatcgagacggtgtaccgcggggcccgcaaaggccgcggcctggtggtgtcccccaaggactactccaccaagtaccgctactgaggcgccctcagtctgcgcggataaatgtcgtggagccctttttgtatggaaacgttttaagctatttaaagcctttggaaaatacaggaagctccagggctggagcacctctgagatggaattgataacatggtcttaactcaccgaaataaacaagcac

SEQ ID NO: 22698 - DNA, 988 bp, Homo sapiens
  misc_feature 1..988: note = ENST00000585769
  source 1..988: mol_type = unassigned DNA
gtcggtgcgtgcgcgcccagacgttctgccgggtggcagtcccagcggagtttgcgtgtgcgggcgggaccggatttcgtccgtgggcccgggggcggcgggggccggggagtgaggggccggctgagcccacctcgctgggccctccctggcgccccgccttgggcggcggcgagcgcgcgggccgccatgtcgtacatgctcccgcacctgcacaacggctggcaggtggaccaggccatcctctcggaggaggaccgcgtggtcgtcatccgcttcggccacgactgggatcctacgtgcatgaagatggacgaggtcctgtacagcatcgccgagaaggtggtggcataaacatcgggtggtgttcagatcctgctgccggcagctcgaggctaggatggctggagatgtgagggcctttgtctcatcacatccgagcacagctcagcaagatgctcttagctagaaaacagattttatgtgttaatgttaaaaattttgcagttatttatcttgtggatattacagaagtgcctgacttcaacaaaatgtatgagttatacgatccatgtactgtcatgtttttcttcagttaccatagaggttggtgaattagctacatgagcattagaccattctccaaaagtggagcctcctactcggaacaagcacatcatgattgacttggggactggcaacaacaacaagattaactgggccatggaggacaagcaggagatggtggacatcatcgagacggtgtaccgcggggcccgcaaaggccgcggcctggtggtgtcccccaaggactactccaccaagtaccgctactgaggcgccctcagtctgcgcggataaatgtcgtggagccctttttgtatggaaacgttttaagctatttaaagcctttggaaaatacaggaagctccagggctggagcacctctgagatggaattgataacatggtcttaactcaccgaaata

SEQ ID NO: 22699 - DNA, 448 bp, Homo sapiens
  misc_feature 1..448: note = ENST00000586612
  source 1..448: mol_type = unassigned DNA
cgggtggtgttcagatcctgctgccggcagctcgaggctaggatggctggagatgtgagggcctttgtctcatcacatccgagcacagctcagcaagatgctcttagctagaaaacagattttatgtgttaatgaacaagcacatcatgattgacttggggactggcaacaacaacaagattaactgggccatggaggacaagcaggagatggtggacatcatcgagacggtgtaccgcggggcccgcaaaggccgcggcctggtggtgtcccccaaggactactccaccaagtaccgctactgaggcgccctcagtctgcgcggataaatgtcgtggagccctttttgtatggaaacgttttaagctatttaaagcctttggaaaatacaggaagctccagggctggagcacctctgagatggaattgataacatggtcttaactca

SEQ ID NO: 22700 - DNA, 611 bp, Homo sapiens
  misc_feature 1..611: note = ENST00000592837
  source 1..611: mol_type = unassigned DNA
gtgggaggatagcttgagcctgggaggtcgaggctgcagtgagctgattgcaccattgcactctaggatgacagagtgagaccctgtctcaaaaaaacaaaacaaaaattgccctgatccacacaaattcttggttttgtttttataaatgtgcttctataaaatgaaagccaaagtgttctgttatttcagtttttttttttaatctccttttaggttaaaaattttgcagttatttatcttgtggatattacagaagtgcctgacttcaacaaaatgtatgagttatacgatccatgtactgtcatgtttttcttcaggaacaagcacatcatgattgacttggggactggcaacaacaacaagattaactgggccatggaggacaagcaggagatggtggacatcatcgagacggtgtaccgcggggcccgcaaaggccgcggcctggtggtgtcccccaaggactactccaccaagtaccgctactgaggcgccctcagtctgcgcggataaatgtcgtggagccctttttgtatggaaacgttttaagctatttaaagcctttggaaaatacaggaagctccagggctggagcacctctgagatgg

SEQ ID NO: 22701 - DNA, 669 bp, Homo sapiens
  misc_feature 1..669: note = ENST00000591711
  source 1..669: mol_type = unassigned DNA; mol_type = unassigned DNA
gcggagtttgcgtgtgcgggcgggaccggatttcgtccgtgggcccgggggcggcgggggccggggagtgaggggccggctgagcccacctcgctgggccctccctggcgccccgccttgggcggcggcgagcgcgcgggccgccatgtcgtacatgctcccgcacctgcacaacggctggcaggtggaccaggccatcctctcggaggaggaccgcgtggtcgtcatccgcttcggccacgactgggatcctacgtgcatgaagatggacgaggtcctgtacagcatcgccgagaaggttaaaaattttgcagttatttatcttgtggatattacagaagtgcctgacttcaacaaaatgtatgagttatacgatccatgtactgtcatgtttttcttcaggtacgttatcttaaagttgttactgaaattgaatattgtcagtttggaagcttaatgtaatcaagatctctttagattattttattttgaaggaagttggttgtacagtcatgtcccaaaatcgtttgtatcaccaggcaatcagtgtgaatctttgaaataattttcaaagtaacaattctagttttagcatttactcagtaacaaattacccttttgaaataactttgcggggaaacctaggtgaagtgtaattcaatgaaagat

SEQ ID NO: 22702 - DNA, 586 bp, Homo sapiens
  misc_feature 1..586: note = ENST00000586825
  source 1..586: mol_type = unassigned DNA; mol_type = unassigned DNA
tccgtgggcccgggggcggcgggggccggggagtgaggggccggctgagcccacctcgctgggccctccctggcgccccgccttgggcggcggcgagcgcgcgggccgccatgtcgtacatgctcccgcacctgcacaacggctggcaggtggaccaggccatcctctcggaggaggaccgcgtggtcgtcatccgcttcggccacgactgggatcctacgtgcatgaagatggacgaggtcctgtacagcatcgccgagaaggtggtggcataaacatcgggtggtgttcagatcctgctgccggcagctcgaggctaggatggctggagatgtgagggcctttgtctcatcacatccgagcacagctcagcaagatgctcttagctagaaaacagattttatgtgttaataaatggcagataatggggactcttccttaccttgttccgagttctgtctggatattccagctgttttaaagttaaaaattttgcagttatttatcttgtggatattacagaagtgcctgacttcaacaaaatgtatgagttatacgatccatgtactgtcatgtttttcttcag

SEQ ID NO: 22703 - DNA, 706 bp, Homo sapiens
  misc_feature 1..706: note = ENST00000586295
  source 1..706: mol_type = unassigned DNA; mol_type = unassigned DNA
gcggagtttgcgtgtgcgggcgggaccggatttcgtccgtgggcccgggggcggcgggggccggggagtgaggggccggctgagcccacctcgctgggccctccctggcgccccgccttgggcggcggcgagcgcgcgggccgccatgtcgtacatgctcccgcacctgcacaacggctggcaggtggaccaggccatcctctcggaggaggaccgcgtggtcgtcatccgcttcggccacgactgggatcctacgtgcatgaagatggacgaggtcctgtacagcatcgccgagaagttctgcaggctgtacaggaagtgtggtactggcatttgcttctggggaggcctcaggaccttccaatcatggcagaaggcaaaggggaacaggcacgtcgcacggtgaaagctggggcggagtgtcacacacttggaacaacctcagctcactaccccgaggacagcaccaagaggatgacgctcaaccattgatgagaaattcatcccatgatccagtcgcctcccaccaggcctcacctgcaacgctgggagttacgtttcaacctgagatttgggcagggacaaatatccaaactatatcaaatggttaaaaattttgcagttatttatcttgtggatattacagaagtgcctgacttcaacaaaatgtatgagttatacgatccatgtactgtcatgtttttct

SEQ ID NO: 22704 - DNA, 535 bp, Homo sapiens
  misc_feature 1..535: note = ENST00000589926
  source 1..535: mol_type = unassigned DNA; mol_type = unassigned DNA
agagcgaagcgagcggcgtgtaagcggggtgaagacaacgccagcattgctggattttcctccaatccacgaccctccgggacactgaaggaatgctatttaacagaacagtcatcgttcacgagcatctctgcgtctgtcttcaggatttggggctggctgatttggccttcctgggcctttagagatcaggtctgctacaatgtctgaccactgtgccttttccagccacttagctttagcttctgagaccagtatgtggaccagctgataaaggtctgaatgacccgggtcatagattctgataatgagctcaaactcttgagcaaacccaattggatctttacgggaggcaggaaattctttatgcctcgcaactcagccattaaccagggttgacagacaatcacaggggttcccctaactgttaacagttgttcccgaaacgggttgatcatgagaggagtccctatggtgtccccttttccatgtcttccagatgagaggctgccactggcgataccagagaatcggc

SEQ ID NO: 22705 - DNA, 1662 bp, Homo sapiens
  misc_feature 1..1662: note = ENST00000323274
  source 1..1662: mol_type = unassigned DNA; mol_type = unassigned DNA
cgggacggccgcgggaaaaggcgcgcggaaggggtcctgccaccgcgccacttggcctgcctccgtcccgccgcgccacttggcctgcctccgtcccgccgcgccacttcgcctgcctccgtcccccgcccgccgcgccatgcctgtggccggctcggagctgccgcgccggcccttgccccccgccgcacaggagcgggacgccgagccgcgtccgccgcacggggagctgcagtacctggggcagatccaacacatcctccgctgcggcgtcaggaaggacgaccgcacgggcaccggcaccctgtcggtattcggcatgcaggcgcgctacagcctgagagatgaattccctctgctgacaaccaaacgtgtgttctggaagggtgttttggaggagttgctgtggtttatcaagggatccacaaatgctaaagagctgtcttccaagggagtgaaaatctgggatgccaatggatcccgagactttttggacagcctgggattctccaccagagaagaaggggacttgggcccagtttatggcttccagtggaggcattttggggcagaatacagagatatggaatcagattattcaggacagggagttgaccaactgcaaagagtgattgacaccatcaaaaccaaccctgacgacagaagaatcatcatgtgcgcttggaatccaagagatcttcctctgatggcgctgcctccatgccatgccctctgccagttctatgtggtgaacagtgagctgtcctgccagctgtaccagagatcgggagacatgggcctcggtgtgcctttcaacatcgccagctacgccctgctcacgtacatgattgcgcacatcacgggcctgaagccaggtgactttatacacactttgggagatgcacatatttacctgaatcacatcgagccactgaaaattcagcttcagcgagaacccagacctttcccaaagctcaggattcttcgaaaagttgagaaaattgatgacttcaaagctgaagactttcagattgaagggtacaatccgcatccaactattaaaatggaaatggctgtttagggtgctttcaaaggagctcgaaggatattgtcagtctttaggggttgggctggatgccgaggtaaaagttctttttgctctaaaagaaaaaggaactaggtcaaaaatctgtccgtgacctatcagttattaatttttaaggatgttgccactggcaaatgtaactgtgccagttctttccataataaaaggctttgagttaactcactgagggtatctgacaatgctgaggttatgaacaaagtgaggagaatgaaatgtatgtgctcttagcaaaaacatgtatgtgcatttcaatcccacgtacttataaagaaggttggtgaatttcacaagctatttttggaatatttttagaatattttaagaatttcacaagctattccctcaaatctgagggagctgagtaacaccatcgatcatgatgtagagtgtggttatgaactttaaagttatagttgttttatatgttgctataataaagaagtgttctgcattcgtccacgctttgttcattctgtactgccacttatctgctcagttccttcctaaaatagattaaagaactctccttaagtaaa

SEQ ID NO: 22706 - DNA, 925 bp, Homo sapiens
  misc_feature 1..925: note = ENST00000579128
  source 1..925: mol_type = unassigned DNA; mol_type = unassigned DNA
tccgtcccgccgcgccacttggcctgcctccgtcccgccgcgccacttcgcctgcctccgtcccccgcccgccgcgccatgcctgtggccggctcggagctgccgcgccggcccttgccccccgccgcacaggagcgggacgccgagccgcgtccgccgcacggggagctgcagtacctggggcagatccaacacatcctccgctgcggcgtcaggaaggacgaccgcacgggcaccggcaccctgtcggtattcggcatgcaggcgcgctacagcctgagagatgaattccctctgctgacaaccaaacgtgtgttctggaagggtgttttggaggagttgctgtggtttatcaagggatccacaaatgctaaagagctgtcttccaagggagtgaaaatctgggatgccaatggatcccgagactttttggacagcctgggattctccaccagagaagaaggggacttgggcccagtttatggcttccagtggaggcattttggggcagaatacagagatatggaatcagattattcaggacagggagttgaccaactgcaaagagtgattgacaccatcaaaaccaaccctgacgacagaagaatcatcatgtgcgcttggaatccaagaggttgaaagaaccccgtcgtcttcatttatactaaccatactcttagagggaagcaatctggttttgtgcagaggcacctgagggaggcaggaccctgggaacttcccccagccacatggttgattgtgtgacgttgggcaagtcacattttgctgcactttcaccttcagatcatgaggttgggcccagaggattttttttttttttttttttttttgagacagagttttgctctgttgcccaggctggaatgcaacggcgtgatcttggctcactgtaacctctgcctcc

SEQ ID NO: 22707 - DNA, 693 bp, Homo sapiens
  misc_feature 1..693: note = ENST00000323250
  source 1..693: mol_type = unassigned DNA; mol_type = unassigned DNA
atgcctgtggccggctcggagctgccgcgccggcccttgccccccgccgcacaggagcgggacgccgagccgcgtccgccgcacggggagctgcagtacctggggcagatccaacacatcctccgctgcggcgtcaggaaggacgaccgcacgggcaccggcaccctgtcggtattcggcatgcaggcgcgctacagcctgagagattattcaggacagggagttgaccaactgcaaagagtgattgacaccatcaaaaccaaccctgacgacagaagaatcatcatgtgcgcttggaatccaagagatcttcctctgatggcgctgcctccatgccatgccctctgccagttctatgtggtgaacagtgagctgtcctgccagctgtaccagagatcgggagacatgggcctcggtgtgcctttcaacatcgccagctacgccctgctcacgtacatgattgcgcacatcacgggcctgaagccaggtgactttatacacactttgggagatgcacatatttacctgaatcacatcgagccactgaaaattcagcttcagcgagaacccagacctttcccaaagctcaggattcttcgaaaagttgagaaaattgatgacttcaaagctgaagactttcagattgaagggtacaatccgcatccaactattaaaatggaaatggctgtttag

SEQ ID NO: 22708 - DNA, 1327 bp, Homo sapiens
  misc_feature 1..1327: note = ENST00000323224
  source 1..1327: mol_type = unassigned DNA; mol_type = unassigned DNA
atgcctgtggccggctcggagctgccgcgccggcccttgccccccgccgcacaggagcgggacgccgagccgcgtccgccgcacggggagctgcagtacctggggcagatccaacacatcctccgctgcggcgtcaggaaggacgaccgcacgggcaccggcaccctgtcggtattcggcatgcaggcgcgctacagcctgagagatgaattccctctgctgacaaccaaacgtgtgttctggaagggtgttttggaggagttgctgtggtttatcaagggatccacaaatgctaaagagctgtcttccaagggagtgaaaatctgggatgccaatggatcccgagactttttggacagcctgggattctccaccagagaagaaggggacttgggcccagtttatggcttccagtggaggcattttggggcagaatacagagatatggaatcagatcttcctctgatggcgctgcctccatgccatgccctctgccagttctatgtggtgaacagtgagctgtcctgccagctgtaccagagatcgggagacatgggcctcggtgtgcctttcaacatcgccagctacgccctgctcacgtacatgattgcgcacatcacgggcctgaagccaggtgactttatacacactttgggagatgcacatatttacctgaatcacatcgagccactgaaaattcagcttcagcgagaacccagacctttcccaaagctcaggattcttcgaaaagttgagaaaattgatgacttcaaagctgaagactttcagattgaagggtacaatccgcatccaactattaaaatggaaatggctgtttagggtgctttcaaaggagctcgaaggatattgtcagtctttaggggttgggctggatgccgaggtaaaagttctttttgctctaaaagaaaaaggaactaggtcaaaaatctgtccgtgacctatcagttattaatttttaaggatgttgccactggcaaatgtaactgtgccagttctttccataataaaaggctttgagttaactcactgagggtatctgacaatgctgaggttatgaacaaagtgaggagaatgaaatgtatgtgctcttagcaaaaacatgtatgtgcatttcaatcccacgtacttataaagaaggttggtgaatttcacaagctatttttggaatatttttagaatattttaagaatttcacaagctattccctcaaatctgagggagctgagtaacaccatcgatcatgatgtagagtgtggttatgaactttaaagttatagttgttttatatgttgctataataaagaag

SEQ ID NO: 22709 - DNA, 534 bp, Homo sapiens
  misc_feature 1..534: note = ENST00000584122
  source 1..534: mol_type = unassigned DNA; mol_type = unassigned DNA
agtgctggagggttagggagagctgcctgggcttgaccgcgcgccggtctcaaagtcctggctttggcccctcctccgttttcccctgtggaccattccgcttcgcagcgttttcaaaaactggagcgaaagtgatgtgggcggggcaaaggcggcgggaagaggagagcactgaagctggcgcgggaacttggtttcctggtggcctcccatccaatccccacgaaccagctttcctcttaaaccttgaaaagagaaattcgggagttcgagtataagttcttagtcgtcctttcctctttcctttccgacaggagcaccccaggcaaaaaatgtctcgcgggtcattggcgccaggctttcaggggacagtggggcggggcggggtgggcacaggacgttaggcagccgttggccctccctaaggccacaccgtcctgccgtcctggatcctgcgccagctgcgcgggggaggggactcgaagatgaattccctctgctgacaaccaaacgtgtgttctggaagggtgtttt

SEQ ID NO: 22710 - DNA, 886 bp, Homo sapiens
  misc_feature 1..886: note = ENST00000581920
  source 1..886: mol_type = unassigned DNA; mol_type = unassigned DNA
aagctgctgcgtgggccaagttacttgtgcagattattcaggacagggagttgaccaactgcaaagagtgattgacaccatcaaaaccaaccctgacgacagaagaatcatcatgtgcgcttggaatccaagagatcttcctctgatggcgctgcctccatgccatgccctctgccagttctatgtggtgaacagtgagctgtcctgccagctgtaccagagatcgggagacatgggcctcggtgtgcctttcaacatcgccagctacgccctgctcacgtacatgattgcgcacatcacgggcctgaagccaggtgactttatacacactttgggagatgcacatatttacctgaatcacatcgagccactgaaaattcagcttcagcgagaacccagacctttcccaaagctcaggattcttcgaaaagttgagaaaattgatgacttcaaagctgaagactttcagattgaagggtacaatccgcatccaactattaaaatggaaatggctgtttagggtgctttcaaaggagctcgaaggatattgtcagtctttaggggttgggctggatgccgaggtaaaagttctttttgctctaaaagaaaaaggaactaggtcaaaaatctgtccgtgacctatcagttattaatttttaaggatgttgccactggcaaatgtaactgtgccagttctttccataataaaaggctttgagttaactcactgagggtatctgacaatgctgaggttatgaacaaagtgaggagaatgaaatgtatgtgctcttagcaaaaacatgtatgtgcatttcaatcccacgtacttataaagaaggttggtgaatttcacaagctatttttggaatatttttagaatatttta

SEQ ID NO: 22711 - DNA, 1676 bp, Homo sapiens
  misc_feature 1..1676: note = ENST00000471250
  source 1..1676: mol_type = unassigned DNA; mol_type = unassigned DNA
gggacatttaaaatctcaccacacttgacaccattcacaagtagccatgtggctcagtctcctgagtgctcctgcagagtgcagctctgccaggcttttctctagataatctcgtgtgtgttactgtagcagtttgagtttaaacacaagagttcactcggttaacatgttctaaccagcaagatttctgttgtttgcaggtgccgtgagcgatgtggagatgcaggaacactatgatgagttttttgaggtgagagaactgaactctgtgactgatagacctgttgatcttctgtatctgtttggaaggatttaaaatgtttctctgctaataaacatacatgagttatatctaatgacactttgtaatgtataacgagtcttaaaccactgtggtctcccttcaggaggtttttacagaaatggaggagaagtatggggaagtagaggagatgaacgtctgtgacaacctgggagaccacctggtggggaacgtgtacgtcaaggtaggagccagggcgagacggcggcgtggccgcttagtgtgccagggccaaggccaacaggcgaaagcgagacagtggtgcagccgcttagtgtgccggggccaaggccgacagaggatggggtgcctgtcgccatgcaccttgagatcctggatgctcaggcgcacagcagggctcaggtgcactggctcggcgcctaccagctgcgtcatatgtggcggtggccagcccacacgtgcgcccagccagcagaactgaaggacggaccgtacaccacagccatcgttatttcagtgtagaatatttagtacctgttggtttagaagctgtgtggactaaggaaaagttaggtttactcacatgtttggtttcttttttcttttttagtgaataaaactttatttgcctacacagccatatttgctcctttaaccagttgaatttgaaaaatgaaggcaacatttggcaaaatcttggactatcttgaagttaatctcattgaaaataaaggatttttcaattatcctgtaatactattccaccttactatacctgagtgtgtatatctctctctgatatacttggattggtaattgagaaagtcttattaaagcgtggatggcaagcacttctgtttttgtcttttcagtttcgccgtgaggaagatgcggaaaaggctgtgattgacttgaataaccgttggtttaatggacagccgatccacgccgagctgtcacccgtgacggacttcagagaagcctgctgccgtcagtatgagatgggagaatgcacacgaggcggcttctgcaacttcatgcatttgaagcccatttccagagagctgcggcgggagctgtatggccgccgtcgcaagaagcatagatcaagatcccgatcccgggagcgtcgttctcggtctagagaccgtggtcgtggcggtggcggtggcggtggtggaggtggcggcggacgggagcgtgacaggaggcggtcgagagatcgtgaaagatctgggcgattctgagccatgccatttttaccttatgtctgctagaaagtgttgtagttgattgaccaaaccagttcataaggggaattttttttaaaaaacaacaaaaaaaaaaacatacaaagatgggtttctgaataaaatttgtagtgataacagta

SEQ ID NO: 22712 - DNA, 3344 bp, Homo sapiens
  misc_feature 1..3344: note = ENST00000478282
  source 1..3344: mol_type = unassigned DNA; mol_type = unassigned DNA
ttttaatatttcttagtttgagcccaggtgcggtgtctcacgcctgtaatcacagcactttgggaggccaaggcaggcggatcacttgaggtcaggagttcaagaccagcctgccaacgtggtgaaaccctgtctgtactaaaaattaaaaaaaaaaaaaaaaattagccgggcgtggtggcagtcgcctgtagtcccagcaactccagaggctgagacaggagaatcgcttgaaccccagaggtggaggttgcagtgagctgagatggtgccactgcactccagcctgggcgacagagccagactgcatcttgtgggtgtaaaaaaaaaatttgtagtttgagagtcaactttttcctcacagtttctgaaaatgtggcccttttgatgctgattaaagctggttgtgattttaacaccttagtagccagaatcgagactgtcatggggacatttaaaatctcaccacacttgacaccattcacaagtagccatgtggctcagtctcctgagtgctcctgcagagtgcagctctgccaggcttttctctagataatctcgtgtgtgttactgtagcagtttgagtttaaacacaagagttcactcggttaacatgttctaaccagcaagatttctgttgtttgcaggtgccgtgagcgatgtggagatgcaggaacactatgatgagttttttgaggtgagagaactgaactctgtgactgatagacctgttgatcttctgtatctgtttggaaggatttaaaatgtttctctgctaataaacatacatgagttatatctaatgacactttgtaatgtataacgagtcttaaaccactgtggtctcccttcaggaggtttttacagaaatggaggagaagtatggggaagtagaggagatgaacgtctgtgacaacctgggagaccacctggtggggaacgtgtacgtcaaggtaggagccagggcgagacggcggcgtggccgcttagtgtgccagggccaaggccaacaggcgaaagcgagacagtggtgcagccgcttagtgtgccggggccaaggccgacagaggatggggtgcctgtcgccatgcaccttgagatcctggatgctcaggcgcacagcagggctcaggtgcactggctcggcgcctaccagctgcgtcatatgtggcggtggccagcccacacgtgcgcccagccagcagaactgaaggacggaccgtacaccacagccatcgttatttcagtgtagaatatttagtacctgttggtttagaagctgtgtggactaaggaaaagttaggtttactcacatgtttggtttcttttttcttttttagtgaataaaactttatttgcctacacagccatatttgctcctttaaccagttgaatttgaaaaatgaaggcaacatttggcaaaatcttggactatcttgaagttaatctcattgaaaataaaggatttttcaattatcctgtaatactattccaccttactatacctgagtgtgtatatctctctctgatatacttggattggtaattgagaaagtcttattaaagcgtggatggcaagcacttctgtttttgtcttttcagtttcgccgtgaggaagatgcggaaaaggctgtgattgacttgaataaccgttggtttaatggacagccgatccacgccgagctgtcacccgtgacggacttcagagaagcctgctgccgtcagtatgagatgggagaatgcacacgaggcggcttctgcaacttcatgcatttgaagcccatttccagagagctgcggcgggagctgtatggccgccgtcgcaagaagtgagtattcctgtgcccgttgttaagctcagtggcttctttctcccctcacaaccctcccccttccaaaaaaaaaattttggcataggtgtcgtttctgttttttaaaaggcagtgcttagaacatagtacatatttttaaatatccaaatgtcctctttggagaagaatattcacctgcacacaggtaacttcattatccaacttctcaagtagagatcagatcttagtaatcaagcaagagggcggttagctgggcagccgcggacatgaggctcgtggtgaaagtgggcatgcagtttattctcccagatattacgaagaagaagaatagatgttgtaacctcctttagatcagggatggcttccctgggacacattggaagaagaattgtcttgggtcacaaataaaatacactaatgatagctgataactttttttttaattgcaaaaaaaatctcataatgttttaagcaagttgatgaatttgtgttgggctgcaggttggacaagcttttgctttacatatttcacatgtccactggggtttcttttggttttgcttgttggttttagggcatttcattatgtcttgggatcgctggcatcctcccttcgggacactggcagaatcaggcccagcggtcacatctctctgatcctacatttaaatgtacgacaggtcacagagcagagaaaatcaagacgtcagaatcgaaccgattgagttctgagtctggagaggttctcatccctcttctgttaaacatggactagtaaatagatgggtggcgattgttttattgtcagcattcaagaagcataagagaaaaacaggcctgctctccccagcccaaaaacctgatggacacagtagctatgagcgcctgaagcgtggggtcagtgagggttgaagatggtatgtgtccagctcattttgattatgatttcctgtgaccatttgagttggttctagaagaagacagaagatgcaaggtattacacctgttcacttctaagttgcacatttttttctcctgaaacttttcacacctgaaatcagggtgtgtctcagtcacggcgtgcagtctcttcagcagtgtttttccttatcagtgccgttggcttgaggagctgcgcgtgttgagagagtgggtgtggttctgtgctgcgtgccgtggtttggatggcacggttttctttattttccttggttgcaggcatagatcaagatcccgatcccgggagcgtcgttctcggtctagagaccgtggtcgtggcggtggcggtggcggtggtggaggtggcggcggacgggagcgtgacaggaggcggtcgagagatcgtgaaagatctgggcgattctgagccatgccatttttaccttatgtctgctagaaagtgttgtagttgattgaccaaaccagttcataaggggaattttttttaaaaaacaacaaaaaaaaaaacatacaaagatgggtttctgaataaaatttgtagtgataacagta

SEQ ID NO: 22713 - DNA, 1675 bp, Homo sapiens
  misc_feature 1..1675: note = ENST00000459639
  source 1..1675: mol_type = unassigned DNA; mol_type = unassigned DNA
ccctccctgacattgctggcacacaggcatgattgctggttccattggatatggatctggattgtcagcgtatttgaacagtattaagggagggttttgcagtagagacagaaggtgacgtaaggtggttcctaaggtgggttcggtcagtcccctaatagtttgttttcagtgtattgagaccaggagaattgatttacttcagacctattttttgaaactccctgttggtctggtgtcatgcgtttagagagactctgaacttcgttttctgttttccttagataatgatagcacttcatgagcaccatatgtgaagcacacatacgttctgtctgactctcagaacagtgccacattggcattgtcatcatttacagatgacatctgagagctagggtgacttgcccaagcccaagcagctggtagcagagttgggatcttaaccctcaccacaccggtgttttcaagagagaacttggtcgtggagaactggagaacagatactgcctaagttacatttagttttagactaatttaatactccatttaagaaacaaacagaacagctgtgcagttaggaaagtggaggggatttgaatgaggaggaggcgggttagagttagaaccgtctttgctgaacaagtagtgtgtttgcagaaagggaagttgaagttacgttgtcctaaaatacagcaaggaagaggaggtgcttaataccacggaaaaaagtctgtgtcatgtttctgtgaggttaaaagtaatttgatagtgtatgtcatgctgctgacatattccatgtgtttgatatcttcccagcaaaataatcagctctcattttcccttacagagtcaactgttcattttatttcaaaattggagcatgtcgtcatggagacaggtgctctcggttgcacaataaaccgacgtttagccagaccattgccctcttgaacatttaccgtaaccctcaaaactcttcccagtctgctgacggtttgcgctgtgccgtgagcgatgtggagatgcaggaacactatgatgagttttttgaggaggtttttacagaaatggaggagaagtatggggaagtagaggagatgaacgtctgtgacaacctgggagaccacctggtggggaacgtgtacgtcaagtttcgccgtgaggaagatgcggaaaaggctgtgattgacttgaataaccgttggtttaatggacagccgatccacgccgagctgtcacccgtgacggacttcagagaagcctgctgccgtcagtatgagatgggagaatgcacacgaggcggcttctgcaacttcatgcatttgaagcccatttccagagagctgcggcgggagctgtatggccgccgtcgcaagaagcatagatcaagatcccgatcccgggagcgtcgttctcggtctagagaccgtggtcgtggcggtggcggtggcggtggtggaggtggcggcggacgggagcgtgacaggaggcggtcgagagatcgtgaaagatctgggcgattctgagccatgccatttttaccttatgtctgctagaaagtgttgtagttgattgaccaaaccagttcataaggggaattttttttaaaaaacaacaaaaaaaaaaacatacaaagatgggtttctgaataaaatttgtagtgataacagta

SEQ ID NO: 22714 - DNA, 966 bp, Homo sapiens
  misc_feature 1..966: note = ENST00000464750
  source 1..966: mol_type = unassigned DNA; mol_type = unassigned DNA
gtcgacggcagcggcggcggcgggtgggaaatggcggagtatctggcctccatcttcggcaccgagaaagacaaagtcaactgttcattttatttcaaaattggagcatgtcgtcatggagacaggtgctctcggttgcacaataaaccgacgtttagccagaccatcttgattcaaaacatctatcgtaatccccaaaacagtgcacagacggctgacggctcacactaccattgccctcttgaacatttaccgtaaccctcaaaactcttcccagtctgctgacggtttgcgctgtgccgtgagcgatgtggagatgcaggaacactatgatgagttttttgaggaggtttttacagaaatggaggagaagtatggggaagtagaggagatgaacgtctgtgacaacctgggagaccacctggtggggaacgtgtacgtcaagtttcgccgtgaggaagatgcggaaaaggctgtgattgacttgaataaccgttggtttaatggacagccgatccacgccgagctgtcacccgtgacggacttcagagaagcctgctgccgtcagtatgagatgggagaatgcacacgaggcggcttctgcaacttcatgcatttgaagcccatttccagagagctgcggcgggagctgtatggccgccgtcgcaagaagcatagatcaagatcccgatcccgggagcgtcgttctcggtctagagaccgtggtcgtggcggtggcggtggcggtggtggaggtggcggcggacgggagcgtgacaggaggcggtcgagagatcgtgaaagatctgggcgattctgagccatgccatttttaccttatgtctgctagaaagtgttgtagttgattgaccaaaccagttcataaggggaattttttttaaaaaacaacaaaaaaaaaaacatacaaagatgggtttctgaataaaatttgtagtgataacagta

SEQ ID NO: 22715 - DNA, 4694 bp, Homo sapiens
  misc_feature 1..4694: note = ENST00000475639
  source 1..4694: mol_type = unassigned DNA; mol_type = unassigned DNA
gtcgacggcagcggcggcggcgggtgggaaatggcggagtatctggcctccatcttcggcaccgagaaagacaaagtcaactgttcattttatttcaaaattggagcatgtcgtcatggagacaggtgctctcggttgcacaataaaccgacgtttagccaggtttgtttgcctttttttcatgtaaattataaaaacttcatgttcttttcaaagacagttaatttctacatattaagcaagtcattttttctctcgtagttgtattttccatttgtgttcataagtgtgttcttttatttaaataatagtgaggcaggtgatcgacttccagtggaaggtctgagaccaccactccttgtttttatcattagagaaactttaaaaatcagtttttgatgtttgtgtgttggctgtgcctgatatttgctgccctgccatcttccctaccccctctgatagacatgggtccagagggggtggccgtgccagccttgggttagcctcctccaggcaccagtggacacggagtgggctttctgctctttgctgtctccagacagtagaggtgatggagccaccttccaagttagcgtgattgtcaccaggcccatcatgctgctcgagcttctctggctgcgtcctcactttcacatccctagctgaggaaacagcgagtcgcatcacgtcatggaaacatgaaaaattaagctgaaaggtagaaaatgggccgtaaattgctcttagcgggtctgtttggttaattgaggagtgcctgttatcttgggcttagatccgctctgagttcagttcaatcaaaagttgtgagttttgatagttttatttttggttagttgaagaaaaggcaaaggttggtacactataaaggatcacttacggattaaagggagaaggcacctctaatcggagcagaaaacttgtgcccacgttgatgagaacatttgaaatttgaaaatcgatgcccaagtctttccagatggagggctggggaactccttccaacccacccttgaagtctaaatgtgcagcctctgagctgttgagtagctattatgcgtggtccctgggagctgccaggctctgcctttgagctcacatctgtctgtatacgttttcctgtaagcatttaagaaaatctaccactttgtgtaagtgagctgggagaaggaaacatgggttttttccggttgaagcccatggacgaccccacagcacacagtgtttttagaagggaagaggatgatggcttttccctccattatgctaattaccaagtggttagtataatagcagtctgtcttttgatagctctgaacatgagtttctttttacaaatttcaaaatcttggagaactagctttacattttctgtgtattgcaattgttttttctttaatgttttgatttatgaaccgaatctcccctaactaaaccagtggccatggattgtggtataaccaagcatcttaagtgaccacccagttctttgattttggggggtgtcccaagtgttgggctgagagaaatcaactgttccctattctaaaagttttctttaatctggctggaggcactttctttatgtttttctggatcatagattacctgagaatgtgaaatgtgaagttaatttaggcattccaggtcagtgctggggagagcccattggagctcgatggggtcagtagtatgtgtcagcttaagcatcctagtttgatgcgtgggtttgttttggttggttttaggcaatcctagccacccttggctttcccattagactgcattgcctctttacgttaagcttccttcattaaatagccactgccagaatacctgagtgagaccaactgaattttactgttgaataattgggctcagtttagcttttcatcagggttgtcatggtacggtcatttcagttcaaagctgagtcaagtcagctttgggaagcctcccaggcctgagttcagttgactcagggctgtacttggcggcttatggaagaaacggggccctgatgcaggtctgagtggttcagtgtggacagtttgtcagacctccctcttaggtggggtgggcttcccagctgcacacctttgactgaggaactcttcatacaaccactcccctttaaacagagctagaaatggagctggctggttttataaaaccaccacttacaaaactgcttcacgtggatattgttgagactaaacatttatttttctaaatcatgcgagtgattgctttagcttgtaaatctctagcataattcagggtgggtttctttataagctgcttacagtgatatggacgttaagattcatgtaatatattagcctactaacttaaacatggtttgttttttcagacaacttgattttaagaagaacggtacagtgtaaggtttcaagtctgcctgatccagtttaaagcacaagggctaaaaggattttttttccttaaaagaaggatcggaaaagagcaaatgttttaagctattgtattatgtaaacagagatcccaccaagaaagtgtaaatcagagccgggtgtccatgacagttgacagacctgtttggtgtgcctgttttgctaggagaccagagaacttgatgtactgcagacagctgagttacgcatttggttttgaaaaattatcttgtgtgaggaatatgattataacgtgaatttttccacatcttggtgtctgctagcttgaagtacaagaaaatattagtattctactatttatcttgcattaaaacactttaacattgaaaacgtgggactaatcaaaacaatacagtttcttcttggttgctggctgacttgacccaagtcactgctcaaactctgttttcataatatgatggttttggtgtactcttcagaagacaaatgtctgacttgcgggaaaaaaacaaacgtttagccatttgcaaacaaattgtctctttgcaattgtctaatatatgcacagcagccagtagaattcccctttttatttttttttccccgcagaccatcttgattcaaaacatctatcgtaatccccaaaacagtgcacagacggctgacggctcacactgtaagtcccacagttggagaaatttttttaaaacaatggtgttaaagagcccactcttaattgagacaaataatgttggcttctgagctgctgacatagagctgttgcaaacaggacaaggtgctggaactccttggcgcacacagcaagaacttgatacttggccacgttcaggaggcttatcccttctagggagggtcactggcccggccacctccattgattgacatttgtcatgagagcaggtccgtccatgtgaaacggatttcaacattttgagccattcattggtctttacagtgactgaacccctggcctttattaagttctttgtgtaaaattaaaactcttaggaatattaaggaatcaataaggtaagttgcccagtaagtgtgggttttatttcaccattataatttttcctccaggaagtggagatttcatgatatgtaacaattgtatttctctaatacagtaattttttccatcagtttatgtaagcattattctttccgagttcattaaaaattttctgccacatctaagaacattttggtgctagcctggcaaactatttgtgcttttacctgaattggaattttgaaaaggagagttttcacgttctgtaagcagaagtacaagatgggcatatcatgagacctccgttacaccgcagtgttagggattcaaggcagccgccaactgagaaaacgcctctgcttctccagaaaataacttgctctcttttcagcactgaatctcaactgaagcacttgccagaggcagccggttaagtgtttacctttaattttccataatataaagttgttgcgttttgtatttcagaccattgccctcttgaacatttaccgtaaccctcaaaactcttcccagtctgctgacggtttgcgctgtgccgtgagcgatgtggagatgcaggaacactatgatgagttttttgaggaggtttttacagaaatggaggagaagtatggggaagtagaggagatgaacgtctgtgacaacctgggagaccacctggtggggaacgtgtacgtcaagtttcgccgtgaggaagatgcggaaaaggctgtgattgacttgaataaccgttggtttaatggacagccgatccacgccgagctgtcacccgtgacggacttcagagaagcctgctgccgtcagtatgagatgggagaatgcacacgaggcggcttctgcaacttcatgcatttgaagcccatttccagagagctgcggcgggagctgtatggccgccgtcgcaagaagcatagatcaagatcccgatcccgggagcgtcgttctcggtctagagaccgtggtcgtggcggtggcggtggcggtggtggaggtggcggcggacgggagcgtgacaggaggcggtcgagagatcgtgaaagatctgggcgattctgagccatgccatttttaccttatgtctgctagaaagtgttgtagttgattgaccaaaccagttcataaggggaattttttttaaaaaacaacaaaaaaaaaaacatacaaagatgggtttctgaataaaatttgtagtgataacagta

SEQ ID NO: 22716 - DNA, 940 bp, Homo sapiens
  misc_feature 1..940: note = ENST00000380276
  source 1..940: mol_type = unassigned DNA; mol_type = unassigned DNA
ctcccgagggcgtcggcagggtcggcggcgtcggcagcagtgtcgacggcagcggcggcggcgggtgggaaatggcggagtatctggcctccatcttcggcaccgagaaagacaaagtcaactgttcattttatttcaaaattggagcatgtcgtcatggagacaggtgctctcggttgcacaataaaccgacgtttagccagaccatcttgattcaaaacatctatcgtaatccccaaaacagtgcacagacggctgacggctcacactgtgccgtgagcgatgtggagatgcaggaacactatgatgagttttttgaggaggtttttacagaaatggaggagaagtatggggaagtagaggagatgaacgtctgtgacaacctgggagaccacctggtggggaacgtgtacgtcaagtttcgccgtgaggaagatgcggaaaaggctgtgattgacttgaataaccgttggtttaatggacagccgatccacgccgagctgtcacccgtgacggacttcagagaagcctgctgccgtcagtatgagatgggagaatgcacacgaggcggcttctgcaacttcatgcatttgaagcccatttccagagagctgcggcgggagctgtatggccgccgtcgcaagaagcatagatcaagatcccgatcccgggagcgtcgttctcggtctagagaccgtggtcgtggcggtggcggtggcggtggtggaggtggcggcggacgggagcgtgacaggaggcggtcgagagatcgtgaaagatctgggcgattctgagccatgccatttttaccttatgtctgctagaaagtgttgtagttgattgaccaaaccagttcataaggggaattttttttaaaaaacaacaaaaaaaaaaacatacaaagatgggtttctgaataaaatttgtagtgataacagta

SEQ ID NO: 22717 - DNA, 962 bp, Homo sapiens
  misc_feature 1..962: note = ENST00000291552
  source 1..962: mol_type = unassigned DNA; mol_type = unassigned DNA
cgtcgtcgcgtccgggtgacgtctcccgagggcgtcggcagggtcggcggcgtcggcagcagtgtcgacggcagcggcggcggcgggtgggaaatggcggagtatctggcctccatcttcggcaccgagaaagacaaagtcaactgttcattttatttcaaaattggagcatgtcgtcatggagacaggtgctctcggttgcacaataaaccgacgtttagccagaccattgccctcttgaacatttaccgtaaccctcaaaactcttcccagtctgctgacggtttgcgctgtgccgtgagcgatgtggagatgcaggaacactatgatgagttttttgaggaggtttttacagaaatggaggagaagtatggggaagtagaggagatgaacgtctgtgacaacctgggagaccacctggtggggaacgtgtacgtcaagtttcgccgtgaggaagatgcggaaaaggctgtgattgacttgaataaccgttggtttaatggacagccgatccacgccgagctgtcacccgtgacggacttcagagaagcctgctgccgtcagtatgagatgggagaatgcacacgaggcggcttctgcaacttcatgcatttgaagcccatttccagagagctgcggcgggagctgtatggccgccgtcgcaagaagcatagatcaagatcccgatcccgggagcgtcgttctcggtctagagaccgtggtcgtggcggtggcggtggcggtggtggaggtggcggcggacgggagcgtgacaggaggcggtcgagagatcgtgaaagatctgggcgattctgagccatgccatttttaccttatgtctgctagaaagtgttgtagttgattgaccaaaccagttcataaggggaattttttttaaaaaacaacaaaaaaaaaaacatacaaagatgggtttctgaataaaatttgtagtgataacagta

SEQ ID NO: 22718 - DNA, 682 bp, Homo sapiens
  misc_feature 1..682: note = ENST00000486519
  source 1..682: mol_type = unassigned DNA; mol_type = unassigned DNA
gacgtctcccgagggcgtcggcagggtcggcggcgtcggcagcagtgtcgacggcagcggcggcggcgggtgggaaatggcggagtatctggcctccatcttcggcaccgagaaagacaaagtcaactgttcattttatttcaaaattggagcatgtcgtcatggagacaggtgctctcggttgcacaataaaccgacgtttagccagcactgaatctcaactgaagcacttgccagaggcagccggtgccgtgagcgatgtggagatgcaggaacactatgatgagttttttgaggaggtttttacagaaatggaggagaagtatggggaagtagaggagatgaacgtctgtgacaacctgggagaccacctggtggggaacgtgtacgtcaagtttcgccgtgaggaagatgcggaaaaggctgtgattgacttgaataaccgttggtttaatggacagccgatccacgccgagctgtcacccgtgacggacttcagagaagcctgctgccgtcagtatgagatgggagaatgcacacgaggcggcttctgcaacttcatgcatttgaagcccatttccagagagctgcggcgggagctgtatggccgccgtcgcaagaagcatagatcaagatcccgatcccgggagcgtcgttctcggtctagagaccgtggtcgtgg

SEQ ID NO: 22719 - DNA, 338 bp, Homo sapiens
  misc_feature 1..338: note = ENST00000463599
  source 1..338: mol_type = unassigned DNA; mol_type = unassigned DNA
tgtcatgctgctgacatattccatgtgtttgatatcttcccagcaaaataatcagctctcattttcccttacagagtcaactgttcattttatttcaaaattggagcatgtcgtcatggagacaggtgctctcggttgcacaataaaccgacgtttagccagaccatcttgattcaaaacatctatcgtaatccccaaaacagtgcacagacggctgacggctcacactaccattgccctcttgaacatttaccgtaaccctcaaaactcttcccagtctgctgacggtttgcgctgtgccgtgagcgatgtggagatgcaggaacactatgatgagt

SEQ ID NO: 22720 - DNA, 3973 bp, Homo sapiens
  misc_feature 1..3973: note = ENST00000496462
  source 1..3973: mol_type = unassigned DNA; mol_type = unassigned DNA
gtcgacggcagcggcggcggcgggtgggaaatggcggagtatctggcctccatcttcggcaccgagaaagacaaagtcaactgttcattttatttcaaaattggagcatgtcgtcatggagacaggtgctctcggttgcacaataaaccgacgtttagccagaccatcttgattcaaaacatctatcgtaatccccaaaacagtgcacagacggctgacggctcacactgtaagtcccacagttggagaaatttttttaaaacaatggtgttaaagagcccactcttaattgagacaaataatgttggcttctgagctgctgacatagagctgttgcaaacaggacaaggtgctggaactccttggcgcacacagcaagaacttgatacttggccacgttcaggaggcttatcccttctagggagggtcactggcccggccacctccattgattgacatttgtcatgagagcaggtccgtccatgtgaaacggatttcaacattttgagccattcattggtctttacagtgactgaacccctggcctttattaagttctttgtgtaaaattaaaactcttaggaatattaaggaatcaataaggtaagttgcccagtaagtgtgggttttatttcaccattataatttttcctccaggaagtggagatttcatgatatgtaacaattgtatttctctaatacagtaattttttccatcagtttatgtaagcattattctttccgagttcattaaaaattttctgccacatctaagaacattttggtgctagcctggcaaactatttgtgcttttacctgaattggaattttgaaaaggagagttttcacgttctgtaagcagaagtacaagatgggcatatcatgagacctccgttacaccgcagtgttagggattcaaggcagccgccaactgagaaaacgcctctgcttctccagaaaataacttgctctcttttcagcactgaatctcaactgaagcacttgccagaggcagccggttaagtgtttacctttaattttccataatataaagttgttgcgttttgtatttcagaccattgccctcttgaacatttaccgtaaccctcaaaactcttcccagtctgctgacggtttgcgctgtaagttcatacaagttccttccccggttccctgggcttgcgtgtcagagctcagtgtccactccatctggtctgccgtgctagtgtcaaggaccgcgtttcactagaggtggcaaggagctttcgtcccactgaccccatggaaacctcttttggagatttgaactcccaccgtgtgttaaaagggaaaaagtaactggaaagggtgccctttaaaacagtctagagctgggccgggcgcggtggctcacgcctgtaatcccagcactttgggaggccgaggcgggtggatcatgaggtcaggagttcaagaccaatctggccaacatggtgaaaccccatctctactaaagatacaaaaattagctgggcgtggtggcagatgcctgcaatcccagcttctagggaggctgaggcagagaatcgcttgaacccgggaggcggaggttgcagtgaactgagatcgtgccgctgcactccagcctgggcgacagagtgagactccgtctccaaaaaaaaaaaaaaaaacagtctggagctgctgctgccccttcttcctttactttggccgtcatcctagagggaatgtactggaattaaacgtcgagtcatattcttccctcttagagcaacaaaatttgaatgtttctctcactttctggaatttttaaaaagcaaactttttaagttattttttcagattttatttctcattagccttttttccttgaactccattttggagtgcaccctgtagttgtaagagcattgtgctgagagcgttccccaaatgagggtctgcagcttgcactgacccctgagttcctcacccaccagccccgtgccgacccgtctaacccgtgtgggggtgctccactcaaataggcccttggcagaaaagattgtccgttctgtccacacactgcctggatacagtctccagctctaggagatggaattggtttgctccatttagaaatagatcaaaactgggcattcagtagatggtaccaatatcttcctgtactgggaaatactaaatttagattgtgaatatttacctaatgataatttttagagaaggagatatcatagatgagtatgattgggaagttcagaaaactaaaatttgatttttacagccatccaactatagaatcattagaatttagtcatttatggataaattaaaatgaacacctggactcttgttaaaatcagaaagtccaaaccaaagataggcacttcccattcaccattctgttttaaagcagtaaaaattgaggtgcccttggatatccacaagcctaaattgagtacacccttgaaccagagcccctcagttaatggggtgaccgacatggggtagctgatcccagggggcattcccctctcgagctggccctgcactgggtggcctggggattgtgcttccttgcacagtggtgcacatttctatgtgtggatgagattttcttgtcaacttttcctgccaagacactaaatgcttttcagtgctaatactgacctgatagtagagatttctttccctgagtcggatggtagcaggatttacttggtaacccttggtttaaaatacctgtttttttgtttgtttgttttcttttgttttttaaggaaataagatcaataggcggagggaaattgtttctatatgcacttattaaataatttttgttaacaaccctgccctgggataaaagtgaatggaagtacatgactgagtaacagtaattaattctttgccctgatcgtttatttggggactgtatatgctttcttgactgacaatagaatgttgtattagttttcattgtgtctttatttgcagttcacagcacttttgttttgcatatgctacaaactaaaagtttagcaattacgttatattccaattctggagtccagattgtacaaattagatgaaattctaattcgtcattttaggaagaaatcaattacctaaaattactggctcttttcaacataccctttagtatgtaaaaaaataagcttcaaatgcgtgggttaaagttaactatcaatcccagtttaagaatgatatttctgtaagaaaactgctttattttccaagttgtagtatttaacataggctgagtcacaaataagtttttaattgtatcttaatgcagttgtctctgcctttcaagtcactttgattgaaacattttaagcagaacaaatatagccaataatttaaaataatcaccccaaaaccatttctcaaacctgctaaaactttgagcatgtgaataattttctcctcttcacattcttcttatgtgggaaggaagtgaatttgaaatattaaaatctgccctttggaataggctactttggccgtttataacttgatttctactcggggaggaaggtacattcccaatagctttccaattgggatatcctgtgatatgattggcaggctgtccgagtagttacacttaataaaatttgggttcgaaagcagattcctggaagttcaaaaataactaaaacagccccggataggttagaaagtgaacttaaatcattctcagaattagaaaataagaagttattttttatcttcaaagataaaaagggggccgggcacggtggctcacgcctgtaatcccagcactttggaaagccgaggcaagtggatcacgaggtcgagagattgagaccatcctggccaacatggtggaaccccgtctctactaaaactacaaaaattagccaagatcacgccattgcactccagcctggagacagtgagacgccgtctcaaaaaaaaaaaaaaaaaa

SEQ ID NO: 22721 - DNA, 609 bp, Homo sapiens
  misc_feature 1..609: note = ENST00000468039
  source 1..609: mol_type = unassigned DNA; mol_type = unassigned DNA
cgggtgtccatgacagttgacagacctgtttggtgtgcctgttttgctaggagaccagagaacttgatgtactgcagacagctgagttacgcatttggttttgaaaaattatcttgtgtgaggaatatgattataacgtgaatttttccacatcttggtgtctgctagcttgaagtacaagaaaatattagtattctactatttatcttgcattaaaacactttaacattgaaaacgtgggactaatcaaaacaatacagtttcttcttggttgctggctgacttgacccaagtcactgctcaaactctgttttcataatatgatggttttggtgtactcttcagaagacaaatgtctgacttgcgggaaaaaaacaaacgtttagccatttgcaaacaaattgtctctttgcaattgtctaatatatgcacagcagccagtagaattcccctttttatttttttttccccgcagaccatcttgattcaaaacatctatcgtaatccccaaaacagtgcacagacggctgacggctcacactaccattgccctcttgaacatttaccgtaaccctcaaaactcttcccagtctgctgacggtttgcgct

SEQ ID NO: 22722 - DNA, 1019 bp, Homo sapiens
  misc_feature 1..1019: note = ENST00000398137
  source 1..1019: mol_type = unassigned DNA; mol_type = unassigned DNA
gtccgggtgacgtctcccgagggcgtcggcagggtcggcggcgtcggcagcagtgtcgacggcagcggcggcggcgggtgggaaatggcggagtatctggcctccatcttcggcaccgagaaagacaaagtcaactgttcattttatttcaaaattggagcatgtcgtcatggagacaggtgctctcggttgcacaataaaccgacgtttagccagaccatcttgattcaaaacatctatcgtaatccccaaaacagtgcacagacggctgacggctcacactaccattgccctcttgaacatttaccgtaaccctcaaaactcttcccagtctgctgacggtttgcgctgtgccgtgagcgatgtggagatgcaggaacactatgatgagttttttgaggaggtttttacagaaatggaggagaagtatggggaagtagaggagatgaacgtctgtgacaacctgggagaccacctggtggggaacgtgtacgtcaagtttcgccgtgaggaagatgcggaaaaggctgtgattgacttgaataaccgttggtttaatggacagccgatccacgccgagctgtcacccgtgacggacttcagagaagcctgctgccgtcagtatgagatgggagaatgcacacgaggcggcttctgcaacttcatgcatttgaagcccatttccagagagctgcggcgggagctgtatggccgccgtcgcaagaagcatagatcaagatcccgatcccgggagcgtcgttctcggtctagagaccgtggtcgtggcggtggcggtggcggtggtggaggtggcggcggacgggagcgtgacaggaggcggtcgagagatcgtgaaagatctgggcgattctgagccatgccatttttaccttatgtctgctagaaagtgttgtagttgattgaccaaaccagttcataaggggaattttttttaaaaaacaacaaaaaaaaaaacatacaaagatgggtttctgaataaaatttgtagtgataacagt

SEQ ID NO: 22723 - DNA, 2294 bp, Homo sapiens
  misc_feature 1..2294: note = ENST00000367926
  source 1..2294: mol_type = unassigned DNA; mol_type = unassigned DNA
ctgtgctcccggcgctgacgtgtctgggcggtcggcttccactccttcaggcgtcggcagccactagtcgtggcgagaggggcggggtggccggggctggcgctccacttggcccccgctcccggcccgccccgccgccgcggccccccggatgagggtatatattcggagcgagcgcgggacgccgatgagtggccgcgcggaaggagctggagacggtcgtagctgcggtcgcgccgagaaaggtttacaggtacatacattacacccctatttctacaaagcttggctattagagcattatgaacattaatgacctcaaactcacgttgtccaaagctgggcaagagcacctactacgtttctggaatgagcttgaagaagcccaacaggtagaactttatgcagagctccaggccatgaactttgaggagctgaacttctttttccaaaaggccattgaaggttttaaccagtcttctcaccaaaagaatgtggatgcacgaatggaacctgtgcctcgagaggtattaggcagtgctacaagggatcaagatcagctccaggcctgggaaagtgaaggacttttccagatttctcagaataaagtagcagttcttcttctagctggtgggcaggggacaagactcggcgttgcatatcctaaggggatgtatgatgttggtttgccatcccgtaagacactttttcagattcaagcagagcgtatcctgaagctacagcaggttgctgaaaaatattatggcaacaaatgcattattccatggtatataatgaccagtggcagaacaatggaatctacaaaggagttcttcaccaagcacaagtactttggtttaaaaaaagagaatgtaatcttttttcagcaaggaatgctccccgccatgagttttgatgggaaaattattttggaagagaagaacaaagtttctatggctccagatgggaatggtggtctttatcgggcacttgcagcccagaatattgtggaggatatggagcaaagaggcatttggagcattcatgtctattgtgttgacaacatattagtaaaagtggcagacccacggttcattggattttgcattcagaaaggagcagactgtggagcaaaggtggtagagaaaacgaaccctacagaaccagttggagtggtttgccgagtggatggagtttaccaggtggtagaatatagtgagatttccctggcaacagctcaaaaacgaagctcagacggacgactgctgttcaatgcggggaacattgccaaccatttcttcactgtaccatttctgagagatgttgtcaatgtttatgaacctcagttgcagcaccatgtggctcaaaagaagattccttatgtggatacccaaggacagttaattaagccagacaaacccaatggaataaagatggaaaaatttgtctttgacatcttccagtttgcaaagaagtttgtggtatatgaagtattgcgagaagatgagttttccccactaaagaatgctgatagtcagaatgggaaagacaaccctactactgcaaggcatgctttgatgtcccttcatcattgctgggtcctcaatgcagggggccatttcatagatgaaaatggctctcgccttccagcaattccccgcttgaaggatgccaatgatgtaccaatccaatgtgaaatctctcctcttatctcctatgctggagaaggattagaaagttatgtggcagataaagaattccatgcacctctaatcatcgatgagaatggagttcatgagctggtgaaaaatggtatttgaaccagataccaagttttgtttgccacgataggaatagcttttatttttgatagaccaactgtgaacctacaagacgtcttggacaactgaagtttaaatatccacagggttttattttgcttgttgaactcttagagctattgcaaacttcccaagatccagatgactgaatttcagatagcatttttatgattcccaactcattgaaggtcttatttatataattttttccaagccaaggagaccattggccatccaggaaatttcgtacagctgaaatataggcaggatgttcaacatcagtttacttgcagctggaagcatttgtttttgaagttgtacatagtaataatatgtcattgtacatgttgaaaggtttctatggtactaaaagtttgttttattttatcaaacattaagcttttttaagaaaataattgggcagtgaaataaatgtatcttcttgtctctgga

SEQ ID NO: 22724 - DNA, 128 bp, Homo sapiens
  misc_feature 1..128: note = ENST00000476240
  source 1..128: mol_type = unassigned DNA; mol_type = unassigned DNA
gagtggccgcgcggaaggagctggagacggtcgtagctgcggtcgcgccgagaaagaaggatggtattggagggctgagcacacgtatgctgaacatatggctgcttgaactttggcctgtcgctgtg

SEQ ID NO: 22725 - DNA, 2069 bp, Homo sapiens
  misc_feature 1..2069: note = ENST00000367925
  source 1..2069: mol_type = unassigned DNA; mol_type = unassigned DNA
ctatttctacaaagcttggctattagagcattatgaacattaatgacctcaaactcacgttgtccaaagctgggcaagagcacctactacgtttctggaatgagcttgaagaagcccaacaggtagaactttatgcagagctccaggccatgaactttgaggagctgaacttctttttccaaaaggccattgaaggttttaaccagtcttctcaccaaaagaatgtggatgcacgaatggaacctgtgcctcgagaggtattaggcagtgctacaagggatcaagatcagctccaggcctgggaaagtgaaggacttttccagatttctcagaataaagtagcagttcttcttctagctggtgggcaggggacaagactcggcgttgcatatcctaaggggatgtatgatgttggtttgccatcccgtaagacactttttcagattcaagcagagcgtatcctgaagctacagcaggttgctgaaaaatattatggcaacaaatgcattattccatggtatataatgaccagtggcagaacaatggaatctacaaaggagttcttcaccaagcacaagtactttggtttaaaaaaagagaatgtaatcttttttcagcaaggaatgctccccgccatgagttttgatgggaaaattattttggaagagaagaacaaagtttctatggctccagatgggaatggtggtctttatcgggcacttgcagcccagaatattgtggaggatatggagcaaagaggcatttggagcattcatgtctattgtgttgacaacatattagtaaaagtggcagacccacggttcattggattttgcattcagaaaggagcagactgtggagcaaaggtggtagagaaaacgaaccctacagaaccagttggagtggtttgccgagtggatggagtttaccaggtggtagaatatagtgagatttccctggcaacagctcaaaaacgaagctcagacggacgactgctgttcaatgcggggaacattgccaaccatttcttcactgtaccatttctgagagatgttgtcaatgtttatgaacctcagttgcagcaccatgtggctcaaaagaagattccttatgtggatacccaaggacagttaattaagccagacaaacccaatggaataaagatggaaaaatttgtctttgacatcttccagtttgcaaagaagtttgtggtatatgaagtattgcgagaagatgagttttccccactaaagaatgctgatagtcagaatgggaaagacaaccctactactgcaaggcatgctttgatgtcccttcatcattgctgggtcctcaatgcagggggccatttcatagatgaaaatggctctcgccttccagcaattccccgcagtgctacaaatgggaagtcagagaccatcacagctgatgtcaatcacaacttgaaggatgccaatgatgtaccaatccaatgtgaaatctctcctcttatctcctatgctggagaaggattagaaagttatgtggcagataaagaattccatgcacctctaatcatcgatgagaatggagttcatgagctggtgaaaaatggtatttgaaccagataccaagttttgtttgccacgataggaatagcttttatttttgatagaccaactgtgaacctacaagacgtcttggacaactgaagtttaaatatccacagggttttattttgcttgttgaactcttagagctattgcaaacttcccaagatccagatgactgaatttcagatagcatttttatgattcccaactcattgaaggtcttatttatataattttttccaagccaaggagaccattggccatccaggaaatttcgtacagctgaaatataggcaggatgttcaacatcagtttacttgcagctggaagcatttgtttttgaagttgtacatagtaataatatgtcattgtacatgttgaaaggtttctatggtactaaaagtttgttttattttatcaaacattaagcttttttaagaaaataattgggcagtgaaataaatgtatcttcttgtc

SEQ ID NO: 22726 - DNA, 2066 bp, Homo sapiens
  misc_feature 1..2066: note = ENST00000367924
  source 1..2066: mol_type = unassigned DNA; mol_type = unassigned DNA
ctatttctacaaagcttggctattagagcattatgaacattaatgacctcaaactcacgttgtccaaagctgggcaagagcacctactacgtttctggaatgagcttgaagaagcccaacaggtagaactttatgcagagctccaggccatgaactttgaggagctgaacttctttttccaaaaggccattgaaggttttaaccagtcttctcaccaaaagaatgtggatgcacgaatggaacctgtgcctcgagaggtattaggcagtgctacaagggatcaagatcagctccaggcctgggaaagtgaaggacttttccagatttctcagaataaagtagcagttcttcttctagctggtgggcaggggacaagactcggcgttgcatatcctaaggggatgtatgatgttggtttgccatcccgtaagacactttttcagattcaagcagagcgtatcctgaagctacagcaggttgctgaaaaatattatggcaacaaatgcattattccatggtatataatgaccagtggcagaacaatggaatctacaaaggagttcttcaccaagcacaagtactttggtttaaaaaaagagaatgtaatcttttttcagcaaggaatgctccccgccatgagttttgatgggaaaattattttggaagagaagaacaaagtttctatggctccagatgggaatggtggtctttatcgggcacttgcagcccagaatattgtggaggatatggagcaaagaggcatttggagcattcatgtctattgtgttgacaacatattagtaaaagtggcagacccacggttcattggattttgcattcagaaaggagcagactgtggagcaaaggtggtagagaaaacgaaccctacagaaccagttggagtggtttgccgagtggatggagtttaccaggtggtagaatatagtgagatttccctggcaacagctcaaaaacgaagctcagacggacgactgctgttcaatgcggggaacattgccaaccatttcttcactgtaccatttctgagagatgttgtcaatgtttatgaacctcagttgcagcaccatgtggctcaaaagaagattccttatgtggatacccaaggacagttaattaagccagacaaacccaatggaataaagatggaaaaatttgtctttgacatcttccagtttgcaaagaagtttgtggtatatgaagtattgcgagaagatgagttttccccactaaagaatgctgatagtcagaatgggaaagacaaccctactactgcaaggcatgctttgatgtcccttcatcattgctgggtcctcaatgcagggggccatttcatagatgaaaatggctctcgccttccagcaattccccgtgctacaaatgggaagtcagagaccatcacagctgatgtcaatcacaacttgaaggatgccaatgatgtaccaatccaatgtgaaatctctcctcttatctcctatgctggagaaggattagaaagttatgtggcagataaagaattccatgcacctctaatcatcgatgagaatggagttcatgagctggtgaaaaatggtatttgaaccagataccaagttttgtttgccacgataggaatagcttttatttttgatagaccaactgtgaacctacaagacgtcttggacaactgaagtttaaatatccacagggttttattttgcttgttgaactcttagagctattgcaaacttcccaagatccagatgactgaatttcagatagcatttttatgattcccaactcattgaaggtcttatttatataattttttccaagccaaggagaccattggccatccaggaaatttcgtacagctgaaatataggcaggatgttcaacatcagtttacttgcagctggaagcatttgtttttgaagttgtacatagtaataatatgtcattgtacatgttgaaaggtttctatggtactaaaagtttgttttattttatcaaacattaagcttttttaagaaaataattgggcagtgaaataaatgtatcttcttgtc

SEQ ID NO: 22727 - DNA, 660 bp, Homo sapiens
  misc_feature 1..660: note = ENST00000474728
  source 1..660: mol_type = unassigned DNA; mol_type = unassigned DNA
ttcagaaaggagcagactgtggagcaaaggtggtagagaaaacgaaccctacagaaccagttggagtggtttgccgagtggatggagtttaccaggtggtagaatatagtgagatttccctggcaacagctcaaaaacgaagctcagacggacgactgctgttcaatgcggggaacattgccaaccatttcttcactgtaccatttctgagagatgttgtcaagtatgggcaagatgggggccttttaaaattatatttattgttaatcagaaactaagacacttgagagggatgcagacaccccaagtccatatcccacagaattcatctttcctgaggatcacttatcaaatggacatttatctcatgttgtgattgtttttagtaagatgtattgtaaggtgggaatcatcggagcccattccccagcgcattaatgggaggccaaagcatttctcccttctcaccctcccacccccaactatgtgctaggttctgttgaagcaaagcataagaaatgaaactttctttaccacagctgtgagctttttaaaaatacagatgttcaccttacaccaactgaattagaatttcaggaggtgggttcggggcatctatatttttagaaagctgcccacaaagttctaattcagctgatt

SEQ ID NO: 22728 - DNA, 1147 bp, Homo sapiens
  misc_feature 1..1147: note = ENST00000486089
  source 1..1147: mol_type = unassigned DNA; mol_type = unassigned DNA
gtgattattatgactgagaaactgaattttaaattttaaattagttttaaaaattttaattaaatttaagtagccctgtgcagctattggcttctgtattggatagtacagctttagaatgtttgtcaacattaatagtaccaaggtagtggtgaagattaaaatgcaatatgaaggcttcagagcacctagcattgggcttggcatatagtatatacctagtaagtagtcacctttttatcaaattgaaacttggaaatggttaaaaatgagatgtatgtaaggggacagtgtgtaaaaactagtgaagtgctgtaaagagctaccagtaattattggcacttgccccaaatagtgtccttctgacctgagaatttcatattaacttaatcctcagggaatttagtgatcatcagggtagcatctattccatttgtttaactggaagaattatctgcaagcttctcagaggaaagttatggtttgtacttttgctctggcaagtaacatgggaagcaaagtctttaacacatacttgttttttttcttagcttgaaggatgccaatgatgtaccaatccaatgtgaaatctctcctcttatctcctatgctggagaaggattagaaagttatgtggcagataaagaattccatgcacctctaatcatcgatgagaatggagttcatgagctggtgaaaaatggtatttgaaccagataccaagttttgtttgccacgataggaatagcttttatttttgatagaccaactgtgaacctacaagacgtcttggacaactgaagtttaaatatccacagggttttattttgcttgttgaactcttagagctattgcaaacttcccaagatccagatgactgaatttcagatagcatttttatgattcccaactcattgaaggtcttatttatataattttttccaagccaaggagaccattggccatccaggaaatttcgtacagctgaaatataggcaggatgttcaacatcagtttacttgcagctggaagcatttgtttttgaagttgtacatagtaataatatgtcattgtacatgttgaaaggtttctatggtactaaaagtttgttttattttatcaaacattaagcttttttaagaaaata

SEQ ID NO: 22729 - DNA, 2377 bp, Homo sapiens
  misc_feature 1..2377: note = ENST00000271469
  source 1..2377: mol_type = unassigned DNA; mol_type = unassigned DNA
cggccgcctccgcgtccgcgtcgtcgtctgtgctcccggcgctgacgtgtctgggcggtcggcttccactccttcaggcgtcggcagccactagtcgtggcgagaggggcggggtggccggggctggcgctccacttggcccccgctcccggcccgccccgccgccgcggccccccggatgagggtatatattcggagcgagcgcgggacgccgatgagtggccgcgcggaaggagctggagacggtcgtagctgcggtcgcgccgagaaaggtttacaggtacatacattacacccctatttctacaaagcttggctattagagcattatgaacattaatgacctcaaactcacgttgtccaaagctgggcaagagcacctactacgtttctggaatgagcttgaagaagcccaacaggtagaactttatgcagagctccaggccatgaactttgaggagctgaacttctttttccaaaaggccattgaaggttttaaccagtcttctcaccaaaagaatgtggatgcacgaatggaacctgtgcctcgagaggtattaggcagtgctacaagggatcaagatcagctccaggcctgggaaagtgaaggacttttccagatttctcagaataaagtagcagttcttcttctagctggtgggcaggggacaagactcggcgttgcatatcctaaggggatgtatgatgttggtttgccatcccgtaagacactttttcagattcaagcagagcgtatcctgaagctacagcaggttgctgaaaaatattatggcaacaaatgcattattccatggtatataatgaccagtggcagaacaatggaatctacaaaggagttcttcaccaagcacaagtactttggtttaaaaaaagagaatgtaatcttttttcagcaaggaatgctccccgccatgagttttgatgggaaaattattttggaagagaagaacaaagtttctatggctccagatgggaatggtggtctttatcgggcacttgcagcccagaatattgtggaggatatggagcaaagaggcatttggagcattcatgtctattgtgttgacaacatattagtaaaagtggcagacccacggttcattggattttgcattcagaaaggagcagactgtggagcaaaggtggtagagaaaacgaaccctacagaaccagttggagtggtttgccgagtggatggagtttaccaggtggtagaatatagtgagatttccctggcaacagctcaaaaacgaagctcagacggacgactgctgttcaatgcggggaacattgccaaccatttcttcactgtaccatttctgagagatgttgtcaatgtttatgaacctcagttgcagcaccatgtggctcaaaagaagattccttatgtggatacccaaggacagttaattaagccagacaaacccaatggaataaagatggaaaaatttgtctttgacatcttccagtttgcaaagaagtttgtggtatatgaagtattgcgagaagatgagttttccccactaaagaatgctgatagtcagaatgggaaagacaaccctactactgcaaggcatgctttgatgtcccttcatcattgctgggtcctcaatgcagggggccatttcatagatgaaaatggctctcgccttccagcaattccccgcagtgctacaaatgggaagtcagagaccatcacagctgatgtcaatcacaacttgaaggatgccaatgatgtaccaatccaatgtgaaatctctcctcttatctcctatgctggagaaggattagaaagttatgtggcagataaagaattccatgcacctctaatcatcgatgagaatggagttcatgagctggtgaaaaatggtatttgaaccagataccaagttttgtttgccacgataggaatagcttttatttttgatagaccaactgtgaacctacaagacgtcttggacaactgaagtttaaatatccacagggttttattttgcttgttgaactcttagagctattgcaaacttcccaagatccagatgactgaatttcagatagcatttttatgattcccaactcattgaaggtcttatttatataattttttccaagccaaggagaccattggccatccaggaaatttcgtacagctgaaatataggcaggatgttcaacatcagtttacttgcagctggaagcatttgtttttgaagttgtacatagtaataatatgtcattgtacatgttgaaaggtttctatggtactaaaagtttgttttattttatcaaacattaagcttttttaagaaaataattgggcagtgaaataaatgtatcttcttgtctctggagtgtc

SEQ ID NO: 22730 - DNA, 6912 bp, Homo sapiens
  misc_feature 1..6912: note = ENST00000284273
  source 1..6912: mol_type = unassigned DNA; mol_type = unassigned DNA
cagcccacaaggctccttttcctttttgatccattcaaaaattactcattgcaaattcccggactgctaggcgaggagagggaagggggcggaggagacagggctactgcaggcgcagagctgggggcagccgggggcccgagtggctgaggctggtcccgcagcggccgcttgccggcgttctggctcctgtggcctcaccaggaagcgtcagagtcccgacactggggaagctcggagcgccgcctccgctgccgccgcctcctgcctggctctgggtccccgagccccctcccctggcccagcccgactccctcctccttcccgaaccatccggctcgggctccttccctggcgatggctggccgctgagccatggctcagtacggccaccccagtccgctcggcatggctgcgagagaggagctgtacagcaaagtcaccccccggaggaaccgccaacagcgccccggcaccatcaagcatggatcggcgctggacgtgctcctctccatggggttccccagagcccgcgcacaaaaagccttggcatccacgggaggaagaagtgttcaggcagcatgtgactggttattctcccatgtcggtgaccccttcctggatgaccccctgccccgggagtacgtcctctacctccgtcccaccggccccttagcacagaagctttccgacttttggcagcagtcgaagcagatctgcgggaagaacaaggcacacaacatcttcccccacatcacactctgccagttctttatgtgcgaggacagcaaggtggatgccctgggggaagccctgcagaccacggtcagtcgctggaaatgtaagttctcggccccgctgcccctggagctctatacgtcgtccaacttcatcggcctctttgtaaaggaagacagtgcggaggtcctcaagaagtttgctgctgactttgctgcagaggctgcatccaaaaccgaagtgcatgtggaacctcataagaagcagctacatgtgaccctggcttaccacttccaagccagccacctacccaccctagagaaactggcccagaacattgacgtcaagctagggtgtgactgggtggctaccatattttctcgggatatccgatttgctaaccatgagacattacaggtcatctacccctataccccacaaaatgacgatgagctggagctggtccccggggacttcatcttcatgtctccaatggagcagaccagcaccagcgagggttggatctatggcacgtccttaaccaccggctgctctggactcctgcctgagaattacattaccaaggctgatgaatgcagcacctggatatttcatggttcttattcaatcttaaatacatcgtcatccaactctctcacgtttggggatggagtattggagaggcggccttatgaggaccaggggctcggggagacgactcctcttactatcatctgccagcccatgcagccgctgagggtcaacagccagcccggcccccagaagcgatgcctttttgtgtgtcggcatggtgagaggatggatgttgtgtttgggaagtactggctgtcccagtgcttcgatgccaaaggccgctacatacgcaccaacctgaacatgcctcatagtttacctcagcggagtggtggtttccgagattacgagaaagatgctcccatcactgtgtttggatgcatgcaagcaagactagtgggtgaagccttattagagagcaataccattatcgatcatgtctattgctccccgtcccttcgctgcgttcagactgcacacaatatcttgaaaggtttacaacaagaaaatcacttgaagatccgtgtagagcccggcttatttgagtggacaaaatgggttgctgggagcacattacctgcatggatacctccatcagagttagctgcagccaacctgagtgttgatacaacctacagacctcacattccaatcagcaaattagttgtttcagaatcctatgatacttatatcagtagaagtttccaagtaacaaaagaaataataagtgaatgtaaaagtaaaggaaataacatcctgattgtggcccacgcatcttcccttgaagcgtgtacctgccaacttcagggcctgtcacctcagaactccaaggacttcgtacaaatggtccgaaagatcccatatctgggattttgttcctgtgaagaattaggagaaactggaatatggcagctgacagatccaccaatccttcctcttacccatggaccaactgggggcttcaactggagagagaccttgcttcaagaataaaccacaccagtgaacaagaaggaaaggccttttggagtgtgtctttctgtgtgtttaaaaacagtgggaaaatccacaccacactctaagtggacagctcagaataatttagcatatttcctttcacacttaaagttcttaagatgagactgtgtaaatgagagaaagacttgattcagaggaaaaaaatgtgttctctctggactcttgcctagctcacaaggctttggagaattgtcttcctaaatcggggcacctgctacagaagagaatgtttcgttccctctgggtatgcacagctaaggggcctcatttctcccagagggagctgctggcccgctctaaggggtgcaagaggaaggagtgtgcccagaccagctgggggagcattgaaaggacagcttggggatggaatttttttttttttatctccattttccagttaggtagagccaagctgaggaatccttttaagattattagaaaacatgccctgaagagagttgttcttaggttacacatgaaatcctaccgtcactagcccccatacaccagtgttgctggctgaagatacccgcttaaggatgctaacatttaccctggtactgccacattttctctagagcagctggcccttcttgctacagccctatcccccctccttgcttctgtgaaatggggagacaaagcacttttgctctccaaagcacttttggatactcaggaggaaagataagatacatgtttgaagtattcaatcataggagcaaagaacttgcaaaatatgaagtgacttggaattaaccatgttgtagcctaacgtgctactgcatttctaaatcatcaatatttgcttgtctttgcccctagactctagactatgttaactagttaaggatgttacattttgaaaggatgtatgttagatatattatttgcagcaagaagttcattctgtgcaatatggacatgtttgcaaaccataccaagggtcaggttgttgtacacttacagtacgtgtcaaccataatggaacatccacaaatgcatcaattataccagggatgtatagtaagtcagggaactaatataaatgatgacagtcatggctgcactgctacttgtgctgtcgttttgtttgtttttctatgataatttaaaatacataggtagggctactgaggaaatttggagagccacattctgtggtttctcattatacttacttcctgcatttagagggagtttatttaaaagaaataaatgacaatcaaaccaaatcatcagttatcaatgtctgtttaattgtgtgactatctgactgttgatggccacagatgatggtctcctatggtatagttcactctgtagaagatgtatgcaaagtgaaatgccagccctttaaagagacattagttagtgtaaaatggatctttacatgttgcagtaacattgactatgtttcaaaactcagatgcataaaacgtaaggtatataaaaatacatctatgcttgcgtttgaaactacaacttgataacccctagaaagaagaggacatgaaaggatgctggctatatatgttaatgagcaaaaggattatagttgttttgttttgtttttagagacagggtctcactataatgcttagactggtcttgaactcctgggctcaagcgatcctcctgcccctgtctcccaaagtgctaggattacaggtgtgagccaccacacctggcccatagttgtattttttttaggtcacttagaaaaatatgtcatgtattttacattttgagaaacaaatcaatcatggtttcttctagcgttgcgcaaacactgacccagcttctgggtatggaaataaccctgtgatgatgtgttaatataaaatgttgggagggaatattcccaataaaggtcttaagagaaaagtcacattacaagtaatgtaatggctctaccattcattcttctggtatttgtaatgaagtgaatccactgtttaatcagatccataatctttaacagattcaccacaaattttcatgggcgttgagtgctcagaataatgcttgaacacctcaccttgaaactgtagcagtgtgttctgggcagtatctgtaatgtatgaaatagagtctggaataggttatccactccatcttctaggttatcttagttgtatgacgaactgataaatctgtctgactgggctacaatccattgttcttagtccaatatggacactgccttaggcaatggtctatataagcaaaaggagatagagatctgaaataattttccgaataattcaggtggaaaacaagaaagattgtatttctctgctttcatttcaatttcattatttcaaattgcttgtcaaaatggcccaaaagatctgaattcacattaagttccccttgcacacttacctatttaaaaaactaaacttgcactgcaactgagaaattatttgtaaatcatgtggcatctatgtataataaaagaaagagacaactatattactcaatttcatatacatccaaaaagtataggctaatatatataacctgaagttgcagctggttctttttgatctgaagctgatgcttattaaaacaaatgatgtatggggagaggagaaggaagggcaaggaaggaattgacagataagaagcaaatggtttcttgtacagaggaattttgttttaatgtagaaagttatttgaaataaactaggtgaaatgaaattaactaaaggttttaatctgggattgaaagcctgaaagcatttcctgcttctacaagtgtgccacatcaatccggtaatgccccagtgttattcacagacagaactttgtttcctgtgattttaaaataccgcgtctgttcctccatggaccagagtaattggcacattttaatgcataagctgggggtttcattttcccaggctctcttcaccatcactgcattggtagctaggagcttattgcttcaccccagtatggagttcagattacagtgttttccattacatttagattcatagaatctgaatggctgattaaatggccatctgatggctgaaagaggggcgtatttttcactctgtagtgaaaggcttggaggagtttctactttttattttaattatactttaaccaaagaattattttaaagtaaccttatatttaaaagatgattttgcaaaaaataaaaaataaaaaatatgccttctggagtgatgtctgtttggtaaatcattgttgataatttccttgttagtggtatttggaatgcatatagattgtcttgtcattgtgcttaacattaccataagtgtgtcttttccactcaactagctgtattcgtattaaaatgaagtctcttatttcaattacctagtgttgttgggaactaattgaacagctacagtaaaagaagttcctatctcattgcctttgtggaaaggcttccctatgtggtaaaagaaaggcattcctccgtaacctaggcactctgcaagtccagtgtttaatttcaaagcagtgatgaattgctcttttgaaattactctaagtaatccatgtgttagaatacagatgaacctccgtttgatttcacagccttcagcacaggcaactgttactgagtctgcacgaacttagataatgaggtgcagggttatttgcatttaaattgcaatccagcacacgtgtgagaaagaagaggcactagtctaaaaggctgcattgcggggagagatgagacaggcagaggagggtggggtaaagagcgatttaacatctatttaggttaatgttcactttacaaaggtgatgggggatattttgttaggtgatagcagaagcttttcatttttaaacatagaattaaaattggatttgcttctctttaatacttcaacatattgaatttccctaggaaagtgactagctataatgaaaattcaagcgaaaagggaaaaagattgtaaatgcagatgaaataacttcatttttaagtacaaataatagtaggattggtgtatgtaggtttaaaattatagtgatgactagtcgaacttaatatacaatcagttcttgcaaatactttacacttagctgccattacacaacaaattggaattttccagctgttcaactatcatggactctgtacaggatagatgtgtataatggaaaatatgtactgcttctttctttgattgccactcaagatggaaacaccatgccaaggcattttggttatacacagatcattctaaacctgttattttggagaggtgtattggtttctttctcatttataaggctattgtatttttttttgtatgtgattcaggtgtatttatttgaagactatttgtagttataggaaaaccacacctacctgtattgccaaattctttgtaaactctccgtggcacttgtgctttcctggctgagagctctcccctgttgatacagctatggcaccattgtaattacagatgcacctttcaggagcatctccattaaatggttcatagatgatttaataaaaagaaacttctcagttga

SEQ ID NO: 22731 - DNA, 572 bp, Homo sapiens
  misc_feature 1..572: note = ENST00000525711
  source 1..572: mol_type = unassigned DNA; mol_type = unassigned DNA
gcaaattcccggactgctaggcgaggagagggaagggggcggaggagacagggctactgcaggcgcagagctgggggcagccgggggcccgagtggctgaggctggtcccgcagcggccgcttgccggcgttctggctcctgtggcctcaccaggaagcgtcagagtcccgacactggggaagctcggagcgccgcctccgctgccgccgcctcctgcctggctctgggtccccgagccccctcccctggcccagcccgactccctcctccttcccgaaccatccggctcgggctccttccctggcgatggctggccgctgagccatggctcagtacggccaccccagtccgctcggcatggctgcgagagaggagctgtacagcaaagtcaccccccggaggaaccgccaacagcgccccggcaccatcaagcatggatcggcgctggacgtgctcctctccatggggttccccagagcccgcgcggcccgcctgtccccacgtagggagtgaagcaccaggcccagcaagccccgtggaggcctccgagatgggcaccaggagacaagga

SEQ ID NO: 22732 - DNA, 553 bp, Homo sapiens
  misc_feature 1..553: note = ENST00000526386
  source 1..553: mol_type = unassigned DNA; mol_type = unassigned DNA
attggagacttagaagtcttcactttcccatccccagccccaccttcatgtctacgttgtaaaagaggctgcagcaagagggcaataccaatatctattccaggggaagaatttggtaatgatggactttcaggaataaaggtttgggggaaaagctgagatttcatcacttacaagtgagccgctgtagaagccagtcaaatgtattgcgtgacaaaaagccttggcatccacgggaggaagaagtgttcaggcagcatgtgactggttattctcccatgtcggtgaccccttcctggatgaccccctgccccgggagtacgtcctctacctccgtcccaccggccccttagcacagaagctttccgacttttggcagcagtcgaagcagatctgcgggaagaacaaggcacacaacatcttcccccacatcacactctgccagttctttatgtgcgaggacagcaaggtggatgccctgggggaagccctgcagaccacggtcagtcgctggaaatgtaagttctcggccccgctgcccctggagctctat

SEQ ID NO: 22733 - DNA, 987 bp, Homo sapiens
  misc_feature 1..987: note = ENST00000530917
  source 1..987: mol_type = unassigned DNA; mol_type = unassigned DNA
agtaagtcgtgaggaaacagacaaggctgcaacccagcagcagttgagcaccttgtcaaagtgtgggaatgagcgtgtgtgggtctctgtgcttccagccttttctgcaccagctgttccaagcggagcagaggggtctgtcttgcttctccgtaacttcatcaacctacaaaaagccttggcatccacgggaggaagaagtgttcaggcagcatgtgactggttattctcccatgtcggtgaccccttcctggatgaccccctgccccgggagtacgtcctctacctccgtcccaccggccccttagcacagaagctttccgacttttggcagcagtcgaagcagatctgcgggaagaacaaggcacacaacatcttcccccacatcacactctgccagttctttatgtgcgaggacagcaaggtggatgccctgggggaagccctgcagaccacggtcagtcgctggaaatgtaagttctcggccccgctgcccctggagctctatacgtcgtccaacttcatcggcctctttgtaaaggaagacagtgcggaggtcctcaagaagtttgctgctgactttgctgcagaggctgcatccaaaaccgaagtgcatgtggaacctcataagaagcagctacatgtgaccctggcttaccacttccaagccagccacctacccaccctagagaaactggcccagaacattgacgtcaagctagggtgtgactgggtggctaccatattttctcgggatatccgatttgctaaccatgagacattacaggtcatctacccctataccccacaaaatgacgatgagctggagctggtccccggggacttcatcttcatgtctccaatggagcagaccagcaccagcgagggttggatctatggcacgtccttaaccaccggctgctctggactcctgcctgagaattacattaccaaggctgatgaatgcagcacctggatatttcatgg

SEQ ID NO: 22734 - DNA, 1032 bp, Homo sapiens
  misc_feature 1..1032: note = ENST00000533451
  source 1..1032: mol_type = unassigned DNA; mol_type = unassigned DNA
ggtggcgtgcacctgtagtcccagctacttgggaggcttaggcgggaggattgcttgagtgcaggaggttgaggctgcagtgagccacaatcatcacatcactgcactccagcctgggtgacagagtaagactctctcaaaaaaatagaaaaaagaaaaaagaaaaccatcagcaccacttctaatactttctgccaaaggggctgaaaacaagaatctgctctgtcagggatctgggtcactaagaatgagtgggtgaagaggaaggaggaaaaaccaagacatgacaacctttagagaagcaaaaataaaactctaatgtggaaactgctgaaaatagactgcctgggctgtcagactgcatgcaaatctgatgctaatcacatggaaattaattacaagtcctaacttccatatgtcttgatatgacccttgggggaaaacctgctgcaggtgtctactccccaccacagaggattgagtggaacacaggctttgatgtcgcctccttcacactcagctcttgccactgcagggagaggaggctaaaaatattaacaatagaaatttgatttcttctttcagacaaaaagccttggcatccacgggaggaagaagtgttcaggcagcatgtgactggttattctcccatgtcggtgaccccttcctggatgaccccctgccccgggagtacgtcctctacctccgtcccaccggccccttagcacagaagctttccgacttttggcagcagtcgaagcagatctgcgggaagaacaaggcacacaacatcttcccccacatcacactctgccagttctttatgtgcgaggacagcaaggtggatgccctgggggaagccctgcagaccacggtcagtcgctggaaatgtaagttctcggccccgctgcccctggagctctatacgtcgtccaacttcatcggcctctttgtaaaggaagacagtgcggaggtcctcaagaagtttgctgctgactttgctgcagaggctgcatccaaaaccggtgagca

SEQ ID NO: 22735 - DNA, 698 bp, Homo sapiens
  misc_feature 1..698: note = ENST00000529998
  source 1..698: mol_type = unassigned DNA; mol_type = unassigned DNA
ggttaagtaattgcattatcagcctcctccagtctctggggagaggatgccaatgttaagtagcagcagacttccatctccccttgtctctgagtgaagactgcctgttttccctgccagtgcgaggacagcaaggtggatgccctgggggaagccctgcagaccacggtcagtcgctggaaatgtaagttctcggccccgctgcccctggagctctatacgtcgtccaacttcatcggcctctttgtaaaggaagacagtgcggaggtcctcaagaagtttgctgctgactttgctgcagaggctgcatccaaaaccgaagtgcatgtggaacctcataagaagcagctacatgtgaccctggcttaccacttccaagccagccacctacccaccctagagaaactggcccagaacattgacgtcaagctagggtgtgactgggtggctaccatattttctcgggatatccgatttgctaaccatgagacattacaggtcatctacccctataccccacaaaatgacgatgagctggagctggtccccggggacttcatcttcatgtctccaatggagcagaccagcaccagcgagggttggatctatggcacgtccttaaccaccggctgctctggactcctgcctgagaattacattaccaaggctgatgaatgcagcacctggatatttcatgg

SEQ ID NO: 22736 - DNA, 1163 bp, Homo sapiens
  misc_feature 1..1163: note = ENST00000526493
  source 1..1163: mol_type = unassigned DNA; mol_type = unassigned DNA
caactaagggtgattttgtctcccagggtacatttggcaatgtctgaggtcattttcaattgttacagcttggagagtgctgctgacgtcttgtgggtagaggccagggatgctgcgaaacaccccatcatgcacaggacagccaccccccccaaaaaataattattcaacccaaaatgctgttgagagaaaccctgcattaaactttgaaaatatccatcttttcccctcatttctccatcaatctcacccagaagctaagacacgtgattccaaaatgaagggaatagagctttgggagtcacgcagctataaaacatgctttgtatttctacacaaattatttcatcactgtaggtcatagtgccctcttctgaaaggtggggctggtgaccaccaactggaatgttgtgagaaggacttaactaaaaggactgccctcagctgacccgcagctcctagaggaaagccgtatggtggctatctcttgaacagtggcttgattcggaatctcttgccatccccttacccccttattctactgctgtgaaggagagaaacgtcttttgtcttctttgttatgtgggaagcagaatttctcagggtacctttctatgcctttccttaagtcttcaccattgctatcatcaccaccttttaattactgacctttttcttcctttttccagaagtgcatgtggaacctcataagaagcagctacatgtgaccctggcttaccacttccaagccagccacctacccaccctagagaaactggcccagaacattgacgtcaagctagggtgtgactgggtggctaccatattttctcgggatatccgatttgctaaccatgagacattacaggtcatctacccctataccccacaaaatgacgatgagctggagctggtccccggggacttcatcttcatgtctccaatggagcagaccagcaccagcgagggttggatctatggcacgtccttaaccaccggctgctctggactcctgcctgagaattacattaccaaggctgatgaatgcagcacctggatatttcatggttcttattcaatcttaaatacatcgtcatccaactctctcacgtttggggatggagtattggagaggcggccttatgaggaccaggggctcgggg

SEQ ID NO: 22737 - DNA, 532 bp, Homo sapiens
  misc_feature 1..532: note = ENST00000530578
  source 1..532: mol_type = unassigned DNA; mol_type = unassigned DNA
gaggaccaggggctcggggagacgactcctcttactatcatctgccagcccatgcagccgctgagggtcaacagccagcccggcccccagaagcgatgcctttttgtgtgtcggcatggtgagaggatggatgttgtgtttgggaagtactggctgtcccagtgcttcgatgccaaaggccgctacatacgcaccaacctgaacatgcctcatagtttacctcagcggagtggtggtttccgagattacgagaaagatgctcccatcactgtgtttggatgcatgcaagcaagactagtgggtaagtatcctggagtgactgcactccaggcatttcttgcctcctccttcaaaacactggtaccatggatatgcaagacacttcctgtgggtttctataactttcctacaagtttcctcaattcaaaaggaacttactacacaaccattaagtttaggacactgtgctcagccctgggttggttgaccaaagtgaatgaggtgtggtccttattgaggagcacgtgatcca

SEQ ID NO: 22738 - DNA, 376 bp, Homo sapiens
  misc_feature 1..376: note = ENST00000577958
  source 1..376: mol_type = unassigned DNA; mol_type = unassigned DNA
agtttccagagctttcgaggaaggtttcttcaactcaaattcatccgcctgataattttcttatattttcctaaagaaggaagagaagcgcatagaggagaagggaaataattttttaggagcctttcttacggctatgaggaatttggggctcagttgaaaagcctaaactgcctctcgggaggttgggcgcggcgaactactttcagcggcgcacggagacggcgtctacgtgaggggtcaaaatgcagatcttcgtgaaaacccttaccggcaagaccatcacccttgaggtggagcccagtgacaccatcgaaaatgtgaaggccaagatccaggataaggaaggcattccccccgaccagcagaggctcat

SEQ ID NO: 22739 - DNA, 1225 bp, Homo sapiens
  misc_feature 1..1225: note = ENST00000302182
  source 1..1225: mol_type = unassigned DNA; mol_type = unassigned DNA
gtttccagagctttcgaggaaggtttcttcaactcaaattcatccgcctgataattttcttatattttcctaaagaaggaagagaagcgcatagaggagaagggaaataattttttaggagcctttcttacggctatgaggaatttggggctcagttgaaaagcctaaactgcctctcgggaggttgggcgcggcgaactactttcagcggcgcacggagacggcgtctacgtgaggggtgataagtgacgcaacactcgttgcataaatttgcgctccgccagcccggagcatttaggggcggttggctttgttgggtgagcttgtttgtgtccctgtgggtggacgtggttggtgattggcaggatcctggtatccgctaacaggtcaaaatgcagatcttcgtgaaaacccttaccggcaagaccatcacccttgaggtggagcccagtgacaccatcgaaaatgtgaaggccaagatccaggataaggaaggcattccccccgaccagcagaggctcatctttgcaggcaagcagctggaagatggccgtactctttctgactacaacatccagaaggagtcgaccctgcacctggtcctgcgtctgagaggtggtatgcagatcttcgtgaagaccctgaccggcaagaccatcaccctggaagtggagcccagtgacaccatcgaaaatgtgaaggccaagatccaggataaagaaggcatccctcccgaccagcagaggctcatctttgcaggcaagcagctggaagatggccgcactctttctgactacaacatccagaaggagtcgaccctgcacctggtcctgcgtctgagaggtggtatgcagatcttcgtgaagaccctgaccggcaagaccatcactctggaggtggagcccagtgacaccatcgaaaatgtgaaggccaagatccaagataaagaaggcatcccccccgaccagcagaggctcatctttgcaggcaagcagctggaagatggccgcactctttctgactacaacatccagaaagagtcgaccctgcacctggtcctgcgcctgaggggtggctgttaattcttcagtcatggcattcgcagtgcccagtgatggcattactctgcactatagccatttgccccaacttaagtttagaaattacaagtttcagtaatagctgaacctgttcaaaatgttaataaaggtttcgttgcatggta

SEQ ID NO: 22740 - DNA, 724 bp, Homo sapiens
  misc_feature 1..724: note = ENST00000577640
  source 1..724: mol_type = unassigned DNA; mol_type = unassigned DNA
gctatgaggaatttggggctcagttgaaaagcctaaactgcctctcgggaggttgggcgcggcgaactactttcagcggcgcacggagacggcgtctacgtcaaaatgcagatcttcgtgaaaacccttaccggcaagaccatcacccttgaggtggagcccagtgacaccatcgaaaatgtgaaggccaagatccaggataaggaaggcattccccccgaccagcagaggctcatctttgcaggcaagcagctggaagatggccgtactctttctgactacaacatccagaaggagtcgaccctgcacctggtcctgcgtctgagaggtggtatgcagatcttcgtgaagaccctgaccggcaagaccatcaccctggaagtggagcccagtgacaccatcgaaaatgtgaaggccaagatccaggataaagaaggcatccctcccgaccagcagaggctcatctttgcaggcaagcagctggaagatggccgcactctttctgactacaacatccagaaggagtcgaccctgcacctggtcctgcgtctgagaggtggtatgcagatcttcgtgaagaccctgaccggcaagaccatcactctggaggtggagcccagtgacaccatcgaaaatgtgaaggccaagatccaagataaagaaggcatcccccccgaccagcagaggctcatctttgcaggcaagcagctggaagatggccgca

SEQ ID NO: 22741 - DNA, 704 bp, Homo sapiens
  misc_feature 1..704: note = ENST00000535788
  source 1..704: mol_type = unassigned DNA; mol_type = unassigned DNA
atttaggggcggttggctttgttgggtgagcttgtttgtgtccctgtgggtggacgtggttggtgattggcaggatcctggtatccgctaacaggtcaaaatgcagatcttcgtgaaaacccttaccggcaagaccatcacccttgaggtggagcccagtgacaccatcgaaaatgtgaaggccaagatccaggataaggaaggcattccccccgaccagcagaggctcatctttgcaggcaagcagctggaagatggccgtactctttctgactacaacatccagaaggagtcgaccctgcacctggtcctgcgtctgagaggtggtatgcagatcttcgtgaagaccctgaccggcaagaccatcactctggaggtggagcccagtgacaccatcgaaaatgtgaaggccaagatccaagataaagaaggcatcccccccgaccagcagaggctcatctttgcaggcaagcagctggaagatggccgcactctttctgactacaacatccagaaagagtcgaccctgcacctggtcctgcgcctgaggggtggctgttaattcttcagtcatggcattcgcagtgcccagtgatggcattactctgcactatagccatttgccccaacttaagtttagaaattacaagtttcagtaatagctgaacctgttcaaaatgttaataaaggtttcgttgcatggt

SEQ ID NO: 22742 - DNA, 477 bp, Homo sapiens
  misc_feature 1..477: note = ENST00000578649
  source 1..477: mol_type = unassigned DNA; mol_type = unassigned DNA
aggggcggttggctttgttgggtgagcttgtttgtgtccctgtgggtggacgtggttggtgattggcaggatcctggtatccgctaacaggtggtatgcagatcttcgtgaagaccctgaccggcaagaccatcactctggaggtggagcccagtgacaccatcgaaaatgtgaaggccaagatccaagataaagaaggcatcccccccgaccagcagaggctcatctttgcaggcaagcagctggaagatggccgcactctttctgactacaacatccagaaagagtcgaccctgcacctggtcctgcgcctgaggggtggctgttaattcttcagtcatggcattcgcagtgcccagtgatggcattactctgcactatagccatttgccccaacttaagtttagaaattacaagtttcagtaatagctgaacctgttcaaaatgttaataaaggtttcgttgcatggtagcata

SEQ ID NO: 22743 - DNA, 1012 bp, Homo sapiens
  misc_feature 1..1012: note = ENST00000395839
  source 1..1012: mol_type = unassigned DNA; mol_type = unassigned DNA
gtgggggaggggagggcgaggtgacgcggcgctgggcctttccgggacagtgggccttgttgacctgaggggggcgagggcggttggcgcgcgcgcgcgttgacggaaactaacggacgcctaaccgatcggcgattctgtcgagtttacttcgcggggaaggcggaaaagaggtcaaaatgcagatcttcgtgaaaacccttaccggcaagaccatcacccttgaggtggagcccagtgacaccatcgaaaatgtgaaggccaagatccaggataaggaaggcattccccccgaccagcagaggctcatctttgcaggcaagcagctggaagatggccgtactctttctgactacaacatccagaaggagtcgaccctgcacctggtcctgcgtctgagaggtggtatgcagatcttcgtgaagaccctgaccggcaagaccatcaccctggaagtggagcccagtgacaccatcgaaaatgtgaaggccaagatccaggataaagaaggcatccctcccgaccagcagaggctcatctttgcaggcaagcagctggaagatggccgcactctttctgactacaacatccagaaggagtcgaccctgcacctggtcctgcgtctgagaggtggtatgcagatcttcgtgaagaccctgaccggcaagaccatcactctggaggtggagcccagtgacaccatcgaaaatgtgaaggccaagatccaagataaagaaggcatcccccccgaccagcagaggctcatctttgcaggcaagcagctggaagatggccgcactctttctgactacaacatccagaaagagtcgaccctgcacctggtcctgcgcctgaggggtggctgttaattcttcagtcatggcattcgcagtgcccagtgatggcattactctgcactatagccatttgccccaacttaagtttagaaattacaagtttcagtaatagctgaacctgttcaaaatgttaataaaggtttcgttgcatggta

SEQ ID NO: 22744 - DNA, 1014 bp, Homo sapiens
  misc_feature 1..1014: note = ENST00000395837
  source 1..1014: mol_type = unassigned DNA; mol_type = unassigned DNA
gggccttgttgacctgaggggggcgagggcggttggcgcgcgcgcgcgttgacggaaactaacggacgcctaaccgatcggcgattctgtcgagtttacttcgcggggaaggcggaaaagaggtagtttgtgtggtttctggaagcctttactttggaatcccagtgtgagaaaggtcaaaatgcagatcttcgtgaaaacccttaccggcaagaccatcacccttgaggtggagcccagtgacaccatcgaaaatgtgaaggccaagatccaggataaggaaggcattccccccgaccagcagaggctcatctttgcaggcaagcagctggaagatggccgtactctttctgactacaacatccagaaggagtcgaccctgcacctggtcctgcgtctgagaggtggtatgcagatcttcgtgaagaccctgaccggcaagaccatcaccctggaagtggagcccagtgacaccatcgaaaatgtgaaggccaagatccaggataaagaaggcatccctcccgaccagcagaggctcatctttgcaggcaagcagctggaagatggccgcactctttctgactacaacatccagaaggagtcgaccctgcacctggtcctgcgtctgagaggtggtatgcagatcttcgtgaagaccctgaccggcaagaccatcactctggaggtggagcccagtgacaccatcgaaaatgtgaaggccaagatccaagataaagaaggcatcccccccgaccagcagaggctcatctttgcaggcaagcagctggaagatggccgcactctttctgactacaacatccagaaagagtcgaccctgcacctggtcctgcgcctgaggggtggctgttaattcttcagtcatggcattcgcagtgcccagtgatggcattactctgcactatagccatttgccccaacttaagtttagaaattacaagtttcagtaatagctgaacctgttcaaaatgttaataaaggtttcgttgcatggta

SEQ ID NO: 22745 - DNA, 500 bp, Homo sapiens
  misc_feature 1..500: note = ENST00000578706
  source 1..500: mol_type = unassigned DNA; mol_type = unassigned DNA
agtttgtgtggtttctggaagcctttactttggaatcccagtgtgagaaaggtgccccttcttgtgtttcaatgggatttttatttcgcgagtcttgtgggtttggttttgttttcagtttgcctaacaccgtgcttaggtttgaggcagattggagttcggtcgggggagtttgaatatccggaacagttagtggggaaagctgtggacgcttggtcaaaatgcagatcttcgtgaaaacccttaccggcaagaccatcacccttgaggtggagcccagtgacaccatcgaaaatgtgaaggccaagatccaggataaggaaggcattccccccgaccagcagaggctcatctttgcaggcaagcagctggaagatggccgtactctttctgactacaacatccagaaggagtcgaccctgcacctggtcctgcgtctgagaggtggtatgcagatcttcgtgaagaccctgaccggcaagaccatcaccctggaagtg

SEQ ID NO: 22746 - DNA, 1056 bp, Homo sapiens
  misc_feature 1..1056: note = ENST00000614404
  source 1..1056: mol_type = unassigned DNA; mol_type = unassigned DNA
agtttgtgtggtttctggaagcctttactttggaatcccagtgtgagaaaggtgccccttcttgtgtttcaatgggatttttatttcgcgagtcttgtgggtttggttttgttttcagtttgcctaacaccgtgcttaggtttgaggcagattggagttcggtcgggggagtttgaatatccggaacagttagtggggaaagctgtggacgcttggtcaaaatgcagatcttcgtgaaaacccttaccggcaagaccatcacccttgaggtggagcccagtgacaccatcgaaaatgtgaaggccaagatccaggataaggaaggcattccccccgaccagcagaggctcatctttgcaggcaagcagctggaagatggccgtactctttctgactacaacatccagaaggagtcgaccctgcacctggtcctgcgtctgagaggtggtatgcagatcttcgtgaagaccctgaccggcaagaccatcaccctggaagtggagcccagtgacaccatcgaaaatgtgaaggccaagatccaggataaagaaggcatccctcccgaccagcagaggctcatctttgcaggcaagcagctggaagatggccgcactctttctgactacaacatccagaaggagtcgaccctgcacctggtcctgcgtctgagaggtggtatgcagatcttcgtgaagaccctgaccggcaagaccatcactctggaggtggagcccagtgacaccatcgaaaatgtgaaggccaagatccaagataaagaaggcatcccccccgaccagcagaggctcatctttgcaggcaagcagctggaagatggccgcactctttctgactacaacatccagaaagagtcgaccctgcacctggtcctgcgcctgaggggtggctgttaattcttcagtcatggcattcgcagtgcccagtgatggcattactctgcactatagccatttgccccaacttaagtttagaaattacaagtttcagtaatagctgaacctgttcaaaatgttaataaaggtttcgttgcatggtagc

SEQ ID NO: 22747 - DNA, 3745 bp, Homo sapiens
  misc_feature 1..3745: note = ENST00000536769
  source 1..3745: mol_type = unassigned DNA; mol_type = unassigned DNA
gttccccagctttagggccacgcccgccctgagatctgccgagtcattgtccttgtcccgcggccccgggagccccccgcgaccggcctgggaggctcagggaggttgaagggggctgagcaaaggaagccccgtcattacctcaaatgtgacccaaaaataaagacccgtccatctcgcagggtgggccagggcgggtcaggagggaggggagggagaccccgactctgcagaaggcgctcgctgcgtgccccacgtccgccgaacgcggggttcgcgacccgaggggaccgcgggggctgaggggaggggccgcggagccgcggctaaggaacgcgggccgcccacccgctcccggtgcagcggcctccgcgccgggttttggcgcctcccgcgggcgcccccctcctcacggcgagcgctgccacgtcagacgaagggcgcagcgagcgtcctgatccttccgcccggacgctcaggacagcggcccgctgctcataagactcggccttagaaccccagtatcagcagaaggacattttaggacgggacttgggtgactctagggcactggttttctttccagagagcggaacaggcgaggaaaagtagtcccttctcggcgattctgcggagggatctccgtggggcggtgaacgccgatgattatataaggacgcgccgggtgtggcacagctagttccgtcgcagccgggatttgggtcgcagttcttgtttgtggatcgctgtgatcgtcacttggtgagtagcgggctgctgggctggccggggctttcgtggccgccgggccgctcggtgggacggaggcgtgtggagagaccgccaagggctgtagtctgggtccgcgagcaaggttgccctgaactgggggttggggggagcgcagcaaaatggcggctgttcccgagtcttgaatggaagacgcttgtgaggcgggctgtgaggtcgttgaaacaaggtggggggcatggtgggcggcaagaacccaaggtcttgaggccttcgctaatgcgggaaagctcttattcgggtgagatgggctggggcaccatctggggaccctgacgtgaagtttgtcactgactggagaactcggtttgtcgtctgttgcgggggcggcagttatggcggtgccgttgggcagtgcacccgtacctttgggagcgcgcgccctcgtcgtgtcgtgacgtcacccgttctgttggcttataatgcagggtggggccacctgccggtaggtgtgcggtaggcttttctccgtcgcaggacgcagggttcgggcctagggtaggctctcctgaatcgacaggcgccggacctctggtgaggggagggataagtgaggcgtcagtttctctggtcggttttatgtacctatcttcttaagtagctgaagctccggttttgaactatgcgctcggggttggcgagtgtgttttgtgaagttttttaggcaccttttgaaatgtaatcatttgggtcaatatgtaattttcagtgttagactagtaaattgtccgctaaattctggccgtttttggcttttttgttagacaatgcagatcttcgtgaagactctgactggtaagaccatcaccctcgaggttgagcccagtgacaccatcgagaatgtcaaggcaaagatccaagataaggaaggcatccctcctgaccagcagaggctgatctttgctggaaaacagctggaagatgggcgcaccctgtctgactacaacatccagaaagagtccaccctgcacctggtgctccgtctcagaggtgggatgcaaatcttcgtgaagacactcactggcaagaccatcacccttgaggtcgagcccagtgacaccatcgagaacgtcaaagcaaagatccaggacaaggaaggcattcctcctgaccagcagaggttgatctttgccggaaagcagctggaagatgggcgcaccctgtctgactacaacatccagaaagagtctaccctgcacctggtgctccgtctcagaggtgggatgcagatcttcgtgaagaccctgactggtaagaccatcaccctcgaggtggagcccagtgacaccatcgagaatgtcaaggcaaagatccaagataaggaaggcattcctcctgatcagcagaggttgatctttgccggaaaacagctggaagatggtcgtaccctgtctgactacaacatccagaaagagtccaccttgcacctggtactccgtctcagaggtgggatgcaaatcttcgtgaagacactcactggcaagaccatcacccttgaggtcgagcccagtgacactatcgagaacgtcaaagcaaagatccaagacaaggaaggcattcctcctgaccagcagaggttgatctttgccggaaagcagctggaagatgggcgcaccctgtctgactacaacatccagaaagagtctaccctgcacctggtgctccgtctcagaggtgggatgcagatcttcgtgaagaccctgactggtaagaccatcactctcgaagtggagccgagtgacaccattgagaatgtcaaggcaaagatccaagacaaggaaggcatccctcctgaccagcagaggttgatctttgccggaaaacagctggaagatggtcgtaccctgtctgactacaacatccagaaagagtccaccttgcacctggtgctccgtctcagaggtgggatgcagatcttcgtgaagaccctgactggtaagaccatcactctcgaggtggagccgagtgacaccattgagaatgtcaaggcaaagatccaagacaaggaaggcatccctcctgaccagcagaggttgatctttgctgggaaacagctggaagatggacgcaccctgtctgactacaacatccagaaagagtccaccctgcacctggtgctccgtcttagaggtgggatgcagatcttcgtgaagaccctgactggtaagaccatcactctcgaagtggagccgagtgacaccattgagaatgtcaaggcaaagatccaagacaaggaaggcatccctcctgaccagcagaggttgatctttgctgggaaacagctggaagatggacgcaccctgtctgactacaacatccagaaagagtccaccctgcacctggtgctccgtcttagaggtgggatgcagatcttcgtgaagaccctgactggtaagaccatcactctcgaagtggagccgagtgacaccattgagaatgtcaaggcaaagatccaagacaaggaaggcatccctcctgaccagcagaggttgatctttgctgggaaacagctggaagatggacgcaccctgtctgactacaacatccagaaagagtccaccctgcacctggtgctccgtctcagaggtgggatgcaaatcttcgtgaagaccctgactggtaagaccatcaccctcgaggtggagcccagtgacaccatcgagaatgtcaaggcaaagatccaagataaggaaggcatccctcctgatcagcagaggttgatctttgctgggaaacagctggaagatggacgcaccctgtctgactacaacatccagaaagagtccactctgcacttggtcctgcgcttgagggggggtgtctaagtttccccttttaaggtttcaacaaatttcattgcactttcctttcaataaagttgttgcattcccaattggtgttttttttttttttttttttaagtttattttgcatt

SEQ ID NO: 22748 - DNA, 1303 bp, Homo sapiens
  misc_feature 1..1303: note = ENST00000538617
  source 1..1303: mol_type = unassigned DNA; mol_type = unassigned DNA
attgtccttgtcccgcggccccgggagccccccgcgaccggcctgggaggctcagggaggttgaagggggctgagcaaaggaagccccgtcattacctcaaatgtgacccaaaaataaagacccgtccatctcgcaggagagcggaacaggcgaggaaaagtagtcccttctcggcgattctgcggagggatctccgtggggcggtgaacgccgatgattatataaggacgcgccgggtgtggcacagctagttccgtcgcagccgggatttgggtcgcagttcttgtttgtggatcgctgtgatcgtcacttgacaatgcagatcttcgtgaagactctgactggtaagaccatcaccctcgaggttgagcccagtgacaccatcgagaatgtcaaggcaaagatccaagataaggaaggcatccctcctgaccagcagaggctgatctttgctggaaaacagctggaagatgggcgcaccctgtctgactacaacatccagaaagagtccaccctgcacctggtgctccgtctcagaggtgggatgcaaatcttcgtgaagacactcactggcaagaccatcacccttgaggtcgagcccagtgacaccatcgagaacgtcaaagcaaagatccaggacaaggaaggcattcctcctgaccagcagaggttgatctttgccggaaagcagctggaagatgggcgcaccctgtctgactacaacatccagaaagagtctaccctgcacctggtgctccgtctcagaggtgggatgcagatcttcgtgaagaccctgactggtaagaccatcactctcgaagtggagccgagtgacaccattgagaatgtcaaggcaaagatccaagacaaggaaggcatccctcctgaccagcagaggttgatctttgctgggaaacagctggaagatggacgcaccctgtctgactacaacatccagaaagagtccaccctgcacctggtgctccgtctcagaggtgggatgcaaatcttcgtgaagaccctgactggtaagaccatcaccctcgaggtggagcccagtgacaccatcgagaatgtcaaggcaaagatccaagataaggaaggcatccctcctgatcagcagaggttgatctttgctgggaaacagctggaagatggacgcaccctgtctgactacaacatccagaaagagtccactctgcacttggtcctgcgcttgagggggggtgtctaagtttccccttttaaggtttcaacaaatttcattgcactttcctttcaataaagttgttgcattcccaa

SEQ ID NO: 22749 - DNA, 2688 bp, Homo sapiens
  misc_feature 1..2688: note = ENST00000339647
  source 1..2688: mol_type = unassigned DNA; mol_type = unassigned DNA
ggagggaggggagggagaccccgactctgcagaaggcgctcgctgcgtgccccacgtccgccgaacgcggggttcgcgacccgaggggaccgcgggggctgaggggaggggccgcggagccgcggctaaggaacgcgggccgcccacccgctcccggtgcagcggcctccgcgccgggttttggcgcctcccgcgggcgcccccctcctcacggcgagcgctgccacgtcagacgaagggcgcagcgagcgtcctgatccttccgcccggacgctcaggacagcggcccgctgctcataagactcggccttagaaccccagtatcagcagaaggacattttaggacgggacttgggtgactctagggcactggttttctttccagagagcggaacaggcgaggaaaagtagtcccttctcggcgattctgcggagggatctccgtggggcggtgaacgccgatgattatataaggacgcgccgggtgtggcacagctagttccgtcgcagccgggatttgggtcgcagttcttgtttgtggatcgctgtgatcgtcacttgacaatgcagatcttcgtgaagactctgactggtaagaccatcaccctcgaggttgagcccagtgacaccatcgagaatgtcaaggcaaagatccaagataaggaaggcatccctcctgaccagcagaggctgatctttgctggaaaacagctggaagatgggcgcaccctgtctgactacaacatccagaaagagtccaccctgcacctggtgctccgtctcagaggtgggatgcaaatcttcgtgaagacactcactggcaagaccatcacccttgaggtcgagcccagtgacaccatcgagaacgtcaaagcaaagatccaggacaaggaaggcattcctcctgaccagcagaggttgatctttgccggaaagcagctggaagatgggcgcaccctgtctgactacaacatccagaaagagtctaccctgcacctggtgctccgtctcagaggtgggatgcagatcttcgtgaagaccctgactggtaagaccatcaccctcgaggtggagcccagtgacaccatcgagaatgtcaaggcaaagatccaagataaggaaggcattcctcctgatcagcagaggttgatctttgccggaaaacagctggaagatggtcgtaccctgtctgactacaacatccagaaagagtccaccttgcacctggtactccgtctcagaggtgggatgcaaatcttcgtgaagacactcactggcaagaccatcacccttgaggtcgagcccagtgacactatcgagaacgtcaaagcaaagatccaagacaaggaaggcattcctcctgaccagcagaggttgatctttgccggaaagcagctggaagatgggcgcaccctgtctgactacaacatccagaaagagtctaccctgcacctggtgctccgtctcagaggtgggatgcagatcttcgtgaagaccctgactggtaagaccatcactctcgaagtggagccgagtgacaccattgagaatgtcaaggcaaagatccaagacaaggaaggcatccctcctgaccagcagaggttgatctttgccggaaaacagctggaagatggtcgtaccctgtctgactacaacatccagaaagagtccaccttgcacctggtgctccgtctcagaggtgggatgcagatcttcgtgaagaccctgactggtaagaccatcactctcgaggtggagccgagtgacaccattgagaatgtcaaggcaaagatccaagacaaggaaggcatccctcctgaccagcagaggttgatctttgctgggaaacagctggaagatggacgcaccctgtctgactacaacatccagaaagagtccaccctgcacctggtgctccgtcttagaggtgggatgcagatcttcgtgaagaccctgactggtaagaccatcactctcgaagtggagccgagtgacaccattgagaatgtcaaggcaaagatccaagacaaggaaggcatccctcctgaccagcagaggttgatctttgctgggaaacagctggaagatggacgcaccctgtctgactacaacatccagaaagagtccaccctgcacctggtgctccgtcttagaggtgggatgcagatcttcgtgaagaccctgactggtaagaccatcactctcgaagtggagccgagtgacaccattgagaatgtcaaggcaaagatccaagacaaggaaggcatccctcctgaccagcagaggttgatctttgctgggaaacagctggaagatggacgcaccctgtctgactacaacatccagaaagagtccaccctgcacctggtgctccgtctcagaggtgggatgcaaatcttcgtgaagaccctgactggtaagaccatcaccctcgaggtggagcccagtgacaccatcgagaatgtcaaggcaaagatccaagataaggaaggcatccctcctgatcagcagaggttgatctttgctgggaaacagctggaagatggacgcaccctgtctgactacaacatccagaaagagtccactctgcacttggtcctgcgcttgagggggggtgtctaagtttccccttttaaggtttcaacaaatttcattgcactttcctttcaataaagttgttgcattccc

SEQ ID NO: 22750 - DNA, 582 bp, Homo sapiens
  misc_feature 1..582: note = ENST00000541272
  source 1..582: mol_type = unassigned DNA; mol_type = unassigned DNA
ttctccgtcgcaggacgcagggttcgggcctagggtaggctctcctgaatcgacaggcgccggacctctgacaatgcagatcttcgtgaagactctgactggtaagaccatcaccctcgaggttgagcccagtgacaccatcgagaatgtcaaggcaaagatccaagataaggaaggcatccctcctgaccagcagaggctgatctttgctggaaaacagctggaagatgggcgcaccctgtctgactacaacatccagaaagagtccaccctgcacctggtgctccgtctcagaggtgggatgcaaatcttcgtgaagacactcactggcaagaccatcacccttgaggtggagcccagtgacaccatcgagaatgtcaaggcaaagatccaagataaggaaggcattcctcctgatcagcagaggttgatctttgccggaaaacagctggaagatggtcgtaccctgtctgactacaacatccagaaagagtccaccttgcacctggtactccgtctcagaggtgggatgcaaatcttcgtgaagacactcactggcaagaccatcacccttgaggtcga

SEQ ID NO: 22751 - DNA, 622 bp, Homo sapiens
  misc_feature 1..622: note = ENST00000540351
  source 1..622: mol_type = unassigned DNA; mol_type = unassigned DNA
acgtcacccgttctgttggcttataatgcagggtggggccacctgccggtaggtgtgcggtaggcttttctccgtcgcaggacgcagggttcgggcctagggtaggctctcctgaatcgacaggcgccggacctctgacaatgcagatcttcgtgaagactctgactggtaagaccatcaccctcgaggttgagcccagtgacaccatcgagaatgtcaaggcaaagatccaagataaggaaggcatccctcctgaccagcagaggctgatctttgctggaaaacagctggaagatgggcgcaccctgtctgactacaacatccagaaagagtccaccctgcacctggtgctccgtctcagaggtgggatgcaaatcttcgtgaagacactcactggcaagaccatcacccttgaggtcgagcccagtgacaccatcgagaacgtcaaagcaaagatccaggacaaggaaggcattcctcctgaccagcagaggttgatctttgccggaaagcagctggaagatgggcgcaccctgtctgactacaacatccagaaagagtctaccctgcacctggtgctccgtctcagaggtgggatgcagatcttcgtgaagaccctgac

SEQ ID NO: 22752 - DNA, 548 bp, Homo sapiens
  misc_feature 1..548: note = ENST00000541645
  source 1..548: mol_type = unassigned DNA; mol_type = unassigned DNA
ataatgcagggtggggccacctgccggtaggtgtgcggtaggcttttctccgtcgcaggacgcagggttcgggcctaggacaatgcagatcttcgtgaagactctgactggtaagaccatcaccctcgaggttgagcccagtgacaccatcgagaatgtcaaggcaaagatccaagataaggaaggcatccctcctgaccagcagaggctgatctttgctggaaaacagctggaagatgggcgcaccctgtctgactacaacatccagaaagagtccaccctgcacctggtgctccgtctcagaggtgggatgcaaatcttcgtgaagacactcactggcaagaccatcacccttgaggtcgagcccagtgacaccatcgagaacgtcaaagcaaagatccaggacaaggaaggcattcctcctgaccagcagaggttgatctttgccggaaagcagctggaagatgggcgcaccctgtctgactacaacatccagaaagagtctaccctgcacctggtgctccgtctcagaggtgggatgcagatct

SEQ ID NO: 22753 - DNA, 563 bp, Homo sapiens
  misc_feature 1..563: note = ENST00000535131
  source 1..563: mol_type = unassigned DNA; mol_type = unassigned DNA
ggcttttctccgtcgcaggacgcagggttcgggcctagggtaggctctcctgaatcgacaggcgccggacctctggtgaggggagggataagtgaggcgtcagtttctctgacaatgcagatcttcgtgaagactctgactggtaagaccatcaccctcgaggttgagcccagtgacaccatcgagaatgtcaaggcaaagatccaagataaggaaggcatccctcctgaccagcagaggctgatctttgctggaaaacagctggaagatgggcgcaccctgtctgactacaacatccagaaagagtccaccctgcacctggtgctccgtctcagaggtgggatgcaaatcttcgtgaagacactcactggcaagaccatcacccttgaggtcgagcccagtgacaccatcgagaacgtcaaagcaaagatccaggacaaggaaggcattcctcctgaccagcagaggttgatctttgccggaaagcagctggaagatgggcgcaccctgtctgactacaacatccagaaagagtctaccctgcacctggtgctccgtctcag

SEQ ID NO: 22754 - DNA, 477 bp, Homo sapiens
  misc_feature 1..477: note = ENST00000544481
  source 1..477: mol_type = unassigned DNA; mol_type = unassigned DNA
gcaggacgcagggttcgggcctagggtaggctctcctgaatcgacaggcgccggacctctgatcttcgtgaagactctgactggtaagaccatcaccctcgaggttgagcccagtgacaccatcgagaatgtcaaggcaaagatccaagataaggaaggcatccctcctgaccagcagaggctgatctttgctggaaaacagctggaagatgggcgcaccctgtctgactacaacatccagaaagagtccaccctgcacctggtgctccgtctcagaggtgggatgcaaatcttcgtgaagacactcactggcaagaccatcacccttgaggtcgagcccagtgacaccatcgagaacgtcaaagcaaagatccaggacaaggaaggcattcctcctgaccagcagaggttgatctttgccggaaagcagctggaagatgggcgcaccctgtctgactacaacatccagaaagagtc

SEQ ID NO: 22755 - DNA, 559 bp, Homo sapiens
  misc_feature 1..559: note = ENST00000546271
  source 1..559: mol_type = unassigned DNA; mol_type = unassigned DNA
agcaaaatggcggctgttcccgagtcttgaatggaagacgcttgtgaggcgggctgtgaggtcgttgaaacaaggtggggggcatggtgggcggcaagaacccaaggtcttgaggccttcgctaatgcgggaaagctcttattcggacaatgcagatcttcgtgaagactctgactggtaagaccatcaccctcgaggttgagcccagtgacaccatcgagaatgtcaaggcaaagatccaagataaggaaggcatccctcctgaccagcagaggctgatctttgctggaaaacagctggaagatgggcgcaccctgtctgactacaacatccagaaagagtccaccctgcacctggtgctccgtctcagaggtgggatgcaaatcttcgtgaagacactcactggcaagaccatcacccttgaggtcgagcccagtgacaccatcgagaacgtcaaagcaaagatccaggacaaggaaggcattcctcctgaccagcagaggttgatctttgccggaaagcagctggaagatgggcgcaccctgtctgactacaacat

SEQ ID NO: 22756 - DNA, 627 bp, Homo sapiens
  misc_feature 1..627: note = ENST00000540700
  source 1..627: mol_type = unassigned DNA; mol_type = unassigned DNA
acttggtgagtagcgggctgctgggctggccggggctttcgtggccgccgggccgctcggtgggacggaggcgtgtggagagaccgccaagggctgtagtctgggtccgcgagcaaggttgccctgaactgggggttggggggagcgcagcaaaatggcggctgttcccgagtcttgaatggaagacgcttgtgaggcgggctgtgaggtcgttgaaacaagacaatgcagatcttcgtgaagactctgactggtaagaccatcaccctcgaggttgagcccagtgacaccatcgagaatgtcaaggcaaagatccaagataaggaaggcatccctcctgaccagcagaggctgatctttgctggaaaacagctggaagatgggcgcaccctgtctgactacaacatccagaaagagtccaccctgcacctggtgctccgtctcagaggtgggatgcaaatcttcgtgaagacactcactggcaagaccatcacccttgaggtcgagcccagtgacaccatcgagaacgtcaaagcaaagatccaggacaaggaaggcattcctcctgaccagcagaggttgatctttgccggaaagcagctggaagatgggcgcaccctgtctgac

SEQ ID NO: 22757 - DNA, 582 bp, Homo sapiens
  misc_feature 1..582: note = ENST00000535859
  source 1..582: mol_type = unassigned DNA; mol_type = unassigned DNA
tattcgggtgagatgggctggggcaccatctggggaccctgacgtgaagtttgtcactgactggagaactcggtttgtcgtctgttgcgggggcggcagttatggcggtgccgttgggcagtgcacccgtacctttgggagcgcgcgccctcgtcgtgtcgtgacgtcacccgttctgttggcttataatgcagggtggggccacctgccgacaatgcagatcttcgtgaagactctgactggtaagaccatcaccctcgaggttgagcccagtgacaccatcgagaatgtcaaggcaaagatccaagataaggaaggcatccctcctgaccagcagaggctgatctttgctggaaaacagctggaagatgggcgcaccctgtctgactacaacatccagaaagagtccaccctgcacctggtgctccgtctcagaggtgggatgcaaatcttcgtgaagacactcactggcaagaccatcacccttgaggtcgagcccagtgacaccatcgagaacgtcaaagcaaagatccaggacaaggaaggcattcctcctgaccagcagaggttgatctttgccgg

SEQ ID NO: 22758 - DNA, 624 bp, Homo sapiens
  misc_feature 1..624: note = ENST00000536661
  source 1..624: mol_type = unassigned DNA; mol_type = unassigned DNA
gagccgcggctaaggaacgcgggccgcccacccgctcccggtgcagcggcctccgcgccgggttttggcgcctcccgcgggcgcccccctcctcacggcgagcgctgccacgtcagacgaagggcgcagcgagcgtcctgatccttccgcccggacgctcaggacagcggcccgctgctcataagactcggccttagaaccccagtatcagcagaaggacattttaggacgggacttgggtgactctagggcactggttttctttccagagagcggaacaggcgaggaaaagtagtcccttctcggcgattctgcggagggatctccgtggggcggtgaacgccgatgattatataaggacgcgccgggtgtggcacagctagttccgtcgcagccgggatttgggtcgcagttcttgtttgtggatcgctgtgatcgtcacttgatcttcgtgaagactctgactggtaagaccatcaccctcgaggttgagcccagtgacaccatcgagaatgtcaaggcaaagatccaagataaggaaggcatccctcctgaccagcagaggctgatctttgctggaaaacagctggaagatgggcgcaccctgtctgactacaacatcca

SEQ ID NO: 22759 - DNA, 517 bp, Homo sapiens
  misc_feature 1..517: note = ENST00000542416
  source 1..517: mol_type = unassigned DNA; mol_type = unassigned DNA
gttgctgggcctctgtcccttctccattggtgccagctctgaagcaatcttttctggggcgcctgcaaaggacggatctgtgggtggaacgaactgaaaacggatccagtgactcatcccgattcttgcacattctagcacatcgcattctagagagcggaacaggcgaggaaaagtagtcccttctcggcgattctgcggagggatctccgtggggcggtgaacgccgatgattatataaggacgcgccgggtgtggcacagctagttccgtcgcagccgggatttgggtcgcagttcttgtttgtggatcgctgtgatcgtcacttgacaatgcagatcttcgtgaagactctgactggtaagaccatcaccctcgaggttgagcccagtgacaccatcgagaatgtcaaggcaaagatccaagataaggaaggcatccctcctgaccagcagaggctgatctttgctggaaaacagctggaagatgggcgcaccctgtctgactacaacatcca

SEQ ID NO: 22760 - DNA, 718 bp, Homo sapiens
  misc_feature 1..718: note = ENST00000546120
  source 1..718: mol_type = unassigned DNA; mol_type = unassigned DNA
tgtgatcgtcacttgacaatgcagatcttcgtgaagactctgactggtaagaccatcaccctcgaggttgagcccagtgacaccatcgagaatgtcaaggcaaagatccaagataaggaaggcatccctcctgaccagcagaggctgatctttgctggaaaacagctggaagatgggcgcaccctgtctgactacaacatccagaaagagtccaccctgcacctggtgctccgtctcagaggtgggatgcaaatcttcgtgaagacactcactggcaagaccatcacccttgaggtcgagcccagtgacaccatcgagaacgtcaaagcaaagatccaggacaaggaaggcattcctcctgaccagcagaggttgatctttgctgggaaacagctggaagatggacgcaccctgtctgactacaacatccagaaagagtccaccctgcacctggtgctccgtctcagaggtgggatgcaaatcttcgtgaagaccctgactggtaagaccatcaccctcgaggtggagcccagtgacaccatcgagaatgtcaaggcaaagatccaagataaggaaggcatccctcctgatcagcagaggttgatctttgctgggaaacagctggaagatggacgcaccctgtctgactacaacatccagaaagagtccactctgcacttggtcctgcgcttgagggggggtgtctaagtttcccctt

SEQ ID NO: 22761 - DNA, 2515 bp, Homo sapiens
  misc_feature 1..2515: note = ENST00000265339
  source 1..2515: mol_type = unassigned DNA; mol_type = unassigned DNA
cgtccctctttctccaccccgccgagcctaaactagtgacggggagggagacgggatagtgtttctgtttcgtggtctttgaatccacaacctctagtctgaacacagagaacacaaatttgtctattacttcaggaagcccagggggaaccgcgccccgctgaagggctcggggaaggcgcgctcccgcgtcccgccccctcctcccccagcactcacactgtggtagcggcggagggcggagggatccggaggcggcggagggagacgtcattgcagggttgtttgtcagtctcggcggcggcggcggcggcggcggcggcggcgatccacagtgattcggccgccgcgccggggggtgggggggctgcgcgggactttttttttttcagactgaccgcggggcagctgcggagcatgtcgaccccggcccggaggaggctcatgcgggatttcaagcggttacaagaggacccacctgtgggtgtcagtggcgcaccatctgaaaacaacatcatgcagtggaatgcagttatatttggaccagaagggacaccttttgaagatggtacttttaaactagtaatagaattttctgaagaatatccaaataaaccaccaactgttaggtttttatccaaaatgtttcatccaaatgtgtatgctgatggtagcatatgtttagatatccttcagaatcgatggagtccaacatatgatgtatcttctatcttaacatcaattcagtctctgctggatgaaccgaatcctaacagtccagccaatagccaggcagcacagctttatcaggaaaacaaacgagaatatgagaaaagagtttcggccattgttgaacaaagctggaatgattcataatagacaactggtctgttaatctttttcatcattgttgtgtataatttacctctcattagaaaggctaacaaattttaagtgccacaggttttaaggattctgcagaaaaaaaagaaaaaagtccttcagtttagaacctacaaaagcttgtgtatcttgattaatgtactttttattgcatggtgtgaactaagttattgctgcataaatttgtaatatatcctgtttgtatttttttccaagtgtataatgttggtgtggagttttcatgacagaatatacacattttgtaaatctgtacttttttcaaatattgaatgccttatttttgaattctttagatttttaaattggagaaaagcacttaaagttttttatatatgaatattacatgtaaagctgttaaaatacataacttcagtgcaagagactttgtcacttatttccttatgtgtgtaggaggggttaataagtctctagctctccatctattgatagtttcatttacaatttcaaaagaacattcttatattttatcaaggaagtcttcaaatttgattctaaatagcgattataatctccaactttattttgaatgtacctctattagtttcaattgagtaattctagacataactggtttgactctgtccaactctgtatttaggccatttgttacagtttcttcatgcattacttactgttaaaactgtaccttttgcgatttcacagttggcacttctgccatgagcagagaactgatgcgacttgttttgctgcttggtagcactttaaaaaattttttgattaatgaagaaagtaaaaccataaacatttgccaaaaattcatgccccagtattagcaatgaattagttgcattggtttgagaaaggcacatattggagggaaatcttggtgtaacttaaatatttgaaaattacctttaatgcaatgcatatctgtttattctgggaaatgttttaatgccagggcctgctgagttgcttcttcttgtggagattttttttttaatctcctgagttgtataaaagttgtactgcatcttagtttactggataaatttaaaacacagtattgtagaaagctaatacaaaactatcctatgccttcaaatagtatagaaaatggaaaatatacaagtaaattctgttgaaccacctgtgtagtctctctagtagttaaaacagctattttagtaaccccaagagtttcttctcatatccataaaattggattacagtatggcaatatctacagcttctattcattatgcaacgtttaacattgattggataaatgcttataggctgggccaggtggctcccacctgtagtcccagcactttgggaggcaaaggcgggaggatcacttgaggccaggactttgagaccagccagggcaacataataagacttttctctactttaaattttttaaaaaattagttgggcatagtggcacttgcctgtagtctcagctacttaggaggctgaggtggcagaatagcttatgcctaggaggttgaggctgcagtgagctgtgattatgccattgcactccagcctgggtgacagagcaataccctgtctttaaaaataaaagctattacttggcaaa

SEQ ID NO: 22762 - DNA, 415 bp, Homo sapiens
  misc_feature 1..415: note = ENST00000510021
  source 1..415: mol_type = unassigned DNA; mol_type = unassigned DNA
agtctcggcggcggcggcggcggcggcggcggcggcgatccacagtgattcggccgccgcgccggggggtgggggggctgcgcgggactttttttttttcagactgaccgcggggcagctgcggagcatgtcgaccccggcccggaggaggctcatgcgggatttcaagcggttacaagaggacccacctgtgggtgtcagtggcgcaccatctgaaaacaacatcatgcagtggaatgcagttatatttggtgtatgctgatggtagcatatgtttagatatccttcagaatcgatggagtccaacatatgatgtatcttctatcttaacatcaattcagtctctgctggatgaaccgaatcctaacagtccagccaatagccaggcagcacagctttatcaggaaaacaaacg

SEQ ID NO: 22763 - DNA, 818 bp, Homo sapiens
  misc_feature 1..818: note = ENST00000511807
  source 1..818: mol_type = unassigned DNA; mol_type = unassigned DNA
ggcgatccacagtgattcggccgccgcgccggggggtgggggggctgcgcgggactttttttttttcagactgaccgcggggcagctgcggagcatgtcgaccccggcccggaggaggctcatgcgggatttcaagcggttacaagaggacccacctgtgggtgtcagtggcgcaccatctgaaaacaacatcatgcagtggaatgcagttatatttgggtgagttgaaaggtttaacaaataatagaaacagggtctccctatgttgcccaggctgggcttgaactgctgggctcaagggatcctcctgccttggcctcccaaagtgttaggattacaggcacaagccactgtacccagctgaaattataggtcttaaggcaattgagaactttatttcagaagcttaagttccttagcagcaggaaaccccatagtatttatcaaatcatttctaaaagtatttagacccaaaattatatgacatgttaatctctgaagtaatttgttgttttgtataacttttctgtaatatattccatatctgacccctgttggtataaagaacaactatgcaaatctgttttttcttttctttcctcctagtctctgctggatgaaccgaatcctaacagtccagccaatagccaggcagcacagctttatcaggaaaacaaacgagaatatgagaaaagagtttcggccattgttgaacaaagctggaatgattcataatagacaactggtctgttaatctttttcatcattgttgtgtataatttacctctcattagaaaggctaacaaattttaagtgcc

SEQ ID NO: 22764 - DNA, 500 bp, Homo sapiens
  misc_feature 1..500: note = ENST00000506787
  source 1..500: mol_type = unassigned DNA; mol_type = unassigned DNA
tcgaccccggcccggaggaggctcatgcgggatttcaagcggttacaagaggacccacctgtgggtgtcagtggcgcaccatctgaaaacaacatcatgcagtggaatgcagttatatttggaccagaagggacaccttttgaagatggtacttttaaactagtaatagaattttctgaagaatatccaaataaaccaccaactgttaggtttttatccaaaatgtttcatccaaatgtgtatgctgatggtagcatatgtttagatatccttcagaatcgatggagtccaacatatgatgtatcttctatcttaacatcaattcagtgtcttgctctgttgcccagactggagtgcaatggcacaatcttggctcaccgcaacctctgcctcccgggttcaatctctgctggatgaaccgaatcctaacagtccagccaatagccaggcagcacagctttatcaggaaaacaaacgagaatatgagaaaagagtttcgg

SEQ ID NO: 22765 - DNA, 644 bp, Homo sapiens
  misc_feature 1..644: note = ENST00000507277
  source 1..644: mol_type = unassigned DNA; mol_type = unassigned DNA
cccggcccggaggaggctcatgcgggatttcaagcggttacaagaggacccacctgtgggtgtcagtggcgcaccatctgaaaacaacatcatgcagtggaatgcagttatatttggaccagaagggacaccttttgaagatggtacttttaaactagtaatagaattttctgaagaatatccaaataaaccaccaactgttaggtttttatccaaaatgtttcatccaaatgatatccttcagaatcgatggagtccaacatatgatgtatcttctatcttaacatcaattcagtctctgctggatgaaccgaatcctaacagtccagccaatagccaggcagcacagctttatcaggaaaacaaacgagaatatgagaaaagagtttcggccattgttgaacaaagctggaatgattcataatagacaactggtctgttaatctttttcatcattgttgtgtataatttacctctcattagaaaggctaacaaattttaagtgccacaggttttaaggattctgcagaaaaaaaagaaaaaagtccttcagtttagaacctacaaaagcttgtgtatcttgattaatgtactttttattgcatggtgtgaactaagttattgctgcataaatttgtaatata

SEQ ID NO: 22766 - DNA, 235 bp, Homo sapiens
  misc_feature 1..235: note = ENST00000504431
  source 1..235: mol_type = unassigned DNA; mol_type = unassigned DNA
cggcccggaggaggctcatgcgggatttcaagcggttacaagaggacccacctgtgggtgtcagtggcgcaccatctgaaaacaacatcatgcagtggaatgcagttatatttgggtgagttgaaaggtttaacaaataataggtgtgtgctgaatctttaagaaaagtaaacatataacaactgtctaggaaaagaaactgaggtggaatgagagatcttaaggactaaaactg

SEQ ID NO: 22767 - DNA, 682 bp, Homo sapiens
  misc_feature 1..682: note = ENST00000499038
  source 1..682: mol_type = unassigned DNA; mol_type = unassigned DNA
gaaccctcccagatgttcaggacttttgataccttgtatgctgatggtagcatatgtttagatatccttcagaatcgatggagtccaacatatgatgtatcttctatcttaacatcaattcagtctctgctggatgaaccgaatcctaacagtccagccaatagccaggcagcacagctttatcaggaaaacaaacgagaatatgagaaaagagtttcggccattgttgaacaaagctggaatgattcataatagacaactggtctgttaatctttttcatcattgttgtgtataatttacctctcattagaaaggctaacaaattttaagtgccacaggttttaaggattctgcagaaaaaaaagaaaaaagtccttcagtttagaacctacaaaagcttgtgtatcttgattaatgtactttttattgcatggtgtgaactaagttattgctgcataaatttgtaatatatcctgtttgtatttttttccaagtgtataatgttggtgtggagttttcatgacagaatatacacattttgtaaatctgtacttttttcaaatattgaatgccttatttttgaattctttagatttttaaattggagaaaagcacttaaagttttttatatatgaatattacatgtaaagctgttaaaatacataacttcagtgcaagaga

SEQ ID NO: 22768 - DNA, 657 bp, Homo sapiens
  misc_feature 1..657: note = ENST00000503080
  source 1..657: mol_type = unassigned DNA; mol_type = unassigned DNA
acattcaaaccatagcaggtgcaaaataagagaccttagttttaagacaggttatcctgtgatacagaagaatttagttattacctaatatttaaaacttctaagccaagcattctgtttggtaaagatttctcttaactgttagatatggcagagtgtgtaactaattttagtattgtctttgcagtgtatgctgatggtagcatatgtttagatatccttcagaatcgatggagtccaacatatgatgtatcttctatcttaacatcaattcagtctctgctggatgaaccgaatcctaacagtccagccaatagccaggcagcacagctttatcaggaaaacaaacgagaatatgagaaaagagtttcggccattgttgaacaaagctggaatgattcataatagacaactggtctgttaatctttttcatcattgttgtgtataatttacctctcattagaaaggctaacaaattttaagtgccacaggttttaaggattctgcagaaaaaaaagaaaaaagtccttcagtttagaacctacaaaagcttgtgtatcttgattaatgtactttttattgcatggtgtgaactaagttattgctgcataaatttgtaatatatcctgtttgtatttttttccaagtgtataatg

SEQ ID NO: 22769 - DNA, 4317 bp, Homo sapiens
  misc_feature 1..4317: note = ENST00000399816
  source 1..4317: mol_type = unassigned DNA; mol_type = unassigned DNA
gcagcagcagcagcaccccgggggcgcgggcgacgccagcccgggacccggcaagggaaagggcaagcgcgcggcggagctggccccgcgcgacaaggcgccggcggctgcggcggcggcggcggcggctgcggcgggggccgggggcccccgcgagagggcagcgggcgccagggcggggccgggcccggcggtggcggcggcggcgggcggcagcctggtccccgcggcgcgccagcaacactgcacgcaggtgcgcagccggcggctcatgaaggagctgcaggacatcgcgcgccttagcgaccgcttcatctccgtggagctggtggacgagagcctgttcgactggaacgtgaagctgcaccaggtggacaaggactcggtgctgtggcaggacatgaaggagaccaacaccgagttcatcctgctcaacctcaccttccccgacaacttccccttctcgccgcccttcatgcgggtgctcagcccgcgcctggagaacggctacgtgctggacggcggcgccatctgcatggagctgctcacgccgcgcggctggtccagcgcctacaccgtggaggccgtcatgcgccagttcgcagccagcctggtcaagggccagggacggatctgtagaaaagctggcaaatcaaaaaagtccttcagtcgcaaggaagctgaagctacctttaagagtttggtgaagacgcatgaaaaatatggttgggtcaccccgcccgtgtccgacggctgatgtctgccacgtgcagtagacgctcgagcgcctgtccacacacacaccagtaccctgacatctcctcaatgctgtgcatcctccacccgtttttactccagccagaactgcatcctgaatgcccaggagacgtttaagttatttatgaaaagatgtgtgtacagagaggaagagggagcaaatgccgttcggattatgtttcgattataaatgaatgatcacctcgaagtcactttagaacacatgttgagatggtgacatttcccagcctgcctgcccctctgcccaccccggtcacattgccctgagcttctttccatgacagcagctccgacgagccggcaggaaactcaatgcccctgctggctccatttccatgtaaatggcgccgttcatatttcacagggacgccgtgcatctccgccgtgcgtccccggcacgtgtttgctgtgctctgtatctctgtttttcttcctggaaggtcaacataacttgaaaatgtgtctttctgtggcccatggtccgctgtgatgacatttagacctcatttgtgctatgacctttggctcatgaaaacacaaatttaacattgccaggttctagtgatttaaaaccacaactgcccacttggtgaaaacgtgctctcgatgctgatttgtggtgtgctgctgtccacagataaaccagtgccattagatggaaggcagaggatactgcgaccacccctggcagacggtggcgtagacaccaggtgcgccctctggggctcagagcaacggatggtcagctgcgaacagtctcgtccgatgttaggaaatggtcctacggccgcgcctttgtgttcctgtcttctctccaccaccaaaagcaaaagatgatttcccattcactgcagtcatctgactcattttaatatctgtgctagtgacaatgaatgtcagaactgccaaaggataccaagtgatcatacgatgatttgcatgatcgggtctatttcacccaatagtcacttgtgtgtcccccgaaattgggatgggtgagcacccttgctgtggtgtaaacttcctgttatttaatctcccccacggtttcatttttctcttctgttaatacttagaactttctaagaaactccatgaaatgaggaaatactgtttctaataatatgaggaaagaagtaaaaatgttcattccaagtggcaagtcttattggacacattttaaataaaatcatgcatacctgatacactgcctcaaggatccagtcattgtgggctatccttccatttaaaatatttcagatattcttaaattttttaaatattgcaaatactacaacatgtaattccagagcagcgttctaagtcaggtaccagaaatgagtcttaggaacccatagtctttgcaaaaattcagtagattgaaatagtccccagaagcagccaaggagctgaagggatgattcgatcaagttcagatgttgccaattgtatcttactgctgtgaaggaggaaaagtcttccgggataatgtattcaattcttcaggcagttttgtctacttggggacctgcccattggttcaaggttttcagagatccaagaggccttgcctcaaagaacaaggattggcgcctttcagcagggctgcccattcaccaaacttattgttacttttgtttttctttaccactttcttatttgcccccaagtgcacacaggcagctctgccagaccaaaatgacagtgtattaagaatgcagggcctgctcagcttccctgtgagtcataatagtcgtgaaacttgatgacagtgaacttacgatgttcattcatccaaccctctatggtggcattctccatcctggaaacctgacatttggctgacggtctttggaccctggagctagtggtcatcatggaattacactgtggagatgaaagacctaggacagaaacatcttgctagggaaagcacctgagtttattcctttctaaatattttcctcttctaatgaaaactaaaagcagctttactttagggggaaaaatatatccaaaggcaggtcatttcagtagtgtttattagctgattgaaaaacaggttcacggtgctctctgagaactgcaccaaggggtgcagccaagagactggtctgaccccgggttgggctgggtggcagccggcgacagagcagagagacactcagctcagtgtcgctccttccatacactcagagtttgatttttcttgcatggcatttccattaggtttgttagaaacttatagaagaaatcaattctttagtgaacgaaataccatttttcactcaattggtaagaatttttcattttaaaagcagtaggaagtgatgtaaaactctaccattgcttggactgttaggagtgcggactccctttctggtagactcccttcgtaggcaagcacggtggtgcccagccatggaggcacccttaggacactgagcacaggcctggctgcctgtgccttggccacagcctccttccaccccactgaagtggacacctgcctctggagcccagggtgagaaggagaggcctgaagcctggggccacgttcccacacaagccaaggaacctattcctctttggacagacagcgagggaataatcagacagtgggtgcaaatgttcatgtcccgatagctccacacacccatgtatctgtgggaactcaaaccaagccagagcccacagagccaaacaaacagaaaatcacaaacccatctgtcctcttctcaatgcagaactccttcccgtccaataattttcctgaaccaatcacccttgttattgggtatcttctccactgctgggtaaggcctgcacatggtctgtctgtaactttctagaagactgagaactgcttatgccttagggagttctatgtgagcagcaaggttattccccctagttacacacacacgcacatgtgccaatactcctgcaaagacttgctgtttctaaaatccactactcagaaaaaccagggtgtcggcttaaagttttcagctccatctatcaaaatttgacctttttttaagagaaaaatatgtagatgagtgaaaaagacctaggattgaaagacaaaaagccatgtgtccatgtaaccctggccagtcactccacctgcctgagccttggtttcctcagctgtgagctcctaccaggtcagtgtgggaattggccaaaatgacgcagcagaagtgctttggagactaaagattgtcaacgaaatgtaagtgtcattttcgtagtattaggacgtttacattacagcaggctttaattagaacccacttagatatcgactcagaatgatcaattacagtggttaaaatacacatacctggtaatcatatacttgctttctgtccccagttcttacattaagtcaaccaactgacccaaaaatcaaccaataactaactggccatctctccactcactcagcattctcctcttaaatgcagggcatgcagaagattaaggtacagccccttccctggataggaactc

SEQ ID NO: 22770 - DNA, 6103 bp, Homo sapiens
  misc_feature 1..6103: note = ENST00000252108
  source 1..6103: mol_type = unassigned DNA; mol_type = unassigned DNA
taacttccggttgctgtgctgagtcggaagtgggaacccttcggccgctgagattctgtcgtgtcgtcgctgctggcacttcaggctctgcctctcccactaggtctggatggaggataccttaaagtgaaatgacagaccaggagaataacaacaacatctcaagtaacccctttgctgctctttttggctccctggctgatgccaaacagtttgcggcaatccaaaaagagcagctgaagcaacaatctgatgaactcccagctagcccagatgactcggataatagcgtgtcagagagcctggatgaattcgattactctgtggctgagattagccgctcattccgatcacagcaggaaatatgtgagcaactcaacatcaatcacatgatccaaaggatcttccttattactctggacaacagtgatcccagcttgaaaagcgggaatggcatccctagccgttgtgtgtatttggaagaaatggcagtagagctagaagatcaagactggcttgatatgagcaatgttgagcaggccctcttcgctcgcttattacttcaagatccaggcaaccacttaattaacatgacttcttctacaacgctaaatctctctgctgatcgagatgcaggagagaggcacattttttgttacctttactcctgcttccagagagccaaggaagagattaccaaagttccagagaacctgctaccctttgcagtgcagtgcagaaacctcactgtgtccaatacccgaacagttcttctcaccccagagatctatgttgaccaaaacatccatgagcaactggtagatttgatgttagaagccatccagggagcccattttgaagatgtaactgagtttctggaagaggtcattgaagccttgatattggatgaggaagttagaacatttccagaagtcatgattccagtgtttgatattttattgggccgaataaaagatctagagctctgtcagatccttttgtatgcatatctggatattcttctctatttcactaggcaaaaagatatggcaaaggtttttgtagaatacattcagcccaaggaccctaccaatgggcaaatgtaccagaagaccttgctgggagtaattctgagtatctcctgcttattaaagactccgggtgttgtagaaaatcatggctactttttgaatccatctcgttccagcccccaggagatcaaagtacaggaggccaacatccatcagttcatggctcagttccacgaaaagatctaccagatgctgaagaacttactccagctctctccagaaaccaaacactgtatcttgtcctggcttggaaactgtttgcatgcaaatgcaggccgcaccaagatttgggccaatcagatgccagaaatctttttccaaatgtatgcctcagatgctttctttctgaatctgggtgctgctctcctgaagctatgccagccattttgcaaacccagatcctctcggctcctcacctttaatcccacatactgtgccctcaaggagttgaatgatgaagaacgaaaaattaaaaatgtacacatgagaggtttggacaaagaaacctgtttgatcccagctgtgcaggagccgaagtttccacagaactacaaccttgtaacagagaaccttgctctgacagagtacaccttgtacttgggatttcacaggttgcatgatcagatggtaaaaatcaaccaaaatctgcatcggctgcaggttgcctggcgggatgctcagcaaagttctagccctgctgctgacaatcttcgtgagcagtttgaacgactgatgaccatctatctttctaccaagactgccatgacagagccacaaatgctacaaaactgcctaaacttgcaggtgtccatggctgttctactggttcaactggccataggcaatgagggctcacagccaatagagctaacctttcctttgccagatggctacagctctttggcttatgtgccagaattttttgcagataacctgggtgattttctcatttttctccgccgctttgccgatgacattttggagacatcagcagattccctggagcatgtccttcactttatcaccattttcactggaagcatagaaagaatgaagaatccccacctgagggccaaactagcagaggtgttggaagcagtgatgccccacctggatcagaccccaaatcccttggtatccagtgtgttccaccggaaacgtgtgttctgcaactttcagtatgcaccccaacttgcagaggctctaatcaaggtttttgtggacatcgaatttacaggagacccccatcaatttgaacagaagtttaattaccgccgtcccatgtatcctatcctaagatacatgtgggggacagatacctatcgggagagcattaaggatttggctgactatgcctctaagaatttagaagccatgaatcccccacttttcctccgctttcttaacctgctaatgaatgatgccatcttccttttggatgaagccatacagtatttgagcaagataaagattcagcaaattgagaaggatcgaggtgaatgggatagtctgactccagaagcccgccgagaaaaggaggctggcctacagatgtttggacagctggcacgtttccataacatcatgtccaatgaaacaatcggtacccttgcctttctcacatcagagatcaagtcactctttgtgcatcccttcctggctgagcgcatcatctccatgttgaactacttcctgcaacacctggttggccccaagatgggtgccttaaaagtcaaggacttcagcgaatttgacttcaaaccccagcagcttgtatcagatatctgcactatctacttaaatcttggggatgaggagaatttctgtgccactgtgcccaaggatggacgttcctattccccaactctctttgcacagacagttcgagtcttgaagaaaataaataagcctgggaatatgattatggctttcagcaacttggcagagagaatcaagtctcttgcagacctccaacaacaggaagaggaaacctatgcagatgcctgtgatgagttcctggatcccattatgagcacactgatgtgtgaccctgtggtgctgccatcttccagagtcactgtggatagatccaccattgcaagacatttgctcagtgaccaaacagatccctttaaccgtagtcccctcaccatggaccagatccggccaaacacagaactaaaagaaaaaatccaacggtggcttgcagagaggaaacaacaaaaggagcaacttgaatagatactgtgaactaaccaaaccaaaaccaaccccagagtgcagataaacaattgtttgtggtttctctctttctggttctgttccttttctttcttcttttctttttcttttttttttttttttttactaaattagagaactgctcttgctgaaattatgatagttaagattcctaagaacttgacaatgctcccctggcttgcaggaaattatacttattatagcatcaccaagtttagaaatcatcactaattttcaccctctgttgtctcttcatattcttcttccttttcctaaatgaaattatattatttcaactactaaaacttcccgccaccctgctatttctcttccaattactgttcaaacatttttggtgagtgctgcttttataaatatgtgatgtcacatatttcagtgacagctgatgttatcagaaaaatcctgttatcctgtgtatttactagtcctcatgatctagacttaaccccttttctgtgttacagagtaacttcacataaaagcagatacctttaagtttgtgtagacttctgaataagatgatagacgagaattttttttaaaaaaggaatttaaaggaatcttgtgcaacttctgttgatagctcttaattttgttatacagtctttttaatgaggattggtagggcaatcctaccaattgatgggggtgaggagactgttgggcccttattctcttatgaaaatctgtttctacaaggactaggcctaagtagatttaggcaacgggtatcatatccatgaaaaatgtcattttaagacactaatatcaacagtatatctcagtgtgtgagatatataaatacacatacaccccatgtgcttttttgttggtttagtgtaaactgagtaccactttatattttctcttccatagtgagatgtatgcagtatgtggccatgtttactaacatactcattcttcacaaaattctgagattataaaatgtatatagttaatatttgtttgagcttgtgacctgacttctaagagctacttctaacacagccttaggtcttcaattaacaaagtaggaagttgagcacaaccttgtccacagccattttaaatatccacttagccctgtgtagttggtaggtggacaccactttcataagtgaacttgagctcactactcaattgtgcagcttaatatgctgactagggacattcccctatggattatctttatatcactgtctttctaagcccagagatgtcataagtgacaagaaaagtgataggatcaagaaatgggtgtcactgcttcatttggaacatgttattaactatggtctctttcaaataaatagtagttttatatttcaacacaagttgctataagcagtccttgatgggtttttgattgcatcagctggaaagcctcaaatctaagagggcttcccatcctagatataaaataggtgttgcctattgctgtgcttataaaatgaaaaaggaaattgaggacacttttgcaaatgccagaatgtaagattcattcagtgtgctccctgggcctttatggcatgggttgacaggatttgtttattttctaaaattagcttcattcaatatttatcatcctcctttccctctctgagaatgaactatgtataaaataagcttctgcctatttgcatttatcttccaaacccaatctagtaggatgttctcattttaaaaacgaggggaaaagaccagagtttttcaggagaaaactggaggaaaatgggcacaaaaactcagaaggcagctattcccagcagcttcctagttaacaacccccatgctgcctccagtctttgtctgtattcttctgtatttaaccttcagattgtaagccttttctggcaagcttttcttctttttttaaactcttttcctgaaactttttatgaatggctatggcaccattaatgctgctgaatatctttaaactctgcacaagcaagtgtgtagcttaaggccactactggtaaggaaaccaagtgtcctctgtgccttttttctttctgtgaagtaatttaagaatatccaaaaaaattagactttaaaaagttatcttggtacaacaccgtgtgtatatacacttggaagcttaaaaaggtgttttgtctggaacttagaagcagctctaaatctagtagagcagactttctaacatacctagttttgtgtattggctttgctggagtatgatagcaaaatgaagactcttttactcagctctggtattgctcataacttaccaagaggctaatactaaacttggaaaattgtttaagtatgttttatcaagcagtctgggttttgttttttaatatactttttaatggatatgtgaaaactgaaggaaatgttaaaggttttttaatggtgcaagtgaaggtgccagttgctatttgatatcacactctacaaaagcttcattactttatttgatggtggttgctaagcagccattgcacagagcataagtctactgggtgcctttacatgccagaggctgatgctgcactgttgatgtcatgtgaggaaataatgcacatgctctaactgctcaacaggaaatgaacctagaaacagaaaatgaaaaggttgattgaaataaaacttgatcaacgcgactgtattttgaaacattccaggaaggttacttcttgtcaaacttgcctggcagtgtttgttcaaaacttgtatttaataaatgaacatctgacttacaa

SEQ ID NO: 22771 - DNA, 6061 bp, Homo sapiens
  misc_feature 1..6061: note = ENST00000431736
  source 1..6061: mol_type = unassigned DNA; mol_type = unassigned DNA
cgtgtcgtcgctgctggcacttcaggctctgcctctcccactaggtctggatggaggataccttaaagtgaaatgacagaccaggagaataacaacaacatctcaagtaacccctttgctgctctttttggctccctggctgatgccaaacagtttgcggcaatccaaaaagagcagctgaagcaacaatctgatgaactcccagctagcccagatgactcggataatagcgtgtcagagagcctggatgaattcgattactctgtggctgagattagccgctcattccgatcacagcaggaaatatgtgagcaactcaacatcaatcacatgatccaaaggatcttccttattactctggacaacagtgatcccagcttgaaaagcgggaatggcatccctagccgttgtgtgtatttggaagaaatggcagtagagctagaagatcaagactggcttgatatgagcaatgttgagcaggccctcttcgctcgcttattacttcaagatccaggcaaccacttaattaacatgacttcttctacaacgctaaatctctctgctgatcgagatgcaggagagaggcacattttttgttacctttactcctgcttccagagagccaaggaagagattaccaaagttccagagaacctgctaccctttgcagtgcagtgcagaaacctcactgtgtccaatacccgaacagttcttctcaccccagagatctatgttgaccaaaacatccatgagcaactggtagatttgatgttagaagccatccagggagcccgtgagtacatgaacaagatctattttgaagatgtaactgagtttctggaagaggtcattgaagccttgatattggatgaggaagttagaacatttccagaagtcatgattccagtgtttgatattttattgggccgaataaaagatctagagctctgtcagatccttttgtatgcatatctggatattcttctctatttcactaggcaaaaagatatggcaaaggtttttgtagaatacattcagcccaaggaccctaccaatgggcaaatgtaccagaagaccttgctgggagtaattctgagtatctcctgcttattaaagactccgggtgttgtagaaaatcatggctactttttgaatccatctcgttccagcccccaggagatcaaagtacaggaggccaacatccatcagttcatggctcagttccacgaaaagatctaccagatgctgaagaacttactccagctctctccagaaaccaaacactgtatcttgtcctggcttggaaactgtttgcatgcaaatgcaggccgcaccaagatttgggccaatcagatgccagaaatctttttccaaatgtatgcctcagatgctttctttctgaatctgggtgctgctctcctgaagctatgccagccattttgcaaacccagatcctctcggctcctcacctttaatcccacatactgtgccctcaaggagttgaatgatgaagaacgaaaaattaaaaatgtacacatgagaggtttggacaaagaaacctgtttgatcccagctgtgcaggagccgaagtttccacagaactacaaccttgtaacagagaaccttgctctgacagagtacaccttgtacttgggatttcacaggttgcatgatcagatggtaaaaatcaaccaaaatctgcatcggctgcaggttgcctggcgggatgctcagcaaagttctagccctgctgctgacaatcttcgtgagcagtttgaacgactgatgaccatctatctttctaccaagactgccatgacagagccacaaatgctacaaaactgcctaaacttgcaggtgtccatggctgttctactggttcaactggccataggcaatgagggctcacagccaatagagctaacctttcctttgccagatggctacagctctttggcttatgtgccagaattttttgcagataacctgggtgattttctcatttttctccgccgctttgccgatgacattttggagacatcagcagattccctggagcatgtccttcactttatcaccattttcactggaagcatagaaagaatgaagaatccccacctgagggccaaactagcagaggtgttggaagcagtgatgccccacctggatcagaccccaaatcccttggtatccagtgtgttccaccggaaacgtgtgttctgcaactttcagtatgcaccccaacttgcagaggctctaatcaaggtttttgtggacatcgaatttacaggagacccccatcaatttgaacagaagtttaattaccgccgtcccatgtatcctatcctaagatacatgtgggggacagatacctatcgggagagcattaaggatttggctgactatgcctctaagaatttagaagccatgaatcccccacttttcctccgctttcttaacctgctaatgaatgatgccatcttccttttggatgaagccatacagtatttgagcaagataaagattcagcaaattgagaaggatcgaggtgaatgggatagtctgactccagaagcccgccgagaaaaggaggctggcctacagatgtttggacagctggcacgtttccataacatcatgtccaatgaaacaatcggtacccttgcctttctcacatcagagatcaagtcactctttgtgcatcccttcctggctgagcgcatcatctccatgttgaactacttcctgcaacacctggttggccccaagatgggtgccttaaaagtcaaggacttcagcgaatttgacttcaaaccccagcagcttgtatcagatatctgcactatctacttaaatcttggggatgaggagaatttctgtgccactgtgcccaaggatggacgttcctattccccaactctctttgcacagacagttcgagtcttgaagaaaataaataagcctgggaatatgattatggctttcagcaacttggcagagagaatcaagtctcttgcagacctccaacaacaggaagaggaaacctatgcagatgcctgtgatgagttcctggatcccattatgagcacactgatgtgtgaccctgtggtgctgccatcttccagagtcactgtggatagatccaccattgcaagacatttgctcagtgaccaaacagatccctttaaccgtagtcccctcaccatggaccagatccggccaaacacagaactaaaagaaaaaatccaacggtggcttgcagagaggaaacaacaaaaggagcaacttgaatagatactgtgaactaaccaaaccaaaaccaaccccagagtgcagataaacaattgtttgtggtttctctctttctggttctgttccttttctttcttcttttctttttcttttttttttttttttttactaaattagagaactgctcttgctgaaattatgatagttaagattcctaagaacttgacaatgctcccctggcttgcaggaaattatacttattatagcatcaccaagtttagaaatcatcactaattttcaccctctgttgtctcttcatattcttcttccttttcctaaatgaaattatattatttcaactactaaaacttcccgccaccctgctatttctcttccaattactgttcaaacatttttggtgagtgctgcttttataaatatgtgatgtcacatatttcagtgacagctgatgttatcagaaaaatcctgttatcctgtgtatttactagtcctcatgatctagacttaaccccttttctgtgttacagagtaacttcacataaaagcagatacctttaagtttgtgtagacttctgaataagatgatagacgagaattttttttaaaaaaggaatttaaaggaatcttgtgcaacttctgttgatagctcttaattttgttatacagtctttttaatgaggattggtagggcaatcctaccaattgatgggggtgaggagactgttgggcccttattctcttatgaaaatctgtttctacaaggactaggcctaagtagatttaggcaacgggtatcatatccatgaaaaatgtcattttaagacactaatatcaacagtatatctcagtgtgtgagatatataaatacacatacaccccatgtgcttttttgttggtttagtgtaaactgagtaccactttatattttctcttccatagtgagatgtatgcagtatgtggccatgtttactaacatactcattcttcacaaaattctgagattataaaatgtatatagttaatatttgtttgagcttgtgacctgacttctaagagctacttctaacacagccttaggtcttcaattaacaaagtaggaagttgagcacaaccttgtccacagccattttaaatatccacttagccctgtgtagttggtaggtggacaccactttcataagtgaacttgagctcactactcaattgtgcagcttaatatgctgactagggacattcccctatggattatctttatatcactgtctttctaagcccagagatgtcataagtgacaagaaaagtgataggatcaagaaatgggtgtcactgcttcatttggaacatgttattaactatggtctctttcaaataaatagtagttttatatttcaacacaagttgctataagcagtccttgatgggtttttgattgcatcagctggaaagcctcaaatctaagagggcttcccatcctagatataaaataggtgttgcctattgctgtgcttataaaatgaaaaaggaaattgaggacacttttgcaaatgccagaatgtaagattcattcagtgtgctccctgggcctttatggcatgggttgacaggatttgtttattttctaaaattagcttcattcaatatttatcatcctcctttccctctctgagaatgaactatgtataaaataagcttctgcctatttgcatttatcttccaaacccaatctagtaggatgttctcattttaaaaacgaggggaaaagaccagagtttttcaggagaaaactggaggaaaatgggcacaaaaactcagaaggcagctattcccagcagcttcctagttaacaacccccatgctgcctccagtctttgtctgtattcttctgtatttaaccttcagattgtaagccttttctggcaagcttttcttctttttttaaactcttttcctgaaactttttatgaatggctatggcaccattaatgctgctgaatatctttaaactctgcacaagcaagtgtgtagcttaaggccactactggtaaggaaaccaagtgtcctctgtgccttttttctttctgtgaagtaatttaagaatatccaaaaaaattagactttaaaaagttatcttggtacaacaccgtgtgtatatacacttggaagcttaaaaaggtgttttgtctggaacttagaagcagctctaaatctagtagagcagactttctaacatacctagttttgtgtattggctttgctggagtatgatagcaaaatgaagactcttttactcagctctggtattgctcataacttaccaagaggctaatactaaacttggaaaattgtttaagtatgttttatcaagcagtctgggttttgttttttaatatactttttaatggatatgtgaaaactgaaggaaatgttaaaggttttttaatggtgcaagtgaaggtgccagttgctatttgatatcacactctacaaaagcttcattactttatttgatggtggttgctaagcagccattgcacagagcataagtctactgggtgcctttacatgccagaggctgatgctgcactgttgatgtcatgtgaggaaataatgcacatgctctaactgctcaacaggaaatgaacctagaaacagaaaatgaaaaggttgattgaaataaaacttgatcaacgcgactgtattttgaaacattccaggaaggttacttcttgtcaaacttgcctggcagtgtttgttcaaaacttgtatttaataaatgaacatctgactt

SEQ ID NO: 22772 - DNA, 2149 bp, Homo sapiens
  misc_feature 1..2149: note = ENST00000545354
  source 1..2149: mol_type = unassigned DNA; mol_type = unassigned DNA
gtataagtagaggaagaaaacagcaactcagtcatagaaagggacactaagaatagcaatttttaatgccttctcaagatacctgaattgatgcagagcatttttcaaaactactcagtcaacacattgccggaagaaggaaattatgtctttagagagaaatctccatcatagacattttaaataagacagtagataaaagttcagcatgtgcttaagctgctcagctgcctagattcaaacaaaaaatgaatatcatctagtttcccaatattagctagctcaagacattatctacagggccaaaggaaatgattttggactattatccataactttgaattatgtgtcttcctttcagtagagaatattaggctgaccttttctgaagaataatttaatttaatattgaacaacagagagctggaagctgctcttagattgcatctcaggttgcatgatcagatggtaaaaatcaaccaaaatctgcatcggctgcaggttgcctggcgggatgctcagcaaagttctagccctgctgctgacaatcttcgtgagcagtttgaacgactgatgaccatctatctttctaccaagactgccatgacagagccacaaatgctacaaaactgcctaaacttgcaggtgtccatggctgttctactggttcaactggccataggcaatgagggctcacagccaatagagctaacctttcctttgccagatggctacagctctttggcttatgtgccagaattttttgcagataacctgggtgattttctcatttttctccgccgctttgccgatgacattttggagacatcagcagattccctggagcatgtccttcactttatcaccattttcactggaagcatagaaagaatgaagaatccccacctgagggccaaactagcagaggtgttggaagcagtgatgccccacctggatcagaccccaaatcccttggtatccagtgtgttccaccggaaacgtgtgttctgcaactttcagtatgcaccccaacttgcagaggctctaatcaaggtttttgtggacatcgaatttacaggagacccccatcaatttgaacagaagtttaattaccgccgtcccatgtatcctatcctaagatacatgtgggggacagatacctatcgggagagcattaaggatttggctgactatgcctctaagaatttagaagccatgaatcccccacttttcctccgctttcttaacctgctaatgaatgatgccatcttccttttggatgaagccatacagtatttgagcaagataaagattcagcaaattgagaaggatcgaggtgaatgggatagtctgactccagaagcccgccgagaaaaggaggctggcctacagatgtttggacagctggcacgtttccataacatcatgtccaatgaaacaatcggtacccttgcctttctcacatcagagatcaagtcactctttgtgcatcccttcctggctgagcgcatcatctccatgttgaactacttcctgcaacacctggttggccccaagatgggtgccttaaaagtcaaggacttcagcgaatttgacttcaaaccccagcagcttgtatcagatatctgcactatctacttaaatcttggggatgaggagaatttctgtgccactgtgcccaaggatggacgttcctattccccaactctctttgcacagacagttcgagtcttgaagaaaataaataagcctgggaatatgattatggctttcagcaacttggcagagagaatcaagtctcttgcagacctccaacaacaggaagaggaaacctatgcagatgcctgtgatgagttcctggatcccattatgagcacactgatgtgtgaccctgtggtgctgccatcttccagagtcactgtggatagatccaccattgcaagacatttgctcagtgaccaaacagatccctttaaccgtagtcccctcaccatggaccagatccggccaaacacagaactaaaagaaaaaatccaacggtggcttgcagagaggaaacaacaaaaggagcaacttgaatagatactgtgaactaaccaaaccaaaaccaaccccagagtgcagataaacaattgtttgtggtttctct

SEQ ID NO: 22773 - DNA, 2113 bp, Homo sapiens
  misc_feature 1..2113: note = ENST00000310473
  source 1..2113: mol_type = unassigned DNA; mol_type = unassigned DNA
agccgcgcgctcgctcgcaggagggtgggtagtttgcccagcgtaggggggctgggcccataaaagaggaagtgcacttaagacacggccccgctggacgctgttagaaaccgtcctggctgggaaggcaagaggtgtgtgactggacaagacttgtttctggcggtcagtcttgccatcctcacagaggttggcggcccgagagagtgtgaggcagaggcggggagtggcaagggagtgaccatctcggggaacgaaggagtaaacgcggtgatgggacgcacggaaacgggagtggagaaagtcatggagagaaccctaggcggggcggtccccgcggaaaggcggctgctccagggtctccgcacccaagtaggagctggcaggcccggccccgccccgcaggccccaccccgggccccgcccccgaggcttaagccgcgccgccgcctgcgcggagccccactgcgaagcccagctgcgcgcgccttgggattgactgtccacgctcgcccggctcgtccgacgcgccctccgccagccgacagacacagccgcacgcactgccgtgttctccctgcggctcggacacatagtatgaccattaggtgtttcgtctcccacccattttctatggaaaaccaaggggatcgggccatgatagccactggcagctttgaagaacgggacacctttagagaagcttgatcttggaggcctcaccgtgagaccttacaaagccggattccggcagagttcctctatctcgtcttgttgctgattaaaggtgcccctgtctccagtttttctccatctcctgggacgtagcaggaaatcagcatcatggttgggttcaaggccacagatgtgccccctactgccactgtgaagtttcttggggctggcacagctgcctgcatcgcagatctcatcacctttcctctggatactgctaaagtccggttacagatccaaggagaaagtcaggggccagtgcgcgctacagccagcgcccagtaccgcggtgtgatgggcaccattctgaccatggtgcgtactgagggcccccgaagcctctacaatgggctggttgccggcctgcagcgccaaatgagctttgcctctgtccgcatcggcctgtatgattctgtcaaacagttctacaccaagggctctgagcatgccagcattgggagccgcctcctagcaggcagcaccacaggtgccctggctgtggctgtggcccagcccacggatgtggtaaaggtccgattccaagctcaggcccgggctggaggtggtcggagataccaaagcaccgtcaatgcctacaagaccattgcccgagaggaagggttccggggcctctggaaagggacctctcccaatgttgctcgtaatgccattgtcaactgtgctgagctggtgacctatgacctcatcaaggatgccctcctgaaagccaacctcatgacagatgacctcccttgccacttcacttctgcctttggggcaggcttctgcaccactgtcatcgcctcccctgtagacgtggtcaagacgagatacatgaactctgccctgggccagtacagtagcgctggccactgtgcccttaccatgctccagaaggaggggccccgagccttctacaaagggttcatgccctcctttctccgcttgggttcctggaacgtggtgatgttcgtcacctatgagcagctgaaacgagccctcatggctgcctgcacttcccgagaggctcccttctgagcctctcctgctgctgacctgatcacctctggctttgtctctagccgggccatgctttccttttcttccttctttctcttccctccttcccttctctccttccctctttccccacctcttccttccgctcctttacctaccaccttccctctttctacattctcatctactcattgtctcagtgctggtggagttgacatttgacagtgtgggaggcctcgtaccagccaggatcccaagcgtcccgtcccttggaaagttcagccagaatcttcgtcctgcccccgacagcccagcctagcccacttgtcatccataaagcaagctcaaccttggcgtc

SEQ ID NO: 22774 - DNA, 1413 bp, Homo sapiens
  misc_feature 1..1413: note = ENST00000536983
  source 1..1413: mol_type = unassigned DNA; mol_type = unassigned DNA
gctgcgcgcgccttgggattgactgtccacgctcgcccggctcgtccgacgcgccctccgccagccgacagacacagccgcacgcactgccgtgttctccctgcggctcggacacatagtatgaccattaggtgtttcgtctcccacccattttctatggaaaaccaaggggatcgggccatgatagccactggcagctttgaagaacgggacacctttagagaagcttgatcttggaggcctcaccgtgagaccttacaaagccggattccggcagagttcctctatctcgtcttgttgctgattaaaggtgcccctgtctccagtttttctccatctcctgggacgtagcaggaaatcagcatcatggttgggttcaaggccacagatgtgccccctactgccactgtgaagtttcttggggctggcacagctgcctgcatcgcagatctcatcacctttcctctggatactgctaaagtccggttacagatccaaggagaaagtcaggggccagtgcgcgctacagccagcgcccagtaccgcggtgtgatgggcaccattctgaccatggtgcgtactgagggcccccgaagcctctacaatgggctggttgccggcctgcagcgccaaatgagctttgcctctgtccgcatcggcctgtatgattctgtcaaacagttctacaccaagggctctgagcatgccagcattgggagccgcctcctagcaggcagcaccacaggtgccctggctgtggctgtggcccagcccacggatgtggtaaaggtccgattccaagctcaggcccgggctggaggtggtcggagataccaaagcaccgtcaatgcctacaagaccattgcccgagaggaagggttccggggcctctggaaagggacctctcccaatgttgctcgtaatgccattgtcaactgtgctgagctggtgacctatgacctcatcaaggatgccctcctgaaagccaacctcatgacaggttcatgccctcctttctccgcttgggttcctggaacgtggtgatgttcgtcacctatgagcagctgaaacgagccctcatggctgcctgcacttcccgagaggctcccttctgagcctctcctgctgctgacctgatcacctctggctttgtctctagccgggccatgctttccttttcttccttctttctcttccctccttcccttctctccttccctctttccccacctcttccttccgctcctttacctaccaccttccctctttctacattctcatctactcattgtctcagtgctggtggagttgacatttgacagtgtgggaggcctcgtaccagccaggatcccaagcgtcccgtcccttggaaagttcagccagaatcttcgtcctgcccccgacagcccagcc

SEQ ID NO: 22775 - DNA, 1004 bp, Homo sapiens
  misc_feature 1..1004: note = ENST00000544615
  source 1..1004: mol_type = unassigned DNA; mol_type = unassigned DNA
gggcaacatgcttatccctgtagctaccctgtcttggccttgcagatccaaggagaaagtcaggggccagtgcgcgctacagccagcgcccagtaccgcggtgtgatgggcaccattctgaccatggtgcgtactgagggcccccgaagcctctacaatgggctggttgccggcctgcagcgccaaatgagctttgcctctgtccgcatcggcctgtatgattctgtcaaacagttctacaccaagggctctgagcatgccagcattgggagccgcctcctagcaggcagcaccacaggtgccctggctgtggctgtggcccagcccacggatgtggtaaaggtccgattccaagctcaggcccgggctggaggtggtcggagataccaaagcaccgtcaatgcctacaagaccattgcccgagaggaagggttccggggcctctggaaagggacctctcccaatgttgctcgtaatgccattgtcaactgtgctgagctggtgacctatgacctcatcaaggatgccctcctgaaagccaacctcatgacagatgacctcccttgccacttcacttctgcctttggggcaggcttctgcaccactgtcatcgcctcccctgtagacgtggtcaagacgagatacatgaactctgccctgggccagtacagtagcgctggccactgtgcccttaccatgctccagaaggaggggccccgagccttctacaaagggttcatgccctcctttctccgcttgggttcctggaacgtggtgatgttcgtcacctatgagcagctgaaacgagccctcatggctgcctgcacttcccgagaggctcccttctgagcctctcctgctgctgacctgatcacctctggctttgtctctagccgggccatgctttccttttcttccttctttctcttccctccttcccttctctccttccctctttccccacctcttccttccgctcctttacctaccaccttccctctttc

SEQ ID NO: 22776 - DNA, 389 bp, Homo sapiens
  misc_feature 1..389: note = ENST00000545212
  source 1..389: mol_type = unassigned DNA; mol_type = unassigned DNA
gggagccgcctcctagcaggcagcaccacaggtgccctggctgtggctgtggcccagcccacggatgtggtaaaggtccgattccaagctcaggcccgggctggaggtggtcggagataccaaagcaccgtcaatgcctacaagaccattgcccgagaggaagggttccggggcctctggaaagggacctctcccaatgttgctcgtaatgccattgtcaactgtgctgagctggtgacctatgacctcatcaaggatgccctcctgaaagccaacctcatgacaggcttctgcaccactgtcatcgcctcccctgtagacgtggtcaagacgagatacatgaactctgccctgggccagtacagtagcgctggccactgtgcccttac

SEQ ID NO: 22777 - DNA, 344 bp, Homo sapiens
  misc_feature 1..344: note = ENST00000545562
  source 1..344: mol_type = unassigned DNA; mol_type = unassigned DNA
aaatgagtgcaagcccgctggccactgaccccatggctcgcccacagatgccagcattgggagccgcctcctagcaggcagcaccacaggtgccctggctgtggctgtggcccagcccacggatgtggtaaaggtccgattccaagctcaggcccgggctggaggtggtcggagataccaaagcaccgtcaatgcctacaagaccattgcccgagaggaagggttccggggcctctggaaagggacctctcccaatgttgctcgtaatgccattgtcaactgtgctgagctggtgacctatgacctcatcaaggatgccctcctgaaagccaacctcatgacag

SEQ ID NO: 22778 - DNA, 567 bp, Homo sapiens
  misc_feature 1..567: note = ENST00000543714
  source 1..567: mol_type = unassigned DNA; mol_type = unassigned DNA
actgcgaagcccagctgcgcgcgccttgggattgactgtccacgctcgcccggctcgtccgacgcgccctccgccagccgacagacacagccgcacgcactgccgtgttctccctgcggctcggacacatagtatgaccattaggtgtttcgtctcccacccattttctatggaaaaccaaggggatcgggccatgatagccactggcagctttgaagaacgggacacctttagagaagcttgatcttggaggcctcaccgtgagaccttacaaagccggattccggcagagttcctctatctcgtcttgttgctgattaaaggtgcccctgtctccagtttttctccatctcctgggacgtagcaggaaatcagcatcatggttgggttcaaggccacagatgtgccccctactgccactgtgaagtttcttggggctggcacagctgcctgcatcgcagatctcatcacctttcctctggatactgctaaagtccggttacaggtgaggggatgaagcctgggagtcttgatggtgtctactctgttccctccccaaagacacag

SEQ ID NO: 22779 - DNA, 464 bp, Homo sapiens
  misc_feature 1..464: note = ENST00000539764
  source 1..464: mol_type = unassigned DNA; mol_type = unassigned DNA
gggcagcagctgggtcttattcttctctggccttcacaacatcctgcaacccagctcaaggtcaggaatgtgacagactcatgtcatcatatctctgatgcccagagaagggataccatttgcctgagccttctcagtactgtttaatcagcctgtgagaactttccttgtgaaaggccctgtctgtgcctggggctgataaaacagcaagaacgaactgaggagctgggcagcagtgcaaagcaaatactaccagctttggtgcctattccggcagagttcctctatctcgtcttgttgctgattaaaggtgcccctgtctccagtttttctccatctcctgggacgtagcaggaaatcagcatcatggttgggttcaaggccacagatgtgccccctactgccactgtgaagtttcttggggctggcacagctgcctgcatcgcagatctcatcacctttcc

SEQ ID NO: 22780 - DNA, 538 bp, Homo sapiens
  misc_feature 1..538: note = ENST00000542615
  source 1..538: mol_type = unassigned DNA; mol_type = unassigned DNA
actgcgaagcccagctgcgcgcgccttgggattgactgtccacgctcgcccggctcgtccgacgcgccctccgccagccgacagacacagccgcacgcactgccgtgttctccctgcggctcggacacatagtatgaccattaggtgtttcgtctcccacccattttctatggaaaaccaaggggatcgggccatgatagccactggcagctttgaagaacgggacacctttagagaagcttgatcttggaggcctcaccgtgagaccttacaaagccggctctccagatgaaccacagaagcaggaatgtgggcatcatcagtgaaatctctgcatacagcagacaaagggctggtccagtggctgtttatgaggcagcgctaggagagctctgatccagactctccctgcagtgaaagggagggagcccttcatgaagtattgactgcttgagcaggaattgcttcaccagcacctaactgagtgcctctcgagctcacatcggttttccctcatgaggccacttggagtcttgct

SEQ ID NO: 22781 - DNA, 536 bp, Homo sapiens
  misc_feature 1..536: note = ENST00000541027
  source 1..536: mol_type = unassigned DNA; mol_type = unassigned DNA
actgcgaagcccagctgcgcgcgccttgggattgactgtccacgctcgcccggctcgtccgacgcgccctccgccagccgacagacacagccgcacgcactgccgtgttctccctgcggctcggacacatagtatgaccattaggtgtttcgtctcccacccattttctatggaaaaccaaggggatcgggccatgatagccactggcagctttgaagaacgggacacctttagagaagcttgatcttggaggcctcaccgtgagaccttacaaagccggctctgacctggacccctcatccctgcctgtcttgtggtgtaagtgcggatccccctaagttggaggaaaggaaactggcccaaacaaaaaggagagcagttttctctgcatcacatgctctccagatgaaccacagaagcaggaatgtgggcatcatcagtgaaatctctgcatacagcagacaaagggctggtccagtggctgtttatgaggcagcgctaggagagctctgatccagactctccctgcagtgaaa

SEQ ID NO: 22782 - DNA, 608 bp, Homo sapiens
  misc_feature 1..608: note = ENST00000539330
  source 1..608: mol_type = unassigned DNA; mol_type = unassigned DNA
actgcgaagcccagctgcgcgcgccttgggattgactgtccacgctcgcccggctcgtccgacgcgccctccgccagccgacagacacagccgcacgcactgccgtgttctccctgcggctcggacacatagtatgaccattaggtgtttcgtctcccacccattttctatggaaaaccaaggggatcgggccatgatagccactggcagctttgaagaacgggacacctttagagaagcttgatcttggaggcctcaccgtgagaccttacaaagccgggtaagagtccagtccaaggaagaggtctcttgctgcctcctaaccctgtggtctaggggcaggagtcagcagggcattaacaaaaataattaccatccccacccccgacagtgaagtggctctttccagttcacagagcactctcacacctccccgctctcattctggcccttcagctgactcggacaagccaaggatcttggtccccattttataaaggagaaaactgaggcccacgtgtaacagtgattggccccaagtcatcccgggagccagcagaagagctaggacaggaacctattgttctaacttcatattgatgctagct

SEQ ID NO: 22783 - DNA, 458 bp, Homo sapiens
  misc_feature 1..458: note = ENST00000461673
  source 1..458: mol_type = unassigned DNA; mol_type = unassigned DNA
tgagccctgcatcctgcccacgacccccccagaaacacctacgcaccactctcctagccgccgcagccccgccagtctcgccgggaggaacccccagcgccgcggtacaaccacggcacttccgcccgccccccgcgcctcgggcgcaagcgtttggtgtgtctgcgtcgggggcggagcctcttgtccctctgcgcggcccgttccgcctctcttctcccaccgcctgtcggctgacgtgtctgcagttcctccgcgtctactgcgagtcaggccgtgatggcggacgcctgggaagagattaggcggttggcggccgacttccagcgggcgcagttcgccgaggccacgcagagatttgaagattggaagcaggcctgtaagagacaacagacttgaaatttgtgatgggatgatgtgtaccaattaaataaatgatttaagcatatgtaaaccta

SEQ ID NO: 22784 - DNA, 4224 bp, Homo sapiens
  misc_feature 1..4224: note = ENST00000369278
  source 1..4224: mol_type = unassigned DNA; mol_type = unassigned DNA
cttctcccaccgcctgtcggctgacgtgtctgcagttcctccgcgtctactgcgagtcaggccgtgatggcggacgcctgggaagagattaggcggttggcggccgacttccagcgggcgcagttcgccgaggccacgcagaggttgtccgagcggaactgcattgagattgttaataaattgattgctcagaaacagctagaagtagttcatacactcgatggaaaggaatatattactccagcccaaattagtaaagaaatgagagatgagctacatgtccgaggtggtcgagtaaacattgttgatctacaacaggtaattaatgtggacctgattcatattgaaaatagaattggtgacattattaaatcagaaaagcatgttcagttagtgttgggacaactgatagatgagaattatttggatcggttggcagaagaggtcaatgataaattgcaagaaagtggtcaggtcaccatatcagaactgtgtaaaacttatgatcttcctgggaactttctgacacaggcactaactcagcgacttggtagaattatcagtggacatattgatcttgataatagaggagtaatttttacggaagcttttgtagctcgacataaagcacgtatccgtggactattcagtgctattacccggcctacagctgtgaattctttgatttcaaaatatggatttcaggagcagcttctttactctgtgcttgaggaacttgttaatagcggacgcttacgaggcactgtggttggtgggagacaggataaagctgtgtttgtccctgacatctactccaggacacagagtacttgggtggattcctttttcaggcagaatggctatctagaatttgatgctttgtccagacttggaatcccagatgctgtaagctacataaagaaaagatataagactacacaactcttgtttttgaaagcagcttgtgttggtcaaggacttgtggatcaagtggaagcatcagtagaagaagccatcagctctggaacatgggttgatattgcacctctgctacccacttctttatcagttgaagatgctgccatattgcttcagcaggtgatgagggcattcagcaaacaggcctcaactgtagtctttagcgacactgttgtagtcagtgaaaaatttataaatgactgtacagaactgttccgtgagctgatgcaccagaaagctgaaaaggaaatgaaaaataatcctgtgcatttaatcactgaagaagatctgaaacaaatctccactttagaaagcgttagtacaagtaaaaaggataaaaaagatgagcgaagaaggaaagcaacagagggcagtggaagcatgagaggaggaggtgggggcaatgccagagagtacaaaattaaaaaagtcaagaagaaaggaagaaaagatgatgatagtgatgatgaatctcaatcatcccacactggaaagaagaagccagagatcagttttatgttccaggatgagattgaagattttttaagaaaacacatacaagatgcccctgaggagtttatttcggaacttgctgagtacttaataaaacctcttaataaaacttatctcgaggtggtacgttcagtattcatgtcttcaacaacttctgcttctgggacgggcagaaaacgcacaatcaaggacttgcaagaagaagtttcaaacctgtacaataacattaggttatttgaaaaagggatgaagttttttgcagatgacacacaggctgctcttaccaaacacttgctgaagtcagtgtgtactgatatcactaacctcattttcaacttcttagcttcggatttaatgatggcagtagacgatcctgcagccattacaagtgaaataagaaagaaaattttaagtaaattatcagaagaaaccaaagtagctcttacaaaactccataactctctgaatgaaaagagcatagaagactttatttcttgtctggattctgcagcagaagcttgtgatattatggtgaaaaggggagacaaaaaaagggaaagacagatactgttccaacatcgacaagcactggctgaacagctaaaggtcacagaagaccctgctcttattctgcacctcacatcagtcctgttgtttcagttttcaacccacagcatgctccatgcacctggaagatgtgtcccacagatcattgcttttcttaatagtaaaattccagaggatcagcatgctcttttggtaaagtatcaaggtttggttgtaaagcagctagtcagtcaaagtaagaagactgggcagggagattatcccttgaataatgaattagacaaagaacaagaagatgttgccagtactactcgtaaagagcttcaagaactttcttcatccattaaagaccttgttctcaaatctaggaaatcatctgtgacggaagagtaatgatcttaatttacatttgtcatatagtaagcattttcccccaaggttgaaggtgagtggtcacaaaaaagtagtcactatacaactcccctctccctgcaaaaaccacctcatacacacacaattcagttaaaacagtagtattgtattaaatgtaaatcttaaaaagatgtgaatttttgtaaattgggttcttcatggaagtttttttccacctgattttcacacaaatactatatgaaatttttcacattattttcacataattttaaaaattacatatttcaggtttgttctctttccaaatgttgaatgaaaaacaaattttccaatccatttatccctggggaaggattcatttgttgcgagtgccagtatacttaaatgtatactttatatacatttaagcagaaatttaaaatgtggtcttttttttttaaaagaaacacttctgtgtcagaaatgaaaataaatcatgttttttatttttaaatagaaagcacttcaaaactaaaatacagaaatttacaaaaaagaaaaattattactaagcccttgctcttatttttggcagaataaacattgattttggttggggctgcaaggatgcctttacaggtgcacaagaacgctagagtggcccatgcattgctgtgttctcttctaaaacaagctactaacaagagagagaacacatgcaatttattaccagtaagcataagtcatatttaacattggaataactaagcattttatacaaagatttttctttgacccagtttgcatttgtacattttatttttttagttcaacagctgctctgtcacataatactttgtaaatactagtgtgaaaaacagataggatgccttttccagtggtaggagcatctgtaagtgcatttaaatcattagaagcttttttccaaaactagaaacccttattaaaaaatagacatttttttctaaagattattagttaaaaataactaaaagagttccttagagtaatcatttcaaccaaatgaatttcaagcaacaacttacttactatttatcaaaaagggatttaattattttgaatataattataaattaaatttcaaatatttaaaaatactattttatataattccttatgacattttaaactttatattttaaaatatttgaatacgaaaagatcagtctacctctactccattctagacaaagtattaatccttagtgaaagtaattaattaaattgccaacttggcattattattaaacttgataggaacgcaacattaaatttaaaaatgttttcccgtgggtaattttctattatatattttcatatgggcaaagggaaaaaatgataaatcctctgtaatcacaaaccccaatttcgttttgtttattcagcttctaaaatattgaacacccagacttttaattcaacctttaagaaccttatcatttatgtttcagtagatatcaaagtaatccatgtttgtgtcaaatgatcatagaaaataaatagaagagacagtgaagcaagtaaaaagaaaagcattgttttaatttgtttgcattaatttttttcatttgtcaaaatgcttcttttgttgccacagtaaagaacagtttttattgttttgtaagtaaaattacgtagctgattttgtatgtaaagattaatttccataataaaaattattgtatgtttactgtgatcttaatgggcagggttaagaaagttatttaaaataaagttacctattctactaaa

SEQ ID NO: 22785 - DNA, 2348 bp, Homo sapiens
  misc_feature 1..2348: note = ENST00000514247
  source 1..2348: mol_type = unassigned DNA; mol_type = unassigned DNA
agttggtccgcccgggccccgcccctgggccgtgcggtgacaccacttcagggccggcccccggaacttttgggcaggcgtcagcgcccgtgtcaccgccacgtcgcggacatggtgatttcagaaagtatggatatactcttcagaataagaggaggccttgatttggcttttcagctagctactcctaatgaaatttttctcaagaaggcactgaaacatgtgttgagtgacctgtcaactaagctgtcttcaaacgcccttgtgttcagaatttgccacagttcagtgtatatatggcctagcagtgacataaacaccattcctggagaactgactgatgcttctgcttatttgagccagaagaagatataaaaagaaaattcatgagaaagaaggacaaaaagttatcagacatgcatcaaatagtaaatatagatcttatgctggaaatgtcaacctccctggcagctgtaacgcccatcattgaaagggaaagcggaggacaccattatgttaatatgactttacctgtcgatgcagttatatctgttgctccagaagaaacatggggaaaagttcgtaaactcctggttgatgcaattcataatcaactaactgacatggaaaaatgtattttgaaatatatgaaaggaacatctattgtggtccctgaaccactgcactttttattaccagggaaaaaaaatcttgtaacaatttcatatccttcaggaataccagatggccagctgcaggcctataggaaggagttacatgatcttttcaatctgcctcacgacagaccctatttcaaaaggtctaatgcttatcactttccagatgagccatacaaagatggttacattagaaatccacatacttaccttaatccacctaacatggagactggtatgatttatgtggtccagggcatatatggctatcatcattatatgcaggatcgcatagatgacaatggctggggctgtgcttatcgatctctgcagactatctgctcttggttcaaacatcagggatacacagagaggtccattccaacacacagagaaattcagcaggctctagtcgatgccggggacaaaccagcaacatttgtcggatcgcggcaatggattggatctattgaggtgcagctggtactaaaccaattgatcggtataacgtcaaaaatcctgtttgtcagccaaggttcagaaattgcctctcaaggacgggaactggctaatcatttccaaagtgaaggaactccagttatgatcgggggaggagttttggcccacacaatactaggagttgcatggaatgagattacagggcagataaagtttctgattctagatccacattataccggtgctgaagacctgcaagttattttggaaaagggctggtgcggatggaagggcccagatttttggaacaaggatgcatactataacttatgtcttcctcagcgaccaaatatgatttaaaatatcttggagtcaaagactgcagtagagtggtattataaatttgtgaataaagaatcagtttaatttttcacattaaatcctggttctagtttgacgatttaaattatgacctttttcaaaggttgtaaatactgcacggagaatgtattttttagacgttcctttaataacttaaaagacaaagcatacacaaccagcatattataggcatgtaaatacatgtgttcttaaatggatcttcacttggaagaaagtttttcgtccttctcagaaggagattagacacaacatatggtaaagccaaaagcaggagcttatagatttgcatgaaatgaaggcgttcttcagacttcttcataacccacgtgacatctgtttttaaaaacacgttaacattaaaaacttttttttaaaaagagttttatccccaaacttccaccatgcagtcccatttttggtctctagactctggtaagtataaccagtactaaaatgttaatgagaatgaaacaatactactagaaatacgagtgtcagtattaaatggaataataaatgctatgcaaacaagagatcactgcgggaggaaaaaagcagcagctctgagttacttaccagcacttccttttcccactggtattttctacacttccgagactccgtttctgtctgagcacggcaacacaatcattcctgtcagggtgttcacttgcttttattgtctgcatacatttaattgttgtaagaaacttggcacagtctggaaatccacatgaccaagcgagatcttcagctgtttgcccgttcttattacataaactgaaaacaggataaaaacggagtgaaatg

SEQ ID NO: 22786 - DNA, 1630 bp, Homo sapiens
  misc_feature 1..1630: note = ENST00000264689
  source 1..1630: mol_type = unassigned DNA; mol_type = unassigned DNA
agttgtagttggtccgcccgggccccgcccctgggccgtgcggtgacaccacttcagggccggcccccggaacttttgggcaggcgtcagcgcccgtgtcaccgccacgtcgcggacatggtgatttcagaaagtatggatatactcttcagaataagaggaggccttgatttggcttttcagctagctactcctaatgaaatttttctcaagaaggcactgaaacatgtgttgagtgacctgtcaactaagctgtcttcaaacgcccttgtgttcagaatttgccacagttcagtgtatatatggcctagcagtgacataaacaccattcctggagaactgactgatgcttctgcttgtaagaacatactgcgctttattcaatttgagccagaagaagatataaaaagaaaattcatgagaaagaaggacaaaaagttatcagacatgcatcaaatagtaaatatagatcttatgctggaaatgtcaacctccctggcagctgtaacgcccatcattgaaagggaaagcggaggacaccattatgttaatatgactttacctgtcgatgcagttatatctgttgctccagaagaaacatggggaaaagttcgtaaactcctggttgatgcaattcataatcaactaactgacatggaaaaatgtattttgaaatatatgaaaggaacatctattgtggtccctgaaccactgcactttttattaccagggaaaaaaaatcttgtaacaatttcatatccttcaggaataccagatggccagctgcaggcctataggaaggagttacatgatcttttcaatctgcctcacgacagaccctatttcaaaaggtctaatgcttatcactttccagatgagccatacaaagatggttacattagaaatccacatacttaccttaatccacctaacatggagactggtatgatttatgtggtccagggcatatatggctatcatcattatatgcaggatcgcatagatgacaatggctggggctgtgcttatcgatctctgcagactatctgctcttggttcaaacatcagggatacacagagaggtccattccaacacacagagaaattcagcaggctctagtcgatgccggggacaaaccagcaacatttgtcggatcgcggcaatggattggatctattgaggtgcagctggtactaaaccaattgatcggtataacgtcaaaaatcctgtttgtcagccaaggttcagaaattgcctctcaaggacgggaactggctaatcatttccaaagtgaaggaactccagttatgatcgggggaggagttttggcccacacaatactaggagttgcatggaatgagattacagggcagataaagtttctgattctagatccacattataccggtgctgaagacctgcaagttattttggaaaagggctggtgcggatggaagggcccagatttttggaacaaggatgcatactataacttatgtcttcctcagcgaccaaatatgatttaaaatatcttggagtcaaagactgcagtagagtggtattataaatttgtgaataaagaatcagtttaatttttcacattaaatcctggttctagtttgacgattt

SEQ ID NO: 22787 - DNA, 678 bp, Homo sapiens
  misc_feature 1..678: note = ENST00000510206
  source 1..678: mol_type = unassigned DNA; mol_type = unassigned DNA
ctgagcaccaaggtgatgttttaacttcatgttaaaaacccaggcctcctttatacagttcaagaagcagaaaatcaaggtcttttagcgtcttatctagcacacttggtggccttaagtattttgagtttatgttgctttaaattgcacagtttaattgctctcagttccctaacacttaatttttttacatttatatattttttcagtaacacccgaaaaaacaagaaagtaggaaacattgtctcctagctcattatttgaccgtagtgttggaagtagttcatctgatagaaaatggtttctttctagccaaggttcagaaattgcctctcaaggacgggaactggctaatcatttccaaagtgaaggaactccagttatgatcgggggaggagttttggcccacacaatactaggagttgcatggaatgagattacagggcagataaagtttctgattctagatccacattataccggtgctgaagacctgcaagttattttggaaaagggctggtgcggatggaagggcccagatttttggaacaaggatgcatactataacttatgtcttcctcagcgaccaaatatgatttaaaatatcttggagtcaaagactgcagtagagtggtattataaatttgtgaataaagaatcagtttaatttttcacatt

SEQ ID NO: 22788 - DNA, 1672 bp, Homo sapiens
  misc_feature 1..1672: note = ENST00000510755
  source 1..1672: mol_type = unassigned DNA; mol_type = unassigned DNA
cccgggccccgcccctgggccgtgcggtgacaccacttcagggccggcccccggaacttttgggcaggcgtcagcgcccgtgtcaccgccacgtcgcggacatggtgatttcagaaagtatggatatactcttcagaataagaggaggccttgatttggcttttcagctagctactcctaatgaaatttttctcaagaaggcactgaaacatgtgttgagtgacctgtcaactaagctgtcttcaaacgcccttgtgttcagaatttgccacagttcagtgtatatatggcctagcagtgacataaacaccattcctggagaactgactgatgcttctgcttgtaagaacatactgcgctttattcaatttgagccagaagaagatataaaaagaaaattcatgagaaagaaggacaaaaagttatcagacatgcatcaaatagtaaatatagatcttatgctggaaatgtcaacctccctggcagctgtaacgcccatcattgaaagggaaagcggaggacaccattatgttaatatgactttacctgtcgatgcagttatatctgttgctccagaagaaacatggggaaaagttcgtaaactcctggttgatgcaattcataatcaactaactgacatggaaaaatgtattttgaaatatatgaaaggaacatctattgtggtccctgaaccactgcactttttattaccagggaaaaaaaatcttgtaacaatttcatatccttcaggaataccagatggccagctgcaggcctataggaaggagttacatgatcttttcaatctgcctcacgacagaccctatttcaaaaggtctaatgcttatcactttccagatgagccatacaaagatggttacattagaaatccacatacttaccttaatccacctaacatggagactggtatgatttatgtggtccagggcatatatggctatcatcattatatgcaggatcgcatagatgacaatggctggggctgtgcttatcgatctctgcagactatctgctcttggttcaaacatcagggatacacagagaggtccattccaacacacagagaaattcagcaggctctagtcgatgccggggacaaaccagcaacatttgtcggatcgcggcaatggattggatctattgaggtgcagctggtactaaaccaattgatcggtataacgtcaaaaatcctgtttgtcagtaacacccgaaaaaacaagaaagtaggaaacattgtctcctagctcattatttgaccgtagtgttggaagtagttcatctgatagaaaatggtttctttctagccaaggttcagaaattgcctctcaaggacgggaactggctaatcatttccaaagtgaaggaactccagttatgatcgggggaggagttttggcccacacaatactaggagttgcatggaatgagattacagggcagataaagtttctgattctagatccacattataccggtgctgaagacctgcaagttattttggaaaagggctggtgcggatggaagggcccagatttttggaacaaggatgcatactataacttatgtcttcctcagcgaccaaatatgatttaaaatatcttggagtcaaagactgcagtagagtggtattataaatttgtgaataaagaat

SEQ ID NO: 22789 - DNA, 1159 bp, Homo sapiens
  misc_feature 1..1159: note = ENST00000511485
  source 1..1159: mol_type = unassigned DNA; mol_type = unassigned DNA
atttagatttgagccagaagaagatataaaaagaaaattcatgagaaagaaggacaaaaagttatcagacatgcatcaaatagtaaatatagatcttatgctggaaatgtcaacctccctggcagctgtaacgcccatcattgaaagggaaagcggaggacaccattatgttaatatgactttacctgtcgatgcagttatatctgttgctccagaagaaacatggggaaaagttcgtaaactcctggttgatgcaattcataatcaactaactgacatggaaaaatgtattttgaaatatatgaaaggaacatctattgtggtccctgaaccactgcactttttattaccagggaaaaaaaatcttgtaacaatttcatatccttcaggaataccagatggccagctgcaggcctataggaaggagttacatgatcttttcaatctgcctcacgacagaccctatttcaaaaggtctaatgcttatcactttccagatgagccatacaaagatggttacattagaaatccacatacttaccttaatccacctaacatggagactggtatggatcgcatagatgacaatggctggggctgtgcttatcgatctctgcagactatctgctcttggttcaaacatcagggatacacagagaggtccattccaacacacagagaaattcagcaggctctagtcgatgccggggacaaaccagcaacatttgtcggatcgcggcaatggattggatctattgaggtgcagctggtactaaaccaattgatcggtataacgtcaaaaatcctgtttgtcagccaaggttcagaaattgcctctcaaggacgggaactggctaatcatttccaaagtgaaggaactccagttatgatcgggggaggagttttggcccacacaatactaggagttgcatggaatgagattacagggcagataaagtttctgattctagatccacattataccggtgctgaagacctgcaagttattttggaaaagggctggtgcggatggaagggcccagatttttggaacaaggatgcatactataacttatgtcttcctcagcgaccaaatatgatttaaaatatcttggagtcaaagactgcagtagagtggtattataaatttgtgaataaa

SEQ ID NO: 22790 - DNA, 592 bp, Homo sapiens
  misc_feature 1..592: note = ENST00000509180
  source 1..592: mol_type = unassigned DNA; mol_type = unassigned DNA
acatggagactggtatgatttatgtggtccagggcatatatggctatcatcattatatgcaggatcgcatagatgacaatggctggggctgtgcttatcgatctctgcagactatctgctcttggttcaaacatcagggatacacagagaggtccattccaacacacagagaaattcagcaggctctagtcgatgccggggacaaaccagcaacatttgtcggatcgcggcaatggattggatctattgaggtgcagctggtactaaaccaattgatcggtataacgtcaaaaatcctgtttgtcagccaaggttcagaaattgcctctcaaggacgggaactggctaatcatttccaaagtgaaggaactccagttatgatcgggggaggagttttggcccacacaatactaggagttgcatggaatgagattacagggcagataaagtttctgattctagatccacattataccggtgctgaagacctgcaagttattttggaaaagcatttggaatttgaagtctataaaaggttttttgactggtgcatgtatcttactgaatatagtagcaatattcttgttctgta

SEQ ID NO: 22791 - DNA, 565 bp, Homo sapiens
  misc_feature 1..565: note = ENST00000502428
  source 1..565: mol_type = unassigned DNA; mol_type = unassigned DNA
agggccggcccccggaacttttgggcaggcgtcagcgcccgtgtcaccgccacgtcgcggacatggtgatttcagaaagtatggatatactcttcagaataagaggaggccttgatttggcttttcagctagctactcctaatgaaatttttctcaagaaggcactgaaacatgtgttgagtgacctgtcaactaagctgtcttcaaacgcccttgtgttcagaatttgccacagttcagtgtatatatggcctagcagtgacataaacaccattcctggagaactgactgatgcttctgcttgtaagaacatactgcgctttattcaatttgagccagaagaagatataaaaagaaaattcatgagaaagaaggacaaaaagttatcagacatgctgtaacgcccatcattgaaagggaaagcggaggacaccattatgttaatatgactttacctgtcgatgcagttatatctgttgctccagaagaaacatggggaaaagttcgtaaactcctggttgatgcaattcataatcaactaactgacatggaaaaatgtattttg

SEQ ID NO: 22792 - DNA, 367 bp, Homo sapiens
  misc_feature 1..367: note = ENST00000502282
  source 1..367: mol_type = unassigned DNA; mol_type = unassigned DNA
ggtgatttcagaaagtatggatatactcttcagaataagaggaggccttgatttggcttttcagctagctactcctaatgaaatttttctcaagaaggcactgaaacatgtgttgagtgacctgtcaactaagctgtcttcaaacgcccttgtgttcagaatttgccacagttcagtgtatatatggcctagcagtgacataaacaccattcctggagaactgactgatgcttctgcttgtaagaacatactgcgctttattcaatttgagccagaagaagatataaaaagaaaattcatgagaaagaaggacaaaaagttatcagacatgctgtaacgcccatcattgaaagggaaagcggaggac

SEQ ID NO: 22793 - DNA, 490 bp, Homo sapiens
  misc_feature 1..490: note = ENST00000505357
  source 1..490: mol_type = unassigned DNA; mol_type = unassigned DNA
gttggtccgcccgggccccgcccctgggccgtgcggtgacaccacttcagggccggcccccggaacttttgggcaggcgtcagcgcccgtgtcaccgccacgtcgcggacatgaaagtatggatatactcttcagaataagaggaggccttgatttggcttttcagctagctactcctaatgaaatttttctcaagaaggcactgaaacatgtgttgagtgacctgtcaactaagctgtcttcaaacgcccttgtgttcagaatttgccacagttcagtgtatatatggcctagcagtgacataaacaccattcctggagaactgactgatgcttctgcttgtaagaacatactgcgctttattcaatttgagccagaagaagatataaaaagaaaattcatgagaaagaaggacaaaaagttatcagacatgcatcaaatagtaaatatagatcttatgctggaaatgtcaacctccctggcagctgta

SEQ ID NO: 22794 - DNA, 4832 bp, Homo sapiens
  misc_feature 1..4832: note = ENST00000376747
  source 1..4832: mol_type = unassigned DNA; mol_type = unassigned DNA
gccggccgaagcgtggcggccacagactgtgggtaccgggtccgagggactcgcgcttttctctccgtgccatggcgccagcgaaagccacgaacgtggtgcggctgctactaggctccacagcgctgtggctttcgcagctcggctccgggacggtcgccgcgtccaagtcggtgactgcccacttggccgcgaagtggcccgagaccccgctgctgctggaggcaagtgaatttatggcagaagaaagtaatgaaaaattttggcagtttttggaaactgtgcaagaattagcaatttataagcaaacagaatcagattattcttattacaacttaatcctgaagaaagctggacagtttctagacaatttacacatcaaccttttaaagtttgctttctctataagggcatactccccagctattcagatgtttcagcagattgcagctgatgagccaccaccagatggttgtaatgcatttgtggttattcataagaagcacacctgtaaaattaatgagattaaaaagctgctgaagaaagctgcttcaaggactagaccttatctatttaaaggagatcacaaatttcctacaaacaaagagaacttaccagtggtgattctctatgccgaaatgggtactagaacatttagtgcatttcacaaagtattgtctgaaaaagctcaaaatgaggaaattctgtatgttcttcgccattatattcagaaaccaagctcacggaaaatgtacttatctgggtatggtgtggagctagcaattaagagtacagaatacaaagcactggatgatacccaagttaaaactgtgactaatactactgtagaggatgagactgaaacaaatgaagttcaaggatttctctttgggaaactaaaagaaatatattcagatcttagagataatctgacagcattccaaaaatacctgattgagagtaacaaacaaatgatgcctttgaaagtctgggaactacaagatcttagttttcaagcagcttctcaaataatgtccgctccagtttatgattccattaaattaatgaaagacatttcacagaacttccccataaaagccagatctctaaccagaattgctgtaaatcaacatatgagagaagaaataaaggaaaatcaaaaggatcttcaagttagatttaaaattcagccaggcgatgctcgtctatttataaatggccttcgtgttgatatggatgtttatgacgcttttagtattttggatatgctgaaattagaaggaaaaatgatgaatggccttcgcaatcttgggatcaatggggaagatatgagcaaatttttaaaattaaattcacacatttgggaatatacttatgtattagatattcgacattcttctataatgtggattaatgacttagaaaatgatgatttgtatattacatggcctacaagttgccagaaacttctgaagccagtatttcctggaagtgtaccttccataaggcgcaattttcataatttggttctgtttattgatccggcccaagaatataccttggattttataaaacttgctgatgttttctattctcacgaagttcctcttagaattggttttgtgttcattcttaatacagatgatgaagttgatggagcaaatgatgctggagttgctctctggcgagctttcaactatattgcagaagaatttgatatatcagaagcatttatttctatagtacacatgtaccaaaaagtgaagaaggatcaaaatatactcactgtggacaatgtgaagagtgttctccaaaatacatttcctcatgctaatatttgggatattttgggaattcattctaaatatgatgaagaaagaaaggctggagcaagcttttataagatgactggcctgggtcctttgcctcaagctctttataatggtgaaccctttaaacatgaagagatgaatattaaagaactaaaaatggctgttcttcaaagaatgatggatgcatctgtatatttacaaagagaagtttttttgggcacattaaatgatcgcacgaatgcaattgattttctaatggataggaataatgttgtaccccgtataaatactttgattttgcgtactaaccagcagtacctcaatttaatatctacatcagtaactgctgatgttgaagatttctctactttctttttcttggattcacaagataagagtgctgtaattgcaaagaacatgtattatttaacccaagacgatgagagtataatttctgcagtcactctctggattattgcagattttgataagccttctgggagaaaacttctttttaatgcattaaagcacatgaaaacaagtgttcatagtcggttggggattatttataatcctacatcaaaaataaatgaagagaacacagctatttctagaggaattttggcagcttttcttacacagaagaacatgtttttgagaagctttcttgggcaactggcaaaggaagaaattgctacagctatttactctggagataaaattaaaacattccttattgaggggatggataagaatgcttttgagaaaaaatataatactgttggagtgaatatttttcgaactcaccagttgttctgtcaagatgtacttaaattacgtcctggagaaatgggtattgtcagcaatgggagattcttaggacctttagatgaagatttttatgcagaagatttttacttgttggaaaagataacatttagtaatttaggagagaaaattaaaggcattgttgaaaatatgggaatcaacgcaaataacatgagtgactttattatgaaagttgatgcccttatgtcctctgtgcctaagcgtgcatctcgatatgatgtcacatttcttagggagaatcacagtgttataaagacgaatcctcaagagaatgatatgttcttcaatgtcattgctattgttgatccattaacaagagaagcacagaaaatggcacagttgttggttgtacttggcaagattatcaacatgaagataaagttgttcatgaactgtaggggcaggctttcagaagcccctttagaaagcttttaccgttttgttctggaaccagaactgatgtcaggggctaatgacgtttcttctcttggaccagtggcaaaatttttggatattcctgaatcacccctcctaatcctcaacatgattactccagaaggctggttggttgaaacagtgcacagcaactgtgaccttgataatattcacttaaaggatactgagaaaactgttacagcagaatatgaactagaatacttactactggaaggacaatgctttgataaagtgacagaacagcctcctcggggtctgcagttcacactaggcacaaaaaataaacctgctgtggttgatacaatagtgatggcacatcatgggtattttcaattaaaagcaaacccaggtgcttggatactgaggttacaccaaggaaaatctgaagatatttatcaaatagttgggcatgaaggaactgactctcaagcagacctagaagatatcattgttgtattaaacagcttcaaaagcaagatactcaaagtaaaagtgaaaaaagaaacagacaaaattaaggaagatatccttaccgatgaagatgaaaaaacaaaaggactgtgggattccattaaaagtttcacagtaagcttgcataaagaaaacaaaaaggaaaaagatgtcctaaacattttttcagttgcttctggtcatttatatgaacgttttttaagaattatgatgctttctgttttgcgtaacaccaaaacaccagtgaaattctggttgctaaaaaattatctctcaccgacatttaaagaagtaattcctcacatggctaaagagtatggattccgatatgaactagttcaatataggtggccccgttggcttcgtcaacagactgaaagacagaggattatttggggttacaaaattcttttccttgatgttcttttcccactagcagtggacaaaatcatttttgttgatgctgaccagattgtgagacatgatctaaaagaacttcgagatttcgatctggatggagctccttatgggtatactccattttgtgatagccgcagggaaatggatggatatcgtttctggaaaacaggatactgggcatcacatcttttaagacggaaataccatatcagtgctttatatgtagtggatctcaagaagttcaggagaattggagcaggtgacaggctcaggagccagtatcaagctctcagtcaagatccaaacagtctttcaaacctagatcaggatctccccaataatatgatttaccaagtcgccattaagtctcttcctcaagactggctgtggtgtgaaacctggtgtgatgatgaatccaaacaaagagccaaaacaattgatctgtgcaataatcccaaaacaaaagaatccaaactaaaagctgctgccagaattgtcccagaatgggtggagtatgatgctgagataagacaactattagatcatcttgaaaacaagaagcaagatacaattttgacacatgatgaactctagcactggtgtatatgagaaggaaggcgaaagcatgacaggaaacctgccgcctgctggggaagtctggagcccctgctgagacgatttggaagtctcgttaagatcagtgacatattctttaattttaaaaaattgtaattatttaaaacagttatttaatgtattgaatgagtttaagttatataataaatgaccattgagtatttaaaa

SEQ ID NO: 22795 - DNA, 512 bp, Homo sapiens
  misc_feature 1..512: note = ENST00000462472
  source 1..512: mol_type = unassigned DNA; mol_type = unassigned DNA
cacatttcattgtgaaaaccttctaattcataccttcaattatttaaaagcctttaaaagacctatgtaacaaacctgtatgttctgcacatgtatcccagaacttaaagtaaaatttaagaaattaaaattaaattttaaaaaacacttcaaggttaaaaaatatatatgagctcctgttactgttaatgtatattgggtttaatattcttttatacagaattatgatgctttctgttttgcgtaacaccaaaacaccagtgaaattctggttgctaaaaaattatctctcaccgacatttaaagaagtaattcctcacatggctaaagagtatggattccgatatgaactagttcaatataggtggccccgttggcttcgtcaacagactgaaagacagaggattatttggggttacaaaattcttttccttgatgttcttttcccactagcagtggacaaaatcatttttgttgatgctgaccagattgtgagacatgatctaaaagaa

SEQ ID NO: 22796 - DNA, 428 bp, Homo sapiens
  misc_feature 1..428: note = ENST00000476866
  source 1..428: mol_type = unassigned DNA; mol_type = unassigned DNA
ccaggtgcttggatactgaggttacaccaaggaaaatctgaagatatttatcaaatagttgggcatgaaggaactgactctcaagcagacctagaagatatcattgttgtattaaacagcttcaaaagcaagatactcaaagtaaaagtgaaaaaagaaacagacaaaattaaggaagatatccttaccgatgaagatgaaaaaacaaaaggactgtgggattccattaaaaggtaattactaatgaatattttaatacatcactagattgatccagaagtctagtatgtggaagttccacaggtagtgaaaatttaagtaaggcaaaggtcctctaatctaggagggataagataaatacataaatgttactactgtgtacaagataggaaactagagctataagacagatgaaaataaaatactat

SEQ ID NO: 22797 - DNA, 833 bp, Homo sapiens
  misc_feature 1..833: note = ENST00000491509
  source 1..833: mol_type = unassigned DNA; mol_type = unassigned DNA
gaatcacagtgttataaagacgaatcctcaagagaatgatatgttcttcaatgtcattgctattgttgatccattaacaagagaagcacagaaaatggcacagttgttggttgtacttggcaagattatcaacatgaagataaagttgttcatgaactgtaggggcaggctttcagaagcccctttagaaagaggggacaaaaatataccctttctcttctttgtggatcagaatcactgtcattcattatgagccattcttattgatgggaatattcagttctccttcatgtgtcattgggcagaaaacaggcttttaccgttttgttctggaaccagaactgatgtcaggggctaatgacgtttcttctcttggaccagtggcaaaatttttggatattcctgaatcacccctcctaatcctcaacatgattactccagaaggctggttggttgaaacagtgcacagcaactgtgaccttgataatattcacttaaaggatactgagaaaactgttacagcagaatatgaactagaatacttactactggaaggacaatgctttgataaagtgacagaacagcctcctcggggtctgcagttcacactaggcacaaaaaataaacctgctgtggttgatacaatagtgatggcacatcatgggtattttcaattaaaagcaaacccaggtgcttggatactgaggttacaccaaggaaaatctgaagatatttatcaaatagttgggcatgaaggaactgactctcaagcagacctagaagatatcattgttgtattaaacagcttcaaaagcaagatactcaaagtaaaa

SEQ ID NO: 22798 - DNA, 1493 bp, Homo sapiens
  misc_feature 1..1493: note = ENST00000463054
  source 1..1493: mol_type = unassigned DNA; mol_type = unassigned DNA
gataacatttagtaatttaggagagaaaattaaaggcattgttgaaaatatgggaatcaacgcaaataacatgagtgactttattatgaaagttgatgcccttatgtcctctgtgcctaagcgtgcatctcgatatgatgtcacatttcttagggagaatcacagtgttataaagacgaatcctcaagagaatgatatgttcttcaatgtcattgctattgttgatccattaacaagagaagcacagaaaatggcacagttgttggttgtacttggcaagattatcaacatgaagataaagttgttcatgaactgtaggggcaggctttcagaagcccctttagaaagcttttaccgttttgttctggaaccagaactgatgtcaggggctaatgacgtttcttctcttggaccagtggcaaaatttttggatattcctgaatcacccctcctaatcctcaacatgattactccagaaggctggttggttgaaacagtgcacagcaactgtgaccttgataatattcacttaaaggatactgagaaaactgttacagcagaatatgaactagaatacttactactggaaggacaatgctttgataaagtgacagaacagcctcctcggggtctgcagttcacactaggcacaaaaaataaacctgctgtggttgatacaatagtgatggcacatcatgtaagtattatttaattgatggtgtttaatttgatgttttggtgaattctctgttttcctaagagtaaaatgaaataatctttattctgctgttgctgaacagtttgcagaaaacaaaattgaatctttgaataagataaataaaaaatggggaaaatcatactttaataatttttgacaggttattgtaaaatctctttacttggaattgatttatagaatttattcattctacagttaataaatactttcttagatcattcgtgtattcatgagcaattcgatggtttttagtcatattactcaatgattatttttttctcatcttaaaaggggtattttcaattaaaagcaaacccaggtgcttggatactgaggttacaccaaggaaaatctgaagatatttatcaaatagttgggtgagttatgcaggctgcttttaaatttttacacataaatacgtttttagtgtaatacaaccaagagaatcaaaacaacaattaaaatgttaagattggcctggcgcagtggctcaagcctgtaatcccaacactttggtaggccgaggcaggcagatcacaaggccaggagttcaagacctgcctggccaacatggcaaaaccccatctgtactaaaaatacaaaaatttgccagacatggtggcgcacacctgtaacttcagctattcaggagactgaggcccaagaattgcttgaatcttcgggaggcggaggttgcagtgagcagactgcaccactgcactccagcccaggacagagagcaagactctgtctc

SEQ ID NO: 22799 - DNA, 610 bp, Homo sapiens
  misc_feature 1..610: note = ENST00000465196
  source 1..610: mol_type = unassigned DNA; mol_type = unassigned DNA
ctctatgccgaaatgggtactagaacatttagtgcatttcacaaagtattgtctgaaaaagctcaaaatgaggaaattctgtatgttcttcgccattatattcagaaaccaagctcacggaaaatgtacttatctgggtatggtgtggagctagcaattaagagtacagaatacaaagcactggatgatacccaagttaaaactgtgactaatactactgtagaggatgagactgaaacaaatgaagttcaaggatttctctttgggaaactaaaagaaatatattcagatcttagagataatctgacagcattccaaaaatacctgattgagagtaacaaacaaatgatgcctttgaaagtctgggaactacaagatcttagttttcaagcagcttctcaaataatgtccgctccagtttatgattccattaaattaatgaaagacatttcacagaacttccccataaaagccagatctctaaccagaattgctgtaaatcaacatatgagagaagaaataaaggaaaatcaaaagtatattccagaatttcttccgaggtagtatggttttcttcataggataaagaataaaggctgtgagttaatta

SEQ ID NO: 22800 - DNA, 805 bp, Homo sapiens
  misc_feature 1..805: note = ENST00000461329
  source 1..805: mol_type = unassigned DNA; mol_type = unassigned DNA
aaaccaagctcacggaaaatgtacttatctgggtatggtgtggagctagcaattaagagtacagaatacaaagcactggatgatacccaagttaaaactgtgactaatactactgtagaggatgagactgaaacaaatgaagttcaaggatttctctttgggaaactaaaagaaatatattcagatcttagagataatctgacagcattccaaaaatacctgattgagagtaacaaacaaatgatgcctttgaaagtctgggaactacaagatcttagttttcaagcagcttctcaaataatgtccgctccagtttatgattccattaaattaatgaaagacatttcacagaacttccccataaaagccagattaagaatgaatatattgatatgcctctttcagtcaactttaaatgtcaagaatttgagaagtcgtcatttatataataaaacatgaaatatatatgggtgtgtataaatgtcatatctgtttagccataatattttaattaatggccgttataaaaattattagatcaaatacaaataaagtaaaataactttagtcttgatcagacagttgattagctctattgatgctaagtcagtataactgttcagaggttctgatgcaaaactctgctgttaatctgtaattaagaaaaaattataaaatatgctaacattgcttaatggctaaattgtaggcttgagcatatctctaaaaccacttggtagacaatctgtaaatgtttgttgaaatgaaatatttgctaaataaatgaaaaatttgccttattaaa

SEQ ID NO: 22801 - DNA, 910 bp, Homo sapiens
  misc_feature 1..910: note = ENST00000467305
  source 1..910: mol_type = unassigned DNA; mol_type = unassigned DNA
gaccttatctatttaaaggagatcacaaatttcctacaaacaaagagaacttaccagtggtgattctctatgccgaaatgggtactagaacatttagtgcatttcacaaagtattgtctgaaaaagctcaaaatgaggaaattctgtatgttcttcgccattatattcagaaaccaagctcacggaaaatgtacttatctgggtatggtgtggagctagcaattaagagtacagaatacaaagcactggatgatacccaagttaaaactgtgactaatactactgtagaggatgagactgaaacaaatgaagttcaaggatttctctttgggaaactaaaagaaatatattcagatcttagagataatctgacagcattccaaaaatacctgattgagagtaacaaacaaatgatgcctttgaaagtctgggaactacaagatcctgttaagactattgcatgtttcattgataaatgtttaatggaaacatcaaatggaggacatgcagttttacaaaatcttagttttcaagcagcttctcaaataatgtccgctccagtttatgattccattaaattaatgaaagacatttcacagaacttccccataaaagccagattaagaatgaatatattgatatgcctctttcagtcaactttaaatgtcaagaatttgagaagtcgtcatttatataataaaacatgaaatatatatgggtgtgtataaatgtcatatctgtttagccataatattttaattaatggccgttataaaaattattagatcaaatacaaataaagtaaaataactttagtcttgatcagacagttgattagctctattgatgctaagtcagtataactgttcagaggttctgatgcaaaactctgctgttaatctgtaattaa

SEQ ID NO: 22802 - DNA, 2240 bp, Homo sapiens
  misc_feature 1..2240: note = ENST00000376712
  source 1..2240: mol_type = unassigned DNA; mol_type = unassigned DNA
agcgggaagagccggccgaagcgtggcggccacagactgtgggtaccgggtccgagggactcgcgcttttctctccgtgccatggcgccagcgaaagccacgaacgtggtgcggctgctactaggctccacagcgctgtggctttcgcagctcggctccgggacggtcgccgcgtccaagtcggtgactgcccacttggccgcgaagtggcccgagaccccgctgctgctggaggcaagtgaatttatggcagaagaaagtaatgaaaaattttggcagtttttggaaactgtgcaagaattagcaatttataagcaaacagaatcagattattcttattacaacttaatcctgaagaaagctggacagtttctagacaatttacacatcaaccttttaaagtttgctttctctataagggcatactccccagctattcagatgtttcagcagattgcagctgatgagccaccaccagatggttgtaatgcatttgtggttattcataagaagcacacctgtaaaattaatgagattaaaaagctgctgaagaaagctgcttcaaggactagaccttatctatttaaaggagatcacaaatttcctacaaacaaagagaacttaccagtggtgattctctatgccgaaatgggtactagaacatttagtgcatttcacaaagtattgtctgaaaaagctcaaaatgaggaaattctgtatgttcttcgccattatattcagaaaccaagctcacggaaaatgtacttatctgggtatggtgtggagctagcaattaagagtacagaatacaaagcactggatgatacccaagttaaaactgtgactaatactactgtagaggatgagactgaaacaaatgaagttcaaggatttctctttgggaaactaaagcttgtctattgactattgaaaatacgtgttttcaatgagacaccatctcacaccagttagaatgacaatcattaaaaaggaaacgacagatgctggaggggatgtggagaaataggaaggcttttacactgttggtgtgtgtgtagatgagttcaaccgttgtggaagacagtgtggcaattcctcaaggatctagaaccagaaataccatttgacccagcaatgcccattactgggtgtatacccaaaggattataaatcattctactataaagacacatgcacacgtatgttgattgtagcactattcacaatagcaaagacttcgaaccaacccaaatgtccatcaatgatagactggataaagaaaatgtggcacatatacaccatagaatactctgcatccataaaaaaggataagttcatgtcctttgcagggacatggatgaagctggaaactatcattctcagcaaactaacacaggaacagaaaaccaaacaccacatgttcttactcaaaagtgggactcgaacagtgagaacacatggacacagggaggggaatatcacacaccgtggcttgtcgggggtggggagctaggagagggatagcattaggagaaatacctaatgtggataacgggttgatgggtgcagcagaccaccatgacacgtgtatacctgtgtaacaaacctgcacgttctacacatgtatcccagaacttaaagtataataaaatgaaaatatgtattttgtaagttgtgctgatagtaacttttttaaattgtatttctccatttaaatctgaaatggcaccatgtcttgatttcatgagtgatagaggaaagaagattacagtttagattgtgtgtatagtaaaataccattctactacatcattatttggctctctaaaagatgcctagagatgtttaacaatgggtaaaattatcttattttagttttttataagaatcaaagatggaacttttcagaaataaactctgattgtatgaggcatttttgactttccttatagtttttattttcaattataaaagcaaggcttgcaatttataaaatgttaaacaaaaagtatgtaatatgaaaacataagtctgccctcatccttgcatcgcttacagttgacactaacaattgagagtatattcctccagattttgttttgtttcatatatttaataaaagagacctgtatatcttcctcattatttttaagttccgtgaatatagctgtatcacaatttatgattatcttaatgatgaatgattcatttatgtctaattacatggaatatgtaatttc

SEQ ID NO: 22803 - DNA, 1233 bp, Homo sapiens
  misc_feature 1..1233: note = ENST00000376714
  source 1..1233: mol_type = unassigned DNA; mol_type = unassigned DNA
cgcgccggagcgggacacgcatgcgccggtctggacccggcacccagtaacggactcgagctcctcccaccggaagtgggcagccgcgcagcgggaagagccggccgaagcgtggcggccacagactgtgggtaccgggtccgagggactcgcgcttttctctccgtgccatggcgccagcgaaagccacgaacgtggtgcggctgctactaggctccacagcgctgtggctttcgcagctcggctccgggacggtcgccgcgtccaagtcggtgactgcccacttggccgcgaagtggcccgagaccccgctgctgctggaggcaagtgaatttatggcagaagaaagtaatgaaaaattttggcagtttttggaaactgtgcaagaattagcaatttataagcaaacagaatcagattattcttattacaacttaatcctgaagaaagctggacagtttctagacaatttacacatcaaccttttaaagtttgctttctctataagggcatactccccagctattcagatgtttcagcagattgcagctgatgagccaccaccagatggttgtaatgcatttgtggttattcataagaagcacacctgtaaaattaatgagattaaaaagctgctgaagaaagctgcttcaaggactagaccttatctatttaaaggagatcacaaatttcctacaaacaaagagaacttaccagtggtgattctctatgccgaaatgggtactagaacatttagtgcatttcacaaagtattgtctgaaaaagctcaaaatgaggaaattctgtatgttcttcgccattatattcagaaaccaagctcacggaaaatgtacttatctgggtatggtgtggagctagcaattaagagtacagaatacaaagcactggatgatacccaagttaaaactgtgactaatactactgtagaggatgagactgaaacaaatgaagttcaaggatttctctttgggaaactaaaatcttagttttcaagcagcttctcaaataatgtccgctccagtttatgattccattaaattaatgaaagacatttcacagaacttccccataaaagccagatctctaaccagaattgctgtaaatcaacatatgagagaagaaataaaggaaaatcaaaagtatattccagaatttcttccgaggtagtatggttttcttcataggataaagaataaaggctgtgagttaatt

SEQ ID NO: 22804 - DNA, 1004 bp, Homo sapiens
  misc_feature 1..1004: note = ENST00000621375
  source 1..1004: mol_type = unassigned DNA; mol_type = unassigned DNA
cgcgccggagcgggacacgcatgcgccggtctggacccggcacccagtaacggactcgagctcctcccaccggaagtgggcagccgcgcagcgggaagagccggccgaagcgtggcggccacagactgtgggtaccgggtccgagggactcgcgcttttctctccgtgccatggcgccagcgaaagccacgaacgtggtgcggctgctactaggctccacagcgctgtggctttcgcagctcggctccgggacggtcgccgcgtccaagtcggtgactgcccacttggccgcgaagtggcccgagaccccgctgctgctggaggcaagtgaatttatggcagaagaaagtaatgaaaaattttggcagtttttggaaactgtgcaagaattagcaatttataagcaaacagaatcagattattcttattacaacttaatcctgaagaaagctggacagtttctagacaatttacacatcaaccttttaaagtttgctttctctataagggcatactccccagctattcagatgtttcagcagattgcagctgatgagccaccaccagatggttgtaatgcatttgtggttattcataagaagcacacctgtaaaattaatgagattaaaaagctgctgaagaaagctgcttcaaggactagaccttatctatttaaaggagatcacaaatttcctacaaacaaagagaacttaccagtggtgattctctatgccgaaatgggtactagaacatttagtgcatttcacaaagtattgtctgaaaaagctcaaaatgaggaaattctgtatgttcttcgccattatattcagaaaccaagctcacggaaaatgtacttatctgggtatggtgtggagctagcaattaagagtacagaatacaaagcactggatgatacccaagttaaaactgtgactaatactactgtagaggatgagactgaaacaaatgaagttcaaggatttctctttgggaaactaaaaagt

SEQ ID NO: 22805 - DNA, 1547 bp, Homo sapiens
  misc_feature 1..1547: note = ENST00000397618
  source 1..1547: mol_type = unassigned DNA; mol_type = unassigned DNA
gccgcgcagcgggaagagccggccgaagcgtggcggccacagactgtgggtaccgggtccgagggactcgcgcttttctctccgtgccatggcgccagcgaaagccacgaacgtggtgcggctgctactaggctccacagcgctgtggctttcgcagctcggctccgggacggtcgccgcgtccaagtcggtgactgcccacttggccgcgaagtggcccgagaccccgctgctgctggaggcaagtgaatttatggcagaagaaagtaatgaaaaattttggcagtttttggaaactgtgcaagaattagcaatttataagcaaacagaatcagattattcttattacaacttaatcctgaagaaagctggacagtttctagacaatttacacatcaaccttttaaagtttgctttctctataagggcatactccccagctattcagatgtttcagcagattgcagctgatgagccaccaccagatggttgtaatgcatttgtggttattcataagaagcacacctgtaaaattaatgagattaaaaagctgctgaagaaagctgcttcaaggactagaccttatctatttaaaggagatcacaaatttcctacaaacaaagagaacttaccagtggtgattctctatgccgaaatgggtactagaacatttagtgcatttcacaaagtattgtctgaaaaagctcaaaatgaggaaattctgtatgttcttcgccattatattcagaaaccaagctcacggaaaatgtacttatctgggtatggtgtggagctagcaattaagagtacagaatacaaagcactggatgatacccaagttaaaactgtgactaatactactgtagaggatgagactgaaacaaatgaagttcaaggatttctctttgggaaactaaaagaaatatattcagatcttagagataatctgacagcattccaaaaatacctgattgagagtaacaaacaaatgatgcctttgaaagtctgggaactacaagatcttagttttcaagcagcttctcaaataatgtccgctccagtttatgattccattaaattaatgaaagacatttcacagaacttccccataaaagccagattaagaatgaatatattgatatgcctctttcagtcaactttaaatgtcaagaatttgagaagtcgtcatttatataataaaacatgaaatatatatgggtgtgtataaatgtcatatctgtttagccataatattttaattaatggccgttataaaaattattagatcaaatacaaataaagtaaaataactttagtcttgatcagacagttgattagctctattgatgctaagtcagtataactgttcagaggttctgatgcaaaactctgctgttaatctgtaattaagaaaaaattataaaatatgctaacattgcttaatggctaaattgtaggcttgagcatatctctaaaaccacttggtagacaatctgtaaatgtttgttgaaatgaaatatttgctaaataaatgaaaaatttgcctt

SEQ ID NO: 22806 - DNA, 1010 bp, Homo sapiens
  misc_feature 1..1010: note = ENST00000638479
  source 1..1010: mol_type = unassigned DNA; mol_type = unassigned DNA
cgcgccggagcgggacacgcatgcgccggtctggacccggcacccagtaacggactcgagctcctcccaccggaagtgggcagccgcgcagcgggaagagccggccgaagcgtggcggccacagactgtgggtaccgggtccgagggactcgcgcttttctctccgtgccatggcgccagcgaaagccacgaacgtggtgcggctgctactaggctccacagcgctgtggctttcgcagctcggctccgggacggtcgccgcgtccaagtcggtgactgcccacttggccgcgaagtggcccgagaccccgctgctgctggaggcaagtgaatttatggcagaagaaagtaatgaaaaattttggcagtttttggaaactgtgcaagaattagcaatttataagcaaacagaatcagattattcttattacaacttaatcctgaagaaagctggacagtttctagacaatttacacatcaaccttttaaagtttgctttctctataagggcatactccccagctattcagatgtttcagcagattgcagctgatgagccaccaccagatggttgtaatgcatttgtggttattcataagaagcacacctgtaaaattaatgagattaaaaagctgctgaagaaagctgcttcaaggactagaccttatctatttaaaggagatcacaaatttcctacaaacaaagagaacttaccagtggtgattctctatgccgaaatgggtactagaacatttagtgcatttcacaaagtattgtctgaaaaagctcaaaatgaggaaattctgtatgttcttcgccattatattcagaaaccaagctcacggaaaatgtacttatctgggtatggtgtggagctagcaattaagagtacagaatacaaagcactggatgatacccaagttaaaactgtgactaatactactgtagaggatgagactgaaacaaatgaagttcaaggatttctctttgggaaactaaaaaaagtgtat

SEQ ID NO: 22807 - DNA, 4084 bp, Homo sapiens
  misc_feature 1..4084: note = ENST00000310836
  source 1..4084: mol_type = unassigned DNA; mol_type = unassigned DNA
aagccaacctcgctcagcggacgactggccggatcccaacgcgctgccccttgcccagcctgcgagcgcgtggtacgaaggcgcgtctgcatccatgccccagcccggggagctggaggcgctcgcagtcagaggcgagtgatgctaggctgagcgcgtggcggcccgtgtcgtgccccgctgagccaagtgcggaagggcagcggcgcgctccgactctgctcgccgcacgcagggcggggcgcggctggggggcggggggcctggccgcccgctgggagctgcggacgagcaggcgcgctgaggacccgagggaggacacggttaaagcattgctatcaactgtgaacccagagagccctccttagccaacacgctaactccgaagcctcccttacgcccccgaaccaccgaaggcggcgacacctgattcagcgcacaaacacaggtcccttctgtcccggatacaattacgcggcagacacacactcaaactcgcgcggggcagccaagagacgagctatgaagtcttacactccatatttcattctcctgtggagtgctgttgggatagcgaaggctgccaaaatcatcatcgtgccgccaattatgtttgaaagccatatgtacattttcaagacgctagcctcagccttgcacgagagaggccaccatacagtgttcctcctctctgaaggcagagacatcgccccatctaatcattacagcctccagcgctacccagggatctttaacagtaccacctcagatgctttcctacagtccaagatgcggaatattttctctgggagattgacagcaatcgaactgtttgacatactggatcactatactaagaactgtgacctgatggttggcaaccatgccctgatccagggtctgaagaaagaaaaatttgacctgctgctggtggaccctaatgatatgtgtggatttgtgatagctcatcttttaggggttaaatatgctgtattttcaactggcctttggtatcctgctgaagtgggtgctcctgctccattagcatacgtcccagagtttaactcactcctcacagaccgcatgaacttgctgcaaaggatgaaaaataccggtgtttacctcatttccagattaggggtcagctttctggttcttcccaaatatgaaaggataatgcagaagtacaacctgctgccagagaagtccatgtatgatttggttcatgggtccagcctgtggatgctgtgtactgacgtagcactggaattcccaagacccactctgcctaatgttgtttatgtaggaggaatcctaaccaaaccagccagcccactaccagaagatctccaaagatgggtaaatggtgctaatgaacatggctttgtcttggtgtcttttggagctggtgtcaagtatctgtcagaagacattgctaacaaactggcaggagctctggggagattgcctcaaaaagtgatttggaggttttctggacccaaaccaaagaatctaggaaacaacactaaactcatagaatggttaccacaaaatgacctgcttgggcattcaaagattaaagccttcctgagccatggtggtttgaacagtatttttgaaactatatatcatggtgtgcctgtagtgggaattccactctttggagaccattatgatactatgaccagagtacaggcaaaaggcatggggatattgctagaatggaagacagttactgaaaaagagctctatgaagcactagtgaaggttatcaataatcccagctaccgtcagagggctcagaagctttcggaaattcacaaggatcaacctggtcaccctgtcaatcgaactatctattggatagattatattattcgtcacaatggagcccatcacctacgtgccgctgtccatcagatctccttttgtcagtattttttactggatattgcctttgtgcttttgcttggtgctgccttgttatactttctcttgtcttgggtgacaaaatttatctacagaaaaatcaaaagtctgtggtctagaaataagcatagcacagttaatggacattaccacaatggaatcctcaatggcaagtacaaaagaaatggccatattaaacatgaaaagaaagtgaaatgagccaacagcccaggtgatagaaataaattggttcactcattgaatttttattgctattatttagtctaacagctactaaaagtaaaacatcagtaaacaattctaacatgcccttatgagatctactaatgaaattctgtggaattaagatggctgtaaaaagcacaaacctaaaatgcagaaatgtattttattcaaatactgatgtagagagttttggcactgaaccttttagaagccttaattatttaaatcaattcagtgactgtgtcagaccttagttttaaatcttgatatgtgcgtgtcccggatcaggaatggtttcatttttcttaataatgtgtgtgtgtgtatgtgtgtgtgtgtgtgtgtgtgtttgtgtgtgtgtgtgtgtgtcctaattaagagaatttttactggctgcttgttacatttgttgagggtacaacacactcaagaataaagtaaaaggatagtcaggatccagatgtttcttttctagcatttaatgtgtgtgaactcagaacactaccatgaaagaacacttccccccaaaactggatgcagaggaagaaaaaaaaaaaagaaatggcacagttttttgtatttttttttttagttattttttgttgttgttgtttgtattgtttttcttttctgatagagtatggccacttctgggggaaaaacatgtaattaagtaaatgtatacattggttttcacgttttacttttgttttcccactaccaataattttcctctggaagaattttatagttttttctatttcattttaatgagtaacaatatgttaaatgcataattaagacaaagcaatgaaattctgactttattcaaagtactgaagattattgcttctagggcatttttaaacagcaccattgtattgttgaatgtttatgtaactgatggcttttctataatgtaatttttgaatgttcaggtgttacatttccaaagtttaacttttaaaaaaccatcttctgatcccttttattgtctgggccatacaatctatattacataggtgccaacatttaattcttttaaatggaacatttgcagttttccatattggtacctgctttttctggagaggtttgagatcttgttaacaaatcagactttacactatatacagatgtgacagataaattgaaccacttgtttgtgaaaatgagttcctgtcatcttcctcattcactcagccctcaccccagcagccttttccggtcattgtagctgacatggagcagtgacagtattcatttgagaacagggatgcaagtcacagacatcataaaatcagggtctccctgctgaagcattcactagttggcaactatgaatttattccatgtcattctgtttacttagcacttgcactacccttgttggttgagtgtatgctttatttgtttctagtttgaaatcccacatctgatagctgagagtaggcaaatacaacatttacctaatgtcattcactaacatggaagagttgtgaaaattctagagtgctgtaaatccttggcatacactatgacaaacaacttcattactctcccaccaggagctgctctcctgcacttagaaataatgtcacaagtagttttctaatgtacaatgcagacaaatgtactgctctctgaatacttgaagaaatggtattatacatacatagaaacttattagttataccttttcacaatcttattacgatgttgccgttaaaagggaaaaaagacacaggcaatgaatggtgggatagtaagaggacttagagtgtatgaatgagttgattttacttttttggaatttgattaagttgacagtaggcactgattggatgattaaacataagttaatctccactgtgataaaaacttaaataataaacatgatttaaaatag

SEQ ID NO: 22808 - DNA, 735 bp, Homo sapiens
  misc_feature 1..735: note = ENST00000507710
  source 1..735: mol_type = unassigned DNA; mol_type = unassigned DNA
aggacacggttaaagcattgctatcaactgtgaacccagagagccctccttagccaacacgctaactccgaagcctcccttacgcccccgaaccaccgaaggcggcgacacctgattcagcgcacaaacacaggtcccttctgtcccggatacaattacgcggcagacacacactcaaactcgcgcggggcagccaagagacgagtgagagtaacacatgcgcactgtggattcctttgtgaatacataaaaggaaaagttaaaactcttataattcacactatccagagaaaaacaatactattttgctatgaagtcttacactccatatttcattctcctgtggagtgctgttgggatagcgaaggctgccaaaatcatcatcgtgccgccaattatgtttgaaagccatatgtacattttcaagacgctagcctcagccttgcacgagagaggccaccatacagtgttcctcctctctgaaggcagagacatcgccccatctaatcattacagcctccagcgctacccagggatctttaacagtaccacctcagatgctttcctacagtccaagatgcggaatattttctctgggagattgacagcaatcgaactgtttgacatactggatcactatactaagaactgtgacctgatggttggcaaccatgccctgatccagggtctgaagaaagaaaaatttgacctgctgctggtggaccctaatgatat

SEQ ID NO: 22809 - DNA, 2448 bp, Homo sapiens
  misc_feature 1..2448: note = ENST00000394511
  source 1..2448: mol_type = unassigned DNA; mol_type = unassigned DNA
gggttggttccaagtctttgctattgtgaatagtgccgcaataaacatacgtgtgcatgtgtctttatagcagcatgatttatagtcctttgggtatatacccagtaatgggatggctgggttctagatccctgaggaatcgccacattgacttgcacaatggttgaactagtttacagtcccaccaacagtgtaaaagtgttcctatttctccacatcctctccggcacctgttgtttcctgactttttaatgattgccattctaactggtgtgagatgatatctcattgtggttttgatttgcatttctctgatggccagtgatggtgagcattttttcatgtgttttttggctgcataaatgtcttcttttgagaagtgtctgttcatgattttttttttagacaaagtattagatcagatatttttggggaaaaatgctttgtgattgcttgttttgaatggtgagcattgtattttgttttaagttgttttctggttgttattacagctatgaagtcttacactccatatttcattctcctgtggagtgctgttgggatagcgaaggctgccaaaatcatcatcgtgccgccaattatgtttgaaagccatatgtacattttcaagacgctagcctcagccttgcacgagagaggccaccatacagtgttcctcctctctgaaggcagagacatcgccccatctaatcattacagcctccagcgctacccagggatctttaacagtaccacctcagatgctttcctacagtccaagatgcggaatattttctctgggagattgacagcaatcgaactgtttgacatactggatcactatactaagaactgtgacctgatggttggcaaccatgccctgatccagggtctgaagaaagaaaaatttgacctgctgctggtggaccctaatgatatgtgtggatttgtgatagctcatcttttaggggttaaatatgctgtattttcaactggcctttggtatcctgctgaagtgggtgctcctgctccattagcatacgtcccagagtttaactcactcctcacagaccgcatgaacttgctgcaaaggatgaaaaataccggtgtttacctcatttccagattaggggtcagctttctggttcttcccaaatatgaaaggataatgcagaagtacaacctgctgccagagaagtccatgtatgatttggttcatgggtccagcctgtggatgctgtgtactgacgtagcactggaattcccaagacccactctgcctaatgttgtttatgtaggaggaatcctaaccaaaccagccagcccactaccagaagatctccaaagatgggtaaatggtgctaatgaacatggctttgtcttggtgtcttttggagctggtgtcaagtatctgtcagaagacattgctaacaaactggcaggagctctggggagattgcctcaaaaagtgatttggaggttttctggacccaaaccaaagaatctaggaaacaacactaaactcatagaatggttaccacaaaatgacctgcttgggcattcaaagattaaagccttcctgagccatggtggtttgaacagtatttttgaaactatatatcatggtgtgcctgtagtgggaattccactctttggagaccattatgatactatgaccagagtacaggcaaaaggcatggggatattgctagaatggaagacagttactgaaaaagagctctatgaagcactagtgaaggttatcaataatcccagctaccgtcagagggctcagaagctttcggaaattcacaaggatcaacctggtcaccctgtcaatcgaactatctattggatagattatattattcgtcacaatggagcccatcacctacgtgccgctgtccatcagatctccttttgtcagtattttttactggatattgcctttgtgcttttgcttggtgctgccttgttatactttctcttgtcttgggtgacaaaatttatctacagaaaaatcaaaagtctgtggtctagaaataagcatagcacagttaatggacattaccacaatggaatcctcaatggcaagtacaaaagaaatggccatattaaacatgaaaagaaagtgaaatgagccaacagcccaggtgatagaaataaattggttcactcattgaatttttattgctattatttagtctaacagctactaaaagtaaaacatcagtaaacaattctaacatgcccttatgagatctactaatgaaattctgtggaattaagatggctgtaaaaagcacaaacctaaaatgcagaaatgtattttattcaaatactgatgtagagagttttggcactgaaccttttagaagccttaattatttaaatcaattcagtgactgtgtcagaccttagttttaaatcttgatatgtgcgtgtccc

SEQ ID NO: 22810 - DNA, 12946 bp, Homo sapiens
  misc_feature 1..12946: note = ENST00000260323
  source 1..12946: mol_type = unassigned DNA; mol_type = unassigned DNA
atggtggctaattttttcaagagcttgattttaccttacattcataagctttgcaaaggaatgtttacaaagaaattgggaaatacaaacaaaaacaaagagtatcgtcagcagaaaaaggatcaagacttccccactgctggccagaccaaatcccccaaattttcttacacttttaaaagcactgtaaagaagattgcaaagtgttcatccactcacaacttatccactgaggaagacgaggccagtaaagagttttccctctcaccaacattcagttaccgagtagctattgccaatggcctacaaaagaatgctaaagtaaccaacagtgataatgaggatctgcttcaagagctctcttcaatcgagagttcctactcagaatcattaaatgaactaaggagtagcacagaaaaccaggcacaatcaacacacacaatgccagttagacgcaacagaaagagttcaagcagccttgcaccctctgagggcagctctgacggggagcgtactctacatggcttaaaactgggagctttacgaaaactgagaaaatggaaaaagagtcaagaatgtgtctcctcagactcagagttaagcaccatgaaaaaatcctggggaataagaagtaagtctttggacagaactgtccgaaacccaaagacaaatgccctggagccagggttcagttcctctggctgcattagccaaacacatgatgtcatggaaatgatctttaaggaacttcagggaataagtcagattgaaacagaactttctgaactacgagggcacgtcaatgctctcaagcactccatcgatgagatctccagcagtgtggaggttgtacaaagtgaaattgagcagttgcgcacagggtttgtccagtctcggagggaaactagagacatccatgattatattaagcacttaggtcatatgggtagcaaggcaagcctgagatttttaaatgtgactgaagaaagatttgaatatgttgaaagcgtggtgtaccaaattctaatagataaaatgggtttttcagatgcaccaaatgctattaaaattgaatttgctcagaggataggacaccagagagactgcccaaatgcaaagcctcgacccatacttgtgtactttgaaacccctcaacaaagggattctgtcttaaaaaagtcatataaactcaaaggaacaggcattggaatctcaacagatattctaactcatgacatcagagaaagaaaagagaaagggataccatcctcccagacatatgagagcatggctataaagttgtctactccagagccaaaaatcaagaagaacaattggcagtcacctgatgacagtgatgaagatcttgaatctgacctcaatagaaacagttacgctgtgctttccaagtcagagcttctaacaaagggaagtacttccaagccaagctcaaaatcacacagtgctagatccaagaataaaactgctaatagcagcagaatttcaaataaatcagattatgataaaatctcctcacagttgccagaatcagatatcttggaaaagcaaaccacaacccattatgcagatgcaacacctctctggcactcacagagtgattttttcactgctaaacttagtcgttctgaatcagatttttccaaattgtgtcagtcttactcagaagatttttcagaaaatcagtttttcactagaactaatggaagctctctcctgtcatcttcggaccgggagctatggcagaggaaacaggaaggaacagcgaccctgtatgacagtcccaaggaccagcatttgaatggaggtgttcagggtatccaagggcagactgaaactgaaaacacagaaactgtggatagtggaatgagtaatggcatggtgtgtgcatctggagaccggagtcattacagtgattctcagctctctttacatgaggatctttctccatggaaggaatggaatcaaggagctgatttaggcttggattcatccacccaggaaggttttgattatgaaacaaacagtctttttgaccaacagcttgatgtttacaataaagacctagaatacttgggaaagtgccacagtgatcttcaagatgactcagagagctacgacttaactcaagatgacaattcttctccatgccctggcttggataatgaaccacaaggccagtgggttggccaatatgattcttatcagggagctaattctaatgagctataccaaaatcaaaaccagttgtccatgatgtatcgaagtcaaagtgaattgcaaagtgatgattcagaggatgccccacccaaatcatggcatagtcgattaagcattgacctttctgataagactttcagcttcccaaaatttggatctacactgcagagggctaaatcagccttggaagtagtatggaacaaaagcacacagagtctgagtgggtatgaggacagtggctcttcattaatggggagatttcggacattatctcaatcaactgcaaatgagtcaagtaccacacttgactctgatgtctacacggagccctattactataaagcagaggatgaggaagattatactgaaccagtggctgacaatgaaacagattatgttgaagtcatggaacaagtccttgctaaactagaaaacaggactagtattactgaaacagatgaacaaatgcaagcatatgatcacctttcatatgaaacaccttatgaaaccccacaagatgagggttatgatggtccagcagatgatatggttagtgaagaggggttagaacccttaaatgaaacatcagctgagatggaaataagagaagatgaaaaccaaaacattcctgaacagccagtggagatcacaaagccaaagagaattcgtccttctttcaaagaagcagctttaagggcctataaaaagcaaatggcagagttggaagagaagatcttggctggagatagcagttctgtggatgaaaaggctcgaatagtaagtggcaatgatttggatgcttccaaattttctgcactccaggtgtgtggtggggctggaggtggactttatggtattgacagcatgccggatcttcgcagaaaaaaaactttgcctattgtccgagatgtggccatgaccctggctgcccggaaatctggactctccctggctatggtgattaggacatccctaaataatgaggaactgaaaatgcacgtcttcaagaagaccttgcaggcactgatctaccctatgtcttctaccatcccacacaattttgaggtctggacggctaccacacccacctactgttatgagtgtgaagggctcctgtggggcattgcaaggcaaggcatgaagtgtctggagtgtggagtgaaatgccacgaaaagtgtcaggacctgctaaacgctgactgcttgcagagagcagcagaaaagagttctaaacatggtgccgaagacaagactcagaccattattacagcaatgaaagaaagaatgaagatcagggagaaaaaccggccagaagtatttgaagtaatccaggaaatgtttcagatttctaaagaagattttgtgcagtttacaaaggcggccaaacagagtgtactggatgggacatctaagtggtctgcaaaaataaccattacagtggtttctgcacagggtctacaggcaaaagataaaacagggtctagtgatccatatgttacagttcaagttggaaagaacaaaagaagaacaaaaaccatttttggaaatttgaatccagtatgggatgagaagttttattttgagtgtcataactccacagatcgaatcaaagtcagagtatgggatgaagatgatgatattaaatccagagtcaagcaacatttcaaaaaggagtcagatgattttctgggacaaacaattgtagaagtgaggaccttgagtggagaaatggatgtctggtacaacttagagaaaaggacagataagtcagctgtatctggggccatacgattgaaaatcaatgtggagataaaaggagaagagaaggttgctccatatcatattcaatatacatgtttacatgagaatctgttccattacttgactgaagtgaaatctaatggtggagtgaaaatcccagaagtcaaaggggatgaagcctggaaggttttctttgatgatgcttcccaagaaatagttgatgaatttgctatgcgttatggaattgaatccatttatcaagctatgacgcacttttcatgtctgtcttctaaatacatgtgccccggtgtccctgccgtcatgagcaccttgctggctaatataaatgctttttatgctcacacaacagtttcaacaaacatacaggtttctgcctcagatcgatttgctgctaccaactttggtagggaaaaattcataaaactactggaccagttacataactctttgaggattgatctgtcaaagtatagggaaaactttcctgcaagcaatactgaaagactgcaagacctgaaatcaactgttgacctgttaacaagtatcaccttttttaggatgaaggttctggagctgcaaagccccccaaaagcgagcatggtggtgaaggactgtgtaagggcttgcctggattctacatacaagtatatttttgacaactgccatgaactctactcccagctaacagacccgagtaagaaacaggatattcctcgtgaagatcagggaccaaccaccaagaatttggatttttggccccaacttattacactgatggttactattattgatgaggataaaactgcctacacacctgtcctgaatcagtttcctcaagagctgaacatgggaaaaataagtgccgaaattatgtggactctttttgctctggatatgaaatatgcattagaagaacatgaaaatcagcggttatgcaagagcaccgattatatgaatttgcatttcaaagttaaatggttttataatgaatatgtgcgtgaacttcctgccttcaaggatgctgttcctgaatactccttgtggtttgaaccttttgtcatgcaatggctagatgaaaacgaagatgtgtcaatggaattccttcatggagcactgggaagagacaaaaaagatggattccagcagacatctgagcatgctctcttttcttgctccgtggttgatgtctttgctcagctgaatcagagctttgaaattattaagaaactggaatgccctaatcctgaagcattatctcacttaatgagaagatttgcaaagactatcaataaagtgctgctccagtatgctgcaattgtatcaagtgatttcagttcacattgtgataaggaaaatgtgccctgtatcttgatgaacaatattcaacaattgcgggtccagctggaaaaaatgtttgaatccatgggagggaaggagctagattctgaagctagtactattctaaaagaacttcaggttaagctcagtggggtcctggatgagctcagcgtcacttatggtgaaagtttccaggttataattgaagagtgtataaaacagatgagtttcgaactaaatcaaatgagagcaaatggaaacaccacatctaataagaacagtgcagcaatggatgcagagattgtgttaagatctcttatggattttttggacaaaacattaagtctctcagcaaaaatctgtgagaaaacagtcctaaagcgagttttaaaagagttatggaagctagttctcaacaaaatagaaaaacaaattgttcttcctcctctgacagatcaaacaggaccccagatgattttcattgcagctaaagatcttggacaattatccaaactgaaggagcacatgattcgagaggatgccaggggtctgacgccaagacaatgcgctataatggaggtagtcctggctaccatcaagcaatactttcatgcaggaggaaatggcctgaaaaagaatttcttggagaaaagcccagatcttcagtctctgagatatgctctcagtctttatacccaaactactgatgccttgataaagaaattcatagatactcaaacctcacagagtcgttcctccaaagatgccgtgggtcagatatctgttcatgtggacatcactgccaccccaggaacgggagatcataaagtcactgtaaaagtgattgctattaatgacctaaactggcagaccacagcaatgttccgcccctttgtggaagtttgtatactgggacccaaccttggagacaagaagagaaaacaaggcacaaaaacaaaaagcaacacatggtcaccaaagtacaatgaaacatttcagttcattctcggaaaggaaaatcgaccaggggcttatgaacttcatctctcagttaaggattactgctttgccagagaagatcgaattatcggaatgacagtcattcagctacagaacatagcagaaaagggaagctatggggcatggtatcctcttctgaaaaatatctctatggatgaaactggtttgactatccttagaatactctctcagaggaccagtgatgatgtggctaaagaatttgtaagacttaaatctgaaacaagatctactgaagagagtgcttgaaacaaacactgcaagctaaatacataactataattgtttgactactgcatgcatgtgcaaatacatgggaatgtttagttcactacatttcaatgtttgccagtactcatgtacgatgtctacaaggtatgtaaaaaacctgctgaacttttataccaattctggtctttgggaaatcagtgttccatgaagtgccaaaattatgatgtaaagtgaaatatcaagaacaccttttaacatgtttattttgtttctttacccatttcacattcattaaacataatttttaaaaactagtcttttgagtttgcccatcagttgtctttgttaaatgagattatattgcccatagatcagaaaacatttattactcaatttccattttatttacttacctcattatagatgtcttacaaatacccttttctaccataactagaaatgcagtcacttctagaaagcatttgtaattttatagtcgcagatattgtgatttttgcatacacattaaaatagaaaaggtgggaaatattttctgctgaccagtttccaacctttctgaaatatcactgtgaagaaatgctgttaaagcaaacttacataaagcaatgctagagtttgttaacaatgtttgatatatattgacaaaactttgttctctaaaactgccaagatcacatcacatttgtaaaaatggtaagttaatgcatttgtcatatagtgttatgtcttggctttaccatatttcattctttaaaaagtcattaatggtttagaaatgggatggaaagtttactgaaaatacctgtaagtaactatattgttaatatcttccctctgacagttatgactctataatcagttcaatgctttatttttaaaaatattcaatgattagtattgaatgcagcattactatatattgtactgatgccaaaagtcatgttttcatccacttagtgaaaaaatagtaaaattaagtcggaagaaattgcttaaaattttgtaatttgtatttataagccccaaatgcatcaaatgcagtaggagaacaatgtaatacagcttggtacctaaaaatatagctaagttggtttttgaatataaaacagtttatgaatatgtgcattttctgtattgttatgatttgactttttagagtctatgccaaaatatatggctgtaaaacagtactttgtaattataacttatggtcataactgttagtggactacttacagaagcagaaacaagagcctgttatgattgtgctttgtgaacaagctgatctaatacgttaagtacagaagtgcttagtatcatgactgtcagaaccattctgcaactgagtatgaaatcacagaccagtgaggtgagctaattcatgttaaactgttaggccactgctttgttaatgactcctctaaatgcatagtgtgatgcgatcctctggcatatgctttaataaatggatgtatattgagcacatgcagcattgtattgtatcttctgcctttttatttcatttatgcaatatcatctcatttaggaataaaaactccaggctcttttgaccatatgtaatagtcttcatattatttggttctaacatctcattaaaagtttagatgtcagaatggttattattaaaaagtcaaaaaataacagatgctggcgaggttgtgaagaaaaatgtttgtttgtttatacactgctggtgggagtgtaaattacttcaattattgtagaaagcagtgtggtgattcctcaaagacctacaaacagaattaccattcgactaagcaatcccattactgagtacacagccaaaggaatatcaaacaaacattctaccataaacacatatgcacgtatatgtccactgcagcactattcacaatagcaaacacatggaaccatcctaaatgcccatcaacagtagaccagataaagaaaatgtggtacatatacaccgtggaatactatgcaggcataaaaagaatgagaccatgtccttcacagtgacatggatggagctggaggccattacctgaagcaaactaacacaggaatagaaaacgaaatactacatgtttgttatcacaagtggaagctaaacgatgaggacacatggacactaagggggcaacaacagacactgtggcctacttgagggtaggaggagggaaaagataagaaaaagtatctgtcacgctacgaagcttactacctgggtgacaaaataatctacaccaaaacccccgtgacacacaatttacctacgtaataaacctggacatgaacccctgaatctaaaataaaagtttttaaaaaaaagttcagatgttaaaattcattccacaggtggtgtgttcatggaaaccactgtatattgtaatgacgaggaaaataaggatgaactaatgtatctacctatatattgctaaataccgtttagtcccatgaacaaaattcaacatgcaacatggttaaaaatctcacatgataaaagttttcatcaattacttgaaaaattcattctagatttatgttataaatattttacagaacattgacttaagctctttaggagcacatattaatgtcataatacatgatacatttgagtaaaaggcagttaggatttgcattgatcactttaaattgagcaaggtattttttccctgacatgtttaattgcatccaattattctgtcttttacaatgtatacaatatatatcaaagcctaatagtggcagggtgaattaagtctatttatgactatcataaagtacaggtactaattttgaaatgattataaattctgtagactctgttttcctctcaaagcacaagtattcccgttgtcttcagaacaaagcctgttatatttacttacccaaattagtagtcactctaaggttcccagtgatctctgtcaattgagtgttgcactaatgtgtgtagcaatttattcatcttattctagataaaacacacaaaggcaaagctctgttgcttgtctatggataaacctcacattacaggtctttaaagatacacgtgtaaatcaaatttagcaaacacaaagtatttaaacccagagtggagtatttgctattcgaaggaatttgaatgcattaagtaatcagatgtccccactacaacctgcgctaatttatctacttctaggataatttataacttgaatttatcttaaatgaggcacatttataaatgacaattctaacttaatgtcttttatttggtcttttttaaaaacaatgcgtgaaacaagattttctccttttaatttctctacattacataaagatatgactatactagctagcccctttatggactactatagcagctttaatctttatgctcaaataataaatgatcatacttatacatgactcagggaatatccttgaataaatgtctaattccacctacttagaaaaattcttgggcacacaggcaagagactgccctcccctgtggaatgaattttaactcccctgatgttacctgtgtttatactcaagtcctttgtttgaaatagttgcccctttgctcttttgactccccaggcctccactgatcactcttctctgtggttcaggcttctgcagtgtgatttttagaataaaaaactaggatatgtgatatgaaggagaatcaattccaatttgcgaatgttaaataatatatatttaaaagtgctcatgttttttcacatcatgacaactttgaaatcaggatacatatataatcctttggcatgttatggtttaattggtgatttttttctcccttattagtacatgtttcttcttataatgaatgacttccaggcatcaataagcatatttattaaaaagtatatataaatcgatgaaaataaagtaatgcttagttgtctattttaaaacatagtttggctaggcacagtggctcacaactgtaatcccagcacactgagaggccgagacaggcaggttgctttgagcttagaagttcgagaccagcctagtcaacgtggcaaagccccatctctacaaaaaaatacaaaaatgagtcaggcctggtggcatgtgactgtagtcccagctacttgagaggctgaggcaggagaatcacttgagcctgggaagcagaggttccagtgagccaagatgcatcactgcactccagcctgggcaacagaatgagaccctgtctcaaaaaatatgcatattttttaatttgcatatactaaaattctctcttttggcatacatttctgtgttatgacaaatgcgtagtcatgtattaatcacaacagtcaagatatgggacaattccctcatacctcaaaattccacgttaccactttatagacaaacacttttcctactatcaaccctctgcagcactggttcattttagtccctcacgttttgtgtattccagaatgtcatataaacggaactatacagtatatattcttttgagcctgtataatttcacttagcacaatgcaccagagattcatctacattgtggcatgtataaattattacctagttttttttgttgaatagtactgcactgtatgaacattaaaaagatttcattcaccacttactacacttaccttgtttggcaatattatgaacaaagcttttataaacattcacatacaggattttgtgtatacttgtttttatttttcttgggtgattatctattagagtgtgatttctaggtcttatgataagtatatctttaacttcataaggaactttcaaacttttttgaaagtagttgtaaaattttacatttccagaagcaatgtatgagagtttcagttgctctgcatctttgcaagcactgggtatcgtcagttctttattttagttcttcttctgatatacacaaaatagcatctcaacatgcctttaatttgtattcatctgaggactaataacattgagtatctctgtgtgtgcttatttgacatccatatattttgtttagtgaagtatctgcaaatcttttgcccatttatttaatgagttgtttattgttgagtttggggacatattttcatattccatatacaaaccctttgtcagatatgaaatgtgcaactatttcatcccagtccgtggctagtcttttcatttttataacaacctctttaagagaacaaaaggttttcacttccatcaagtcgaatttgatgaaatcattttttctcttttatagatcatagctttgctaccataagaattacttgcctcactcaaggccaaaaagatttttttctcctatgttttcatatggaaattttatactttggggtattacaatttggcctatgaaccgttttgaggttaatagagggtgtaaagtttgagttaaggttcatctataattattaaattacaattgagtaattaattagaaactaattttcataggcatgtccaattgttccagcaccacacaattcattgaaaatactacagttatcacttggaattacctttgtaccttcatcataaatcaattgaccaaatgtgtgtgagtccatttctgacatctctagtctgttccattgatctgactctataccttatcaccaatgtgacactgtagcaattactgtagctttatactgtcttgaactcaggtagtaagagttctccatgttcttctcttcaaaacagtggagtattctactacttctcactctctataaaaattttaacagccagccaggcacggtggctcacgcctgtagtcccagcactttgggaggtcaaggcaggcagatcacctgaggtcaggagttcaagaccagcctaaccaacatggagaaaccccgactctactaaaaatacaaaattagccagacatggtggcgcatgcctgtaatcccagctactctggaggctgaggcaggggaatcacttgaacccaggagacggaggctgcagtgagacgagatcacgccattgcactccaacctgggcaacaagagcaaaactctgtctcaaaaaaaaaaataacagcctactgggattttgactgagaacttattaaatccatacaccaatttacaaacaaccgatgtcttaacaatattgaatcttcaattcgtgggcacagtatatgtctccacttatttacatcttcattgatttattactgtcttatggttttcagcatacaaatcctaccaaggatttcttctgtatgtgtacaagagtataaatgttactttgagaataaaattcaaaatcc

SEQ ID NO: 22811 - DNA, 1693 bp, Homo sapiens
  misc_feature 1..1693: note = ENST00000561210
  source 1..1693: mol_type = unassigned DNA; mol_type = unassigned DNA
caccattgatgtttccatcataggagcagcagaaaagagttctaaacatggtgccgaagacaagactcagaccattattacagcaatgaaagaaagaatgaagatcagggagaaaaaccggccagaagtatttgaagtaatccaggaaatgtttcagatttctaaagaagattttgtgcagtttacaaaggcggccaaacagagtgtactggatgggacatctaagtggtctgcaaaaataaccattacagtggtttctgcacagggtctacaggcaaaagataaaacagggtctagtgatccatatgttacagttcaagttggaaagaacaaaagaagaacaaaaaccatttttggaaatttgaatccagtatgggatgagaagttttattttgagtgtcataactccacagatcgaatcaaagtcagagtatgggatgaagatgatgatattaaatccagagtcaagcaacatttcaaaaaggagtcagatgattttctgggacaaacaattgtagaagtgaggaccttgagtggagaaatggatgtctggtacaacttagagaaaaggacagataagtcagctgtatctggggccatacgattgaaaatcaatgtggagataaaaggagaagagaaggttgctccatatcatattcaatatacatgtttacatgagaatctgttccattacttgactgaagtgaaatctaatggtggagtgaaaatcccagaagtcaaaggggatgaagcctggaaggttttctttgatgatgcttcccaagaaatagttgatgaatttgctatgcgttatggaattgaatccatttatcaagctatgacgcacttttcatgtctgtcttctaaatacatgtgccccggtgtccctgccgtcatgagcaccttgctggctaatataaatgctttttatgctcacacaacagtttcaacaaacatacaggtttctgcctcagatcgatttgctgctaccaactttggtagggaaaaattcataaaactactggaccagttacataactctttgaggattgatctgtcaaagtatagggaaaactttcctgcaagcaatactgaaagactgcaagacctgaaatcaactgttgacctgttaacaagtatcaccttttttaggatgaaggttctggagctgcaaagccccccaaaagcgagcatggtggtgaaggactgtgtaagggcttgcctggattctacatacaagtatatttttgacaactgccatgaactctactcccagctaacagacccgagtaagaaacaggatattcctcgtgaagatcagggaccaaccaccaagaatttggatttttggccccaacttattacactgatggttactattattgatgaggataaaactgcctacacacctgtcctgaatcagtttcctcaagagctgaacatgggaaaaataagtgccgaaattatgtggactctttttgctctggatatgaaatatgcattagaagtaaaagtttattcctgcatgagggattttttggccagctgctctgatgcctggatttttcttcccaccaatcttcataagcagccatggagggctcagctactgacacctcctcagagaagatttccctcaccgcattatctgtagtagctcccaggaataaacttattttaatctgctgcgtaa

SEQ ID NO: 22812 - DNA, 535 bp, Homo sapiens
  misc_feature 1..535: note = ENST00000559093
  source 1..535: mol_type = unassigned DNA; mol_type = unassigned DNA
ttgcaaagactatcaataaagtgctgctccagtatgctgcaattgtatcaagtgatttcagttcacattgtgataaggaaaatgtgccctgtatcttgatgaacaatattcaacaattgcgggtccagctggaaaaaatgtttgaatccatgggagggaaggagaagaaggaaggagaaagattcttttatgagctagattctgaagctagtactattctaaaagaacttcaggttaagctcagtggggtcctggatgagctcagcgtcacttatggtgaaagtttccaggttataattgaagagtgtataaaacagatgagtttcgaactaaatcaaatgagagcaaatggaaacaccacatctaataagaacagtgcagcaatggatgcagagattgtgttaagatctcttatggattttttggacaaaacattaagtctctcagcaaaaatctgtgagaaaacagtcctaaagcgagttttaaaagagttatggaagctagttctcaacaaaatagaaaaacaaattgttct

SEQ ID NO: 22813 - DNA, 938 bp, Homo sapiens
  misc_feature 1..938: note = ENST00000539562
  source 1..938: mol_type = unassigned DNA; mol_type = unassigned DNA
cagtgactcactcacatgctcacaaattcagcaatttgttcatgatagctgcttggcggggtggataatatcctggtcaaaatgactgagccacatcagtgatgtcgttcctccaaagatgccgtgggtcagatatctgttcatgtggacatcactgccaccccaggaacgggagatcataaagtcactgtaaaagtgattgctattaatgacctaaactggcagaccacagcaatgttccgcccctttgtggaagtttgtatactgggacccaaccttggagacaagaagagaaaacaaggcacaaaaacaaaaagcaacacatggtcaccaaagtacaatgaaacatttcagttcattctcggaaaggaaaatcgaccaggggcttatgaacttcatctctcagttaaggattactgctttgccagagaagatcgaattatcggaatgacagtcattcagctacagaacatagcagaaaagggaagctatggggcatggtatcctcttctgaaaaatatctctatggatgaaactggtttgactatccttagaatactctctcagaggaccagtgatgatgtggctaaagaatttgtaagacttaaatctgaaacaagatctactgaagagagtgcttgaaacaaacactgcaagctaaatacataactataattgtttgactactgcatgcatgtgcaaatacatgggaatgtttagttcactacatttcaatgtttgccagtactcatgtacgatgtctacaaggtatgtaaaaaacctgctgaacttttataccaattctggtctttgggaaatcagtgttccatgaagtgccaaaattatgatgtaaagtgaaatatcaagaacaccttttaacatgtttattttgtttctttacccatttcacattcattaaacataatttttaaaaacta

SEQ ID NO: 22814 - DNA, 362 bp, Homo sapiens
  misc_feature 1..362: note = ENST00000560537
  source 1..362: mol_type = unassigned DNA; mol_type = unassigned DNA
gaaatctgattaagataacacctaaagaagagaaggtccatccataggttggctgagttcttatttctgaaataatctctggaggaacttttaagaatcctgaaagattcaactattttaaactcttctggaaaagtatatgcatatactcctttgaaaccgctatgattgtcgttcctccaaagatgccgtgggtcagatatctgttcatgtggacatcactgccaccccaggaacgggagatcataaagtcactgtaaaagtgattgctattaatgacctaaactggcagaccacagcaatgttccgcccctttgtggaagtttgtatactgggacccaaccttggagacaagaagagaa

SEQ ID NO: 22815 - DNA, 6841 bp, Homo sapiens
  misc_feature 1..6841: note = ENST00000335350
  source 1..6841: mol_type = unassigned DNA; mol_type = unassigned DNA
attgtggcaggcggctggggccggctagggcgccggagccgcacgcagccgcggggctccgagaggcgcgcactggggctgggactgcgcggcgccgccgctgcgagcgccactgagcggtcgcgcaacttcggaggcacagcgccggagccaggcgagcgctcagagacccggagccagaggggcgcgccggagcctcgttcgagagccggcgccaggcacccaccgcgctccgagtgccaggcggccctccgcgcagcgtggcttccgctgcccccacggaaggcacgggctggcgctgccgggcgccggggaggacggcgaggaggaggcggcggcggcggagacggcggcggcgagactggggccagggagacagccctgggggagaggcgcccgaaccaggccgcgggagcatgggggcccggagcggagctcggggcgcgctgctgctggcactgctgctctgctgggacccgaggctgagccaagcaggcactgattctggcagcgaggtgctccctgactccttcccgtcagcgccagcagagccgctgccctacttcctgcaggagccacaggacgcctacattgtgaagaacaagcctgtggagctccgctgccgcgccttccccgccacacagatctacttcaagtgcaacggcgagtgggtcagccagaacgaccacgtcacacaggaaggcctggatgaggccaccggcctgcgggtgcgcgaggtgcagatcgaggtgtcgcggcagcaggtggaggagctctttgggctggaggattactggtgccagtgcgtggcctggagctccgcgggcaccaccaagagtcgccgagcctacgtccgcatcgcctacctgcgcaagaacttcgatcaggagcctctgggcaaggaggtgcccctggaccatgaggttctcctgcagtgccgcccgccggagggggtgcctgtggccgaggtggaatggctcaagaatgaggatgtcatcgaccccacccaggacaccaacttcctgctcaccatcgaccacaacctcatcatccgccaggcccgcctgtcggacactgccaactatacctgcgtggccaagaacatcgtggccaaacgccggagcaccactgccaccgtcatcgtctacgtgaatggcggctggtccagctgggcagagtggtcaccctgctccaaccgctgtggccgaggctggcagaagcgcacccggacctgcaccaaccccgctccactcaacggaggggccttctgcgagggccaggcattccagaagaccgcctgcaccaccatctgcccagtcgatggggcgtggacggagtggagcaagtggtcagcctgcagcactgagtgtgcccactggcgtagccgcgagtgcatggcgcccccaccccagaacggaggccgtgactgcagcgggacgctgctcgactctaagaactgcacagatgggctgtgcatgcaaaataagaaaactctaagcgaccccaacagccacctgctggaggcctcaggggatgcggcgctgtatgcggggctcgtggtggccatcttcgtggtcgtggcaatcctcatggcggtgggggtggtggtgtaccgccgcaactgccgtgacttcgacacagacatcactgactcatctgctgccctgactggtggtttccaccccgtcaactttaagacggcaaggcccagcaacccgcagctcctacacccctctgtgcctcctgacctgacagccagcgccggcatctaccgcggacccgtgtatgccctgcaggactccaccgacaaaatccccatgaccaactctcctctgctggaccccttacccagccttaaggtcaaggtctacagctccagcaccacgggctctgggccaggcctggcagatggggctgacctgctgggggtcttgccgcctggcacataccctagcgatttcgcccgggacacccacttcctgcacctgcgcagcgccagcctcggttcccagcagctcttgggcctgccccgagacccagggagcagcgtcagcggcacctttggctgcctgggtgggaggctcagcatccccggcacaggggtcagcttgctggtgcccaatggagccattccccagggcaagttctacgagatgtatctactcatcaacaaggcagaaagtaccctcccgctttcagaagggacccagacagtattgagcccctcggtgacctgtggacccacaggcctcctgctgtgccgccccgtcatcctcaccatgccccactgtgccgaagtcagtgcccgtgactggatctttcagctcaagacccaggcccaccagggccactgggaggaggtggtgaccctggatgaggagaccctgaacacaccctgctactgccagctggagcccagggcctgtcacatcctgctggaccagctgggcacctacgtgttcacgggcgagtcctattcccgctcagcagtcaagcggctccagctggccgtcttcgcccccgccctctgcacctccctggagtacagcctccgggtctactgcctggaggacacgcctgtagcactgaaggaggtgctggagctggagcggactctgggcggatacttggtggaggagccgaaaccgctaatgttcaaggacagttaccacaacctgcgcctctccctccatgacctcccccatgcccattggaggagcaagctgctggccaaataccaggagatccccttctatcacatttggagtggcagccagaaggccctccactgcactttcaccctggagaggcacagcttggcctccacagagctcacctgcaagatctgcgtgcggcaagtggaaggggagggccagatattccagctgcataccactctggcagagacacctgctggctccctggacactctctgctctgcccctggcagcactgtcaccacccagctgggaccttatgccttcaagatcccactgtccatccgccagaagatatgcaacagcctagatgcccccaactcacggggcaatgactggcggatgttagcacagaagctctctatggaccggtacctgaattactttgccaccaaagcgagccccacgggtgtgatcctggacctctgggaagctctgcagcaggacgatggggacctcaacagcctggcgagtgccttggaggagatgggcaagagtgagatgctggtggctgtggccaccgacggggactgctgagcctcctgggacagcgggctggcagggactggcaggaggcaggtgcagggaggcctggggcagcctcctgatggggatgtttggcctctgcttcctcccagttcacagccagagttgcctctcctcctcctcttccccaacccccagaccatgaccagccttagaaaatccatgtactctgttgttagagggcccagagttccttctccacccccgctctctctctcttggcctgagatctctgtgcaggaaccaagatggggctgaagcctctggaggcagttggttgggggcgggcaggcaggaggccctccctccacccccccaccctcagcccggcaacttctgggttccatgggttttagttccgttctcgttttcttcctccgttattgatttctcctttctccctaagcccccttctgcttccacgcccttttcctctttgaagagtcaagtacaattcagacaaactgctttctcctgtccaaaagcaaaaaggcaaaggaaagaaagaaagcttcagaccgctagtaaggctcaaagaagaagaaaaacaccaaaaccacaagggaaaagaaaaacccagtttcttaggaaacgcaaacgatttattatccagattatttggataagtcctttttaagaaaaaaaaagaaaatgaaaaacaacacaaaaaaaatagaaaactcttttcttgagtgtggatgagaatgggcacgctcacacttctggccaggagtgaatgtgcctgtgtgtgtgtgtgtgtgtgtgtgtgtgtgtgtacatgtacgcgtgtgcattgaggagagagagactgaacagagagtactttgctgctaacgaatccatcttggactaaattctgacaaggcctcagtttccccagttgtgcagggagtaggtcagacagggttttcactgtctagatttagctggttagattttcctctaaaatcttaagcagatgctgaatccataaagccaaggagtgctgagggctggagtgggtgggccctccctcccacagccccagggagatacatctggactcctgggaatctggattaagaaagttgggatgaaagaggaggactgctcaggccagttgtgagccagggagaatgttccagtctggttttggtctggtggctcctagaaagggatgtggcccagaagtgggactcaaacagagagatgaagtaggggaggggagtcctccacgggcatctctctcctggcggctggatagctttaccctagggtggggccagccctgacaccctcatcccctcctcagcccagcagcctctagagcagcgtggtgctctcttgatggccaggaatccagaatctgcccttccccaaccttggtttctccttctgtaaagcagagtgatggctgagaagtcctctctagctgcagaagcctgagcttcccggtgtcagtcagctctgcaacgtgggagccttggaggcgggtggcctggctgtgcttcatatgcccaggagtggagaaggaggctgagaagctggtttcccagctctgatctccacaggcacctcctataaccctcctctcacccaccccgctacggtctgagagatctgaaataacctttcccagtgggcagggttgccagggttgaggggacagcacataccacccccacccaacctgttcgaggggccctgcatggcacgggatgagtccctgccctgtgcagctgcctggcagtggctgggacaaggatcttgcagccagcacagaggcctcttcaaaggcctctccctcttggcactccaggcaaggcaggtgcccgcttccccaacacctccaggcagtgaccctagggcatgccccagcaggtctccgagcagccactgggacccgtctcagcacatcctggcctttgaaagtctgatatcctgagaggagggcaggttttagggccgcagttccagccagcgtccccagcctggcttccctgccatggactcagtagctcgtggggcttcttaccacccaccagccccgctggggtgcggcctggctgtgggcaaaggaggacttgcctggagatttgagagaagattccttctaccagggctgctgaggggccaggcctgcatcaggggctaggctctggctgggcccggaggctgagactaaggctttcgaccctggtgcctccatgtggatgctgcctcagacaaaggcagtgagccttccctgccaaagtgcccatcccatgggctcggcctcactggtcactgttagcccatgaacacgtgtgggcctcggtcacgtggctttgagggcagtctgaccaggctagaccacacgtgccgtgacagggggtgccattcccctcgcaggctctaatgtgcccacatgtagcctggcagtccaaagaccaagaatcaacttgcaaatctgccattaaactgctgtgcgacttcaggcatatcactgccttctctgggcttcagtgtccttttcatacctagaagtctgcggtctgaggctctttgggttcagacacactgttctaggcttctgtaggggaccttgtgatctgccgtgcccctcctccctgttcttttctgtcctccccaccccaccctcagaagctgcttgctctgcccccaggacaggagcttgacggatgaagtgcagccagccacccaggtgccatttccagtctgacttccagaaatgtgcaccatgtcctagagcacagacccattggctggagcctcctgggagggttcaaaccatcagctctatgagaaatgcccagaaaggctttgccgactccatccgtctgtggaggctgcctgcctccggggtgggatgggtggtttctcctccaattcagacccaagaggtagcccccgagggcatgtacctggtgggaagcagctcaggtacccttgggggttgcagggcccttacgcaggtatttctctctctctcctctctggggtgcgtgtgtgcgtgcgcgtgtgcgtgcctatgcttttctctgtgggcacatcaggatgcccctcggagagcatgtgcacgtgtccccacctgagcgagcgtgtgtgtgtgctcctctgcgtcccaggtttggacgtctagggtttggtgtgcctgtcttctgccctccctgagcccacagggtcagtcaatgtatcttctacgtgcctctccctctgccttctctcacagtgcccccggctccagagctcaggggtaggggttctcctgagggtgcaggggatccttctcatctcctggaccctccagggcactctggtccctattccccagctcctaggcagctgagccgggtcccttaggggaggtgaccaggagctttggtgcagggagctcttggtggggcaaagggctggacccctgccaggtctgtggacatggttatatgcccgggagaggggggtgcagggccccagggatggcccccaatcccacctctgtttattctgtaaactgcaacctataaataacctttagcattcctattgtaacaaaattaatttttatgaaataaattatatttcctagtctaataaaa

SEQ ID NO: 22816 - DNA, 6451 bp, Homo sapiens
  misc_feature 1..6451: note = ENST00000373192
  source 1..6451: mol_type = unassigned DNA; mol_type = unassigned DNA
gagactggggccagggagacagccctgggggagaggcgcccgaaccaggccgcgggagcatgggggcccggagcggagctcggggcgcgctgctgctggcactgctgctctgctgggacccgaggctgagccaagcaggcactgattctggcagcgaggtgctccctgactccttcccgtcagcgccagcagagccgctgccctacttcctgcaggagccacaggacgcctacattgtgaagaacaagcctgtggagctccgctgccgcgccttccccgccacacagatctacttcaagtgcaacggcgagtgggtcagccagaacgaccacgtcacacaggaaggcctggatgaggccaccggcctgcgggtgcgcgaggtgcagatcgaggtgtcgcggcagcaggtggaggagctctttgggctggaggattactggtgccagtgcgtggcctggagctccgcgggcaccaccaagagtcgccgagcctacgtccgcatcgcctacctgcgcaagaacttcgatcaggagcctctgggcaaggaggtgcccctggaccatgaggttctcctgcagtgccgcccgccggagggggtgcctgtggccgaggtggaatggctcaagaatgaggatgtcatcgaccccacccaggacaccaacttcctgctcaccatcgaccacaacctcatcatccgccaggcccgcctgtcggacactgccaactatacctgcgtggccaagaacatcgtggccaaacgccggagcaccactgccaccgtcatcgtctacgtgaatggcggctggtccagctgggcagagtggtcaccctgctccaaccgctgtggccgaggctggcagaagcgcacccggacctgcaccaaccccgctccactcaacggaggggccttctgcgagggccaggcattccagaagaccgcctgcaccaccatctgcccagtcgatggggcgtggacggagtggagcaagtggtcagcctgcagcactgagtgtgcccactggcgtagccgcgagtgcatggcgcccccaccccagaacggaggccgtgactgcagcgggacgctgctcgactctaagaactgcacagatgggctgtgcatgcaaatgctggaggcctcaggggatgcggcgctgtatgcggggctcgtggtggccatcttcgtggtcgtggcaatcctcatggcggtgggggtggtggtgtaccgccgcaactgccgtgacttcgacacagacatcactgactcatctgctgccctgactggtggtttccaccccgtcaactttaagacggcaaggcccagcaacccgcagctcctacacccctctgtgcctcctgacctgacagccagcgccggcatctaccgcggacccgtgtatgccctgcaggactccaccgacaaaatccccatgaccaactctcctctgctggaccccttacccagccttaaggtcaaggtctacagctccagcaccacgggctctgggccaggcctggcagatggggctgacctgctgggggtcttgccgcctggcacataccctagcgatttcgcccgggacacccacttcctgcacctgcgcagcgccagcctcggttcccagcagctcttgggcctgccccgagacccagggagcagcgtcagcggcacctttggctgcctgggtgggaggctcagcatccccggcacaggggtcagcttgctggtgcccaatggagccattccccagggcaagttctacgagatgtatctactcatcaacaaggcagaaagtaccctcccgctttcagaagggacccagacagtattgagcccctcggtgacctgtggacccacaggcctcctgctgtgccgccccgtcatcctcaccatgccccactgtgccgaagtcagtgcccgtgactggatctttcagctcaagacccaggcccaccagggccactgggaggaggtggtgaccctggatgaggagaccctgaacacaccctgctactgccagctggagcccagggcctgtcacatcctgctggaccagctgggcacctacgtgttcacgggcgagtcctattcccgctcagcagtcaagcggctccagctggccgtcttcgcccccgccctctgcacctccctggagtacagcctccgggtctactgcctggaggacacgcctgtagcactgaaggaggtgctggagctggagcggactctgggcggatacttggtggaggagccgaaaccgctaatgttcaaggacagttaccacaacctgcgcctctccctccatgacctcccccatgcccattggaggagcaagctgctggccaaataccaggagatccccttctatcacatttggagtggcagccagaaggccctccactgcactttcaccctggagaggcacagcttggcctccacagagctcacctgcaagatctgcgtgcggcaagtggaaggggagggccagatattccagctgcataccactctggcagagacacctgctggctccctggacactctctgctctgcccctggcagcactgtcaccacccagctgggaccttatgccttcaagatcccactgtccatccgccagaagatatgcaacagcctagatgcccccaactcacggggcaatgactggcggatgttagcacagaagctctctatggaccggtacctgaattactttgccaccaaagcgagccccacgggtgtgatcctggacctctgggaagctctgcagcaggacgatggggacctcaacagcctggcgagtgccttggaggagatgggcaagagtgagatgctggtggctgtggccaccgacggggactgctgagcctcctgggacagcgggctggcagggactggcaggaggcaggtgcagggaggcctggggcagcctcctgatggggatgtttggcctctgcttcctcccagttcacagccagagttgcctctcctcctcctcttccccaacccccagaccatgaccagccttagaaaatccatgtactctgttgttagagggcccagagttccttctccacccccgctctctctctcttggcctgagatctctgtgcaggaaccaagatggggctgaagcctctggaggcagttggttgggggcgggcaggcaggaggccctccctccacccccccaccctcagcccggcaacttctgggttccatgggttttagttccgttctcgttttcttcctccgttattgatttctcctttctccctaagcccccttctgcttccacgcccttttcctctttgaagagtcaagtacaattcagacaaactgctttctcctgtccaaaagcaaaaaggcaaaggaaagaaagaaagcttcagaccgctagtaaggctcaaagaagaagaaaaacaccaaaaccacaagggaaaagaaaaacccagtttcttaggaaacgcaaacgatttattatccagattatttggataagtcctttttaagaaaaaaaaagaaaatgaaaaacaacacaaaaaaaatagaaaactcttttcttgagtgtggatgagaatgggcacgctcacacttctggccaggagtgaatgtgcctgtgtgtgtgtgtgtgtgtgtgtgtgtgtgtgtacatgtacgcgtgtgcattgaggagagagagactgaacagagagtactttgctgctaacgaatccatcttggactaaattctgacaaggcctcagtttccccagttgtgcagggagtaggtcagacagggttttcactgtctagatttagctggttagattttcctctaaaatcttaagcagatgctgaatccataaagccaaggagtgctgagggctggagtgggtgggccctccctcccacagccccagggagatacatctggactcctgggaatctggattaagaaagttgggatgaaagaggaggactgctcaggccagttgtgagccagggagaatgttccagtctggttttggtctggtggctcctagaaagggatgtggcccagaagtgggactcaaacagagagatgaagtaggggaggggagtcctccacgggcatctctctcctggcggctggatagctttaccctagggtggggccagccctgacaccctcatcccctcctcagcccagcagcctctagagcagcgtggtgctctcttgatggccaggaatccagaatctgcccttccccaaccttggtttctccttctgtaaagcagagtgatggctgagaagtcctctctagctgcagaagcctgagcttcccggtgtcagtcagctctgcaacgtgggagccttggaggcgggtggcctggctgtgcttcatatgcccaggagtggagaaggaggctgagaagctggtttcccagctctgatctccacaggcacctcctataaccctcctctcacccaccccgctacggtctgagagatctgaaataacctttcccagtgggcagggttgccagggttgaggggacagcacataccacccccacccaacctgttcgaggggccctgcatggcacgggatgagtccctgccctgtgcagctgcctggcagtggctgggacaaggatcttgcagccagcacagaggcctcttcaaaggcctctccctcttggcactccaggcaaggcaggtgcccgcttccccaacacctccaggcagtgaccctagggcatgccccagcaggtctccgagcagccactgggacccgtctcagcacatcctggcctttgaaagtctgatatcctgagaggagggcaggttttagggccgcagttccagccagcgtccccagcctggcttccctgccatggactcagtagctcgtggggcttcttaccacccaccagccccgctggggtgcggcctggctgtgggcaaaggaggacttgcctggagatttgagagaagattccttctaccagggctgctgaggggccaggcctgcatcaggggctaggctctggctgggcccggaggctgagactaaggctttcgaccctggtgcctccatgtggatgctgcctcagacaaaggcagtgagccttccctgccaaagtgcccatcccatgggctcggcctcactggtcactgttagcccatgaacacgtgtgggcctcggtcacgtggctttgagggcagtctgaccaggctagaccacacgtgccgtgacagggggtgccattcccctcgcaggctctaatgtgcccacatgtagcctggcagtccaaagaccaagaatcaacttgcaaatctgccattaaactgctgtgcgacttcaggcatatcactgccttctctgggcttcagtgtccttttcatacctagaagtctgcggtctgaggctctttgggttcagacacactgttctaggcttctgtaggggaccttgtgatctgccgtgcccctcctccctgttcttttctgtcctccccaccccaccctcagaagctgcttgctctgcccccaggacaggagcttgacggatgaagtgcagccagccacccaggtgccatttccagtctgacttccagaaatgtgcaccatgtcctagagcacagacccattggctggagcctcctgggagggttcaaaccatcagctctatgagaaatgcccagaaaggctttgccgactccatccgtctgtggaggctgcctgcctccggggtgggatgggtggtttctcctccaattcagacccaagaggtagcccccgagggcatgtacctggtgggaagcagctcaggtacccttgggggttgcagggcccttacgcaggtatttctctctctctcctctctggggtgcgtgtgtgcgtgcgcgtgtgcgtgcctatgcttttctctgtgggcacatcaggatgcccctcggagagcatgtgcacgtgtccccacctgagcgagcgtgtgtgtgtgctcctctgcgtcccaggtttggacgtctagggtttggtgtgcctgtcttctgccctccctgagcccacagggtcagtcaatgtatcttctacgtgcctctccctctgccttctctcacagtgcccccggctccagagctcaggggtaggggttctcctgagggtgcaggggatccttctcatctcctggaccctccagggcactctggtccctattccccagctcctaggcagctgagccgggtcccttaggggaggtgaccaggagctttggtgcagggagctcttggtggggcaaagggctggacccctgccaggtctgtggacatggttatatgcccgggagaggggggtgcagggccccagggatggcccccaatcccacctctgtttattctgtaaactgcaacctataaataacctttagcattcctattgtaacaaaattaatttttatgaaataaattatatttcctagtctaataaaa

SEQ ID NO: 22817 - DNA, 3252 bp, Homo sapiens
  misc_feature 1..3252: note = ENST00000404895
  source 1..3252: mol_type = unassigned DNA; mol_type = unassigned DNA
cggactctcgcctccgctccgtagttcggggcccggcagcggcgcgagggctgggaactgcgcggcggggactgcgggcgactccggcatccgcgctggcggcagcggtcgccgcgccgtgggaagctatggggacgcgccctttctcggggtgcccattcagcggcggctcggagctccctgccccgctgctttaggaagcgatcgtggagcagagtcactctctgaagactcccgagacccattcgactcgggaccctcatcgccgaccctttcccgggctcccggagcgtgaagaagagccgccctccggaacgcggcgaggagcatggggagagcggcggccaccgcaggcggcggcggaggggcgcgccgctggctcccgtggctggggctgtgcttctgggcggcagggaccgcggctgcccgaggaactgacaatggcgaagcccttcccgaatccatcccatcagctcctgggacactgcctcatttcatagaggagccagatgatgcttatattatcaagagcaaccctattgcactcaggtgcaaagcgaggccagccatgcagatattcttcaaatgcaacggcgagtgggtccatcagaacgagcacgtctctgaagagactctggacgagagctcaggtttgaaggtccgcgaagtgttcatcaatgttactaggcaacaggtggaggacttccatgggcccgaggactattggtgccagtgtgtggcgtggagccacctgggtacctccaagagcaggaaggcctctgtgcgcatagcctatttacggaaaaactttgaacaagacccacaaggaagggaagttcccattgaaggcatgattgtactgcactgccgcccaccagagggagtccctgctgccgaggtggaatggctgaaaaatgaagagcccattgactctgaacaagacgagaacattgacaccagggctgaccataacctgatcatcaggcaggcacggctctcggactcaggaaattacacctgcatggcagccaacatcgtggctaagaggagaagcctgtcggccactgttgtggtctacgtgaatggaggctggtcttcctggacagagtggtcagcctgcaatgttcgctgtggtagaggatggcagaaacgttcccggacctgcaccaacccagctcctctcaatggtggggccttttgtgagggaatgtcagtgcagaaaataacctgcacttctctttgtcctgtggatgggagctgggaagtgtggagcgaatggtccgtctgcagtccagagtgtgaacatttgcggatccgggagtgcacagcaccacccccgagaaatgggggcaaattctgtgaaggtctaagccaggaatctgaaaactgcacagatggtctttgcatcctagataaaaaacctcttcatgaaataaaaccccaaagcattgagaatgccagcgacattgctttgtactcgggcttgggtgctgccgtcgtggccgttgcagtcctggtcattggtgtcaccctttacagacggagccagagtgactatggcgtggacgtcattgactcttctgcattgacaggtggcttccagaccttcaacttcaaaacagtccgtcaaggtaactccctgctcctgaattctgccatgcagccagatctgacagtgagccggacatacagcggacccatctgtctgcaggaccctctggacaaggagctcatgacagagtcctcactctttaaccctttgtcggacatcaaagtgaaagtccagagctcgttcatggtttccctgggagtgtctgagagagctgagtaccacggcaagaatcattccaggacttttccccatggaaacaaccacagctttagtacaatgcatcccagaaataaaatgccctacatccaaaatctgtcatcactccccacaaggacagaactgaggacaactggtgtctttggccatttaggggggcgcttagtaatgccaaatacaggggtgagcttactcataccacacggtgccatcccagaggagaattcttgggagatttatatgtccatcaaccaaggtgaacccagcctccagtcagatggctctgaggtgctcctgagtcctgaagtcacctgtggtcctccagacatgatcgtcaccactccctttgcattgaccatcccgcactgtgcagatgtcagttctgagcattggaatatccatttaaagaagaggacacagcagggcaaatgggaggaagtgatgtcagtggaagatgaatctacatcctgttactgccttttggacccctttgcgtgtcatgtgctcctggacagctttgggacctatgcgctcactggagagccaatcacagactgtgccgtgaagcaactgaaggtggcggtttttggctgcatgtcctgtaactccctggattacaacttgagagtttactgtgtggacaataccccttgtgcatttcaggaagtggtttcagatgaaaggcatcaaggtggacagctcctggaagaaccaaaattgctgcatttcaaagggaatacctttagtcttcagatttctgtccttgatattcccccattcctctggagaattaaaccattcactgcctgccaggaagtcccgttctcccgcgtgtggtgcagtaaccggcagcccctgcactgtgccttctccctggagcgttatacgcccactaccacccagctgtcctgcaaaatctgcattcggcagctcaaaggccatgaacagatcctccaagtgcagacatcaatcctagagagtgaacgagaaaccatcactttcttcgcacaagaggacagcactttccctgcacagactggccccaaagccttcaaaattccctactccatcagacagcggatttgtgctacatttgatacccccaatgccaaaggcaaggactggcagatgttagcacagaaaaacagcatcaacaggaatttatcttatttcgctacacaaagtagcccatctgctgtcattttgaacctgtgggaagctcgtcatcagcatgatggtgatcttgactccctggcctgtgcccttgaagagattgggaggacacacacgaaactctcaaacatttcagaatcccagcttgatgaagccgacttcaactacagcaggcaaaatggactctagtccacttcctcccatgagacagagtgatggccagcttggggacatttgctttaaatgggaaa

SEQ ID NO: 22818 - DNA, 2966 bp, Homo sapiens
  misc_feature 1..2966: note = ENST00000420357
  source 1..2966: mol_type = unassigned DNA; mol_type = unassigned DNA
tccggaacgcggcgaggagcatggggagagcggcggccaccgcaggcggcggcggaggggcgcgccgctggctcccgtggctggggctgtgcttctgggcggcagggaccgcggctgcccgaggaactgacaatggcgaagcccttcccgaatccatcccatcagctcctgggacactgcctcatttcatagaggagccagatgatgcttatattatcaagagcaaccctattgcactcaggtgcaaagcgaggccagccatgcagatattcttcaaatgcaacggcgagtgggtccatcagaacgagcacgtctctgaagagactctggacgagagctcaggtttgaaggtccgcgaagtgttcatcaatgttactaggcaacaggtggaggacttccatgggcccgaggactattggtgccagtgtgtggcgtggagccacctgggtacctccaagagcaggaaggcctctgtgcgcatagcctatttacggaaaaactttgaacaagacccacaaggaagggaagttcccattgaaggcatgattgtactgcactgccgcccaccagagggagtccctgctgccgaggtggaatggctgaaaaatgaagagcccattgactctgaacaagacgagaacattgacaccagggctgaccataacctgatcatcaggcaggcacggctctcggactcaggaaattacacctgcatggcagccaacatcgtggctaagaggagaagcctgtcggccactgttgtggtctacgtggatgggagctgggaagtgtggagcgaatggtccgtctgcagtccagagtgtgaacatttgcggatccgggagtgcacagcaccacccccgagaaatgggggcaaattctgtgaaggtctaagccaggaatctgaaaactgcacagatggtctttgcatcctaggcattgagaatgccagcgacattgctttgtactcgggcttgggtgctgccgtcgtggccgttgcagtcctggtcattggtgtcaccctttacagacggagccagagtgactatggcgtggacgtcattgactcttctgcattgacaggtggcttccagaccttcaacttcaaaacagtccgtcaaggtaactccctgctcctgaattctgccatgcagccagatctgacagtgagccggacatacagcggacccatctgtctgcaggaccctctggacaaggagctcatgacagagtcctcactctttaaccctttgtcggacatcaaagtgaaagtccagagctcgttcatggtttccctgggagtgtctgagagagctgagtaccacggcaagaatcattccaggacttttccccatggaaacaaccacagctttagtacaatgcatcccagaaataaaatgccctacatccaaaatctgtcatcactccccacaaggacagaactgaggacaactggtgtctttggccatttaggggggcgcttagtaatgccaaatacaggggtgagcttactcataccacacggtgccatcccagaggagaattcttgggagatttatatgtccatcaaccaaggtgaacccagcctccagtcagatggctctgaggtgctcctgagtcctgaagtcacctgtggtcctccagacatgatcgtcaccactccctttgcattgaccatcccgcactgtgcagatgtcagttctgagcattggaatatccatttaaagaagaggacacagcagggcaaatgggaggaagtgatgtcagtggaagatgaatctacatcctgttactgccttttggacccctttgcgtgtcatgtgctcctggacagctttgggacctatgcgctcactggagagccaatcacagactgtgccgtgaagcaactgaaggtggcggtttttggctgcatgtcctgtaactccctggattacaacttgagagtttactgtgtggacaataccccttgtgcatttcaggaagtggtttcagatgaaaggcatcaaggtggacagctcctggaagaaccaaaattgctgcatttcaaagggaatacctttagtcttcagatttctgtccttgatattcccccattcctctggagaattaaaccattcactgcctgccaggaagtcccgttctcccgcgtgtggtgcagtaaccggcagcccctgcactgtgccttctccctggagcgttatacgcccactaccacccagctgtcctgcaaaatctgcattcggcagctcaaaggccatgaacagatcctccaagtgcagacatcaatcctagagagtgaacgagaaaccatcactttcttcgcacaagaggacagcactttccctgcacagactggccccaaagccttcaaaattccctactccatcagacagcggatttgtgctacatttgatacccccaatgccaaaggcaaggactggcagatgttagcacagaaaaacagcatcaacaggaatttatcttatttcgctacacaaagtagcccatctgctgtcattttgaacctgtgggaagctcgtcatcagcatgatggtgatcttgactccctggcctgtgcccttgaagagattgggaggacacacacgaaactctcaaacatttcagaatcccagcttgatgaagccgacttcaactacagcaggcaaaatggactctagtccacttcctcccatgagacagagtgatggccagcttggggacatttgctttaaatgggaaagaggccgctttctgcccagtggcgttgggggaattcagccttcatttataatcagtgagattcccctgttgaagaaactaaattttatataggtaaaacatgttaatagggaagagtacaagctctcttacatataagagggctctactatctccttggaatccacatttgggttaactcctcagatttggagtggcaaggataaaagtgagggcagaagtag

SEQ ID NO: 22819 - DNA, 8662 bp, Homo sapiens
  misc_feature 1..8662: note = ENST00000287272
  source 1..8662: mol_type = unassigned DNA; mol_type = unassigned DNA
tccggaacgcggcgaggagcatggggagagcggcggccaccgcaggcggcggcggaggggcgcgccgctggctcccgtggctggggctgtgcttctgggcggcagggaccgcggctgcccgaggaactgacaatggcgaagcccttcccgaatccatcccatcagctcctgggacactgcctcatttcatagaggagccagatgatgcttatattatcaagagcaaccctattgcactcaggtgcaaagcgaggccagccatgcagatattcttcaaatgcaacggcgagtgggtccatcagaacgagcacgtctctgaagagactctggacgagagctcaggtttgaaggtccgcgaagtgttcatcaatgttactaggcaacaggtggaggacttccatgggcccgaggactattggtgccagtgtgtggcgtggagccacctgggtacctccaagagcaggaaggcctctgtgcgcatagcctatttacggaaaaactttgaacaagacccacaaggaagggaagttcccattgaaggcatgattgtactgcactgccgcccaccagagggagtccctgctgccgaggtggaatggctgaaaaatgaagagcccattgactctgaacaagacgagaacattgacaccagggctgaccataacctgatcatcaggcaggcacggctctcggactcaggaaattacacctgcatggcagccaacatcgtggctaagaggagaagcctgtcggccactgttgtggtctacgtggatgggagctgggaagtgtggagcgaatggtccgtctgcagtccagagtgtgaacatttgcggatccgggagtgcacagcaccacccccgagaaatgggggcaaattctgtgaaggtctaagccaggaatctgaaaactgcacagatggtctttgcatcctagataaaaaacctcttcatgaaataaaaccccaaagcattgagaatgccagcgacattgctttgtactcgggcttgggtgctgccgtcgtggccgttgcagtcctggtcattggtgtcaccctttacagacggagccagagtgactatggcgtggacgtcattgactcttctgcattgacaggtaactccctgctcctgaattctgccatgcagccagatctgacagtgagccggacatacagcggacccatctgtctgcaggaccctctggacaaggagctcatgacagagtcctcactctttaaccctttgtcggacatcaaagtgaaagtccagagctcgttcatggtttccctgggagtgtctgagagagctgagtaccacggcaagaatcattccaggacttttccccatggaaacaaccacagctttagtacaatgcatcccagaaataaaatgccctacatccaaaatctgtcatcactccccacaaggacagaactgaggacaactggtgtctttggccatttaggggggcgcttagtaatgccaaatacaggggtgagcttactcataccacacggtgccatcccagaggagaattcttgggagatttatatgtccatcaaccaaggtgaacccagcctccagtcagatggctctgaggtgctcctgagtcctgaagtcacctgtggtcctccagacatgatcgtcaccactccctttgcattgaccatcccgcactgtgcagatgtcagttctgagcattggaatatccatttaaagaagaggacacagcagggcaaatgggaggaagtgatgtcagtggaagatgaatctacatcctgttactgccttttggacccctttgcgtgtcatgtgctcctggacagctttgggacctatgcgctcactggagagccaatcacagactgtgccgtgaagcaactgaaggtggcggtttttggctgcatgtcctgtaactccctggattacaacttgagagtttactgtgtggacaataccccttgtgcatttcaggaagtggtttcagatgaaaggcatcaaggtggacagctcctggaagaaccaaaattgctgcatttcaaagggaatacctttagtcttcagatttctgtccttgatattcccccattcctctggagaattaaaccattcactgcctgccaggaagtcccgttctcccgcgtgtggtgcagtaaccggcagcccctgcactgtgccttctccctggagcgttatacgcccactaccacccagctgtcctgcaaaatctgcattcggcagctcaaaggccatgaacagatcctccaagtgcagacatcaatcctagagagtgaacgagaaaccatcactttcttcgcacaagaggacagcactttccctgcacagactggccccaaagccttcaaaattccctactccatcagacagcggatttgtgctacatttgatacccccaatgccaaaggcaaggactggcagatgttagcacagaaaaacagcatcaacaggaatttatcttatttcgctacacaaagtagcccatctgctgtcattttgaacctgtgggaagctcgtcatcagcatgatggtgatcttgactccctggcctgtgcccttgaagagattgggaggacacacacgaaactctcaaacatttcagaatcccagcttgatgaagccgacttcaactacagcaggcaaaatggactctagtccacttcctcccatgagacagagtgatggccagcttggggacatttgctttaaatgggaaagaggccgctttctgcccagtggcgttgggggaattcagccttcatttataatcagtgagattcccctgttgaagaaactaaattttatataggtaaaacatgttaatagggaagagtacaagctctcttacatataagagggctctactatctccttggaatccacatttgggttaactcctcagatttggagtggcaaggataaaagtgagggcagaagtagctgtgggaaaagatgagctatgataatgctgggaaggcagagattgattaagtgcatgctttgaaataggtttttaatgatgtgccccaaagggccagctgattctggtactagattgtcagagttttctaccaactggcatctgtgatgtcagagatcattgtaaaaatggcttttagacgtgaaacagggttgccaacccatttgtatgacttcaacaacgtcaaggagggcatttagaatttagaatctgagcacatcacaccagcaccagctccctgtctcttctagccacttaatggagacacaatggagaggtaagacagaccacaaactagttcttatagtgtactccaccttttacttttttcctgagacaaatctacccttattctttcttcctcttccttaccccttgcagtagggaggtatcaaggagcataattaaacttgtcaatacggaaagttgttttttctaacacaacaaagtgggaccatctctattcccatctaagccactcaaattgctgagtgctattagaacacagcttattacatggatatggggacaggagagattaaagcaggttcaaaaacacatgaactgcagatgccataggcctcaaatcagctgtaattctaggagacacgtgttgatctagttatctaacattgttgttataagaaaatgagtttactgcatttttcaatccagattcttgaaattgtctaacatgtgggtactgtgtcatcacaaaatctctcagtaaggctatatgtgatcctcattttgcctcttgggaaattagcagatagtctttgctctaaatgatatctgagtaaatagacttgaggaatcctctaccacagtgtccctgaaaccacatgcatcattcaggaagccttcaccctgtgactattcagcctccctgaatatgctttctctatagaaccactaacatatggctattgctctatgatttttttttttacattaggaggcagtgatattgtggaagattgaaatccacagataattcatgaccctcatcttatcactttactccatctttttatcctattaaattatttttgacaagatgtcctggtagactaaaggtgaacagatttgctcttgctcatcttctggtggatattttaacttgctattcacaatcaggacaaccaaagtcaaggacccagatgaaccacaaggcagctagtcagctacttagaggttggttacattcgaataaaaagtagtcagggaatgggggaggtggggagttggggagtacttggcagttgggatatgatccatttttttaaacaagttttttgtagatcccttgtaaaataataataataatgttgtgaatctccatgccaagtgaaaaaggcctaaagatgagttgaatttgtgataccatgggtaaggcatggaagaactcttgaatgtgttggccattttctctaactaacatgtggtatgtatggtcccctatattagatagaagtctttgctacatgtaattcaaaagcatctcgcttttctcaggaaccaaaggcttatgatgtaggacaaagaaatcatcttagaactgtcaagcatattttcacaataccatgtcaagatcaggaaaacacccttttgctagtgtgcttaacttatttatttcttctaggaaacaatagataaacagcatgaaaatgtaaatcatctggcatcactgatagaatttctgaaagagaaagagaagtagatggtcaaccagtcactagttggttggcatgaggtggtgtgcagaggaaagctgcattcactattgagtaaaaacttgtagaaagcacattatagagcttatgttggaatccatcttggaggatttttgttttaaactgtctttagcattttccctcttcccttctaatgggcattataattgtttcatctactctgtgaatctacataggtctttttttttagatgtttgatacattttaagtatttttaaatagatgaaaattctaaatgattttccctcaaatctatctagattattttaagatgagacaagattattgtcaatccctgaatgtctggagttacctcccatggatttttttttcctttggcctgggttttataaacaacttgaacatcatatcatataggataacaaaggaggaagttaacttaattcacctcagacttcagcctaagattcaatcaaattcatccttcagcctgtcttgtttcttctttatgtttcttttacttattgctgctaggatcctacataggatttctatagaaatgtatgaaattctgtggtcactgcatgtcaggattgcacagtatgttacaatacaatttcaaagagaacccacatttgtgagatttacagaccaaggtgtggtggaggaggtagaattgcagatcagataaaaagtgagcttacacttgaacttagttattcactgtgacctaaatttagtcctattgtaatatgtgcctgtcacaacacaaatacccctcttgaaagagatttactcatctatccaagcacttaatttggaaattttattgtcctattgcaaaatgaaacaaaattaaaagtggcctcgagtacttggtaagttacttaaaatttttacaaaaatatcccactcaatgccaaatctttcagtcctcaaaggcatttaagtccaatagtcatgctttaaatatggctttaaattatgccaccaaaatggtgcacttcacagattcaccagactgtagcatcataaagttaatttacagtttttacaacattgcttctacattcttactggtttacattaaaatcctttaagccaaaaggaagcttgctctatggatttaaatgcaaacttcatttaccagtgcaggaagtctcataaaactcagatgtactcccacaaaaattttattggcctttttgtaagagatgaaaaagaattgacacagttctctttaaagagaagaacttttttattattatttttatctccaactgcaggtggtgtcttttgccaaggtctctgtatttttctttcagttgtctttgggaggggatgttaagtcaaatcactaaaacagggttctctttggattaaaagttctggatttattgcaactattttccttgagaaacattctcagcatcaggattgataaacaaatgtagatgattaaaataggataattggttttagataatatcttctactgccaaacttctggcaaatttacctgtgaatttcaaaatgttataaaatctcttgatatgcttttgtttttccttttagccattttctcttcaatttcttagtccctctgccctctgtaaatgtgttgagtgatatagctatcagatgtattgaaggcaaagttctcgcagaggtctctgttccagctctgtaaaggtcacaggaatcgtgaaggagctgagaaatcttcctctccggcccactgtctgtggcccattgtcattgtttcctcatgaaacattgcagagtttgaatcctcagtaactctcattgactggattagaggtgatggccacagcaaatgggagagcaaaatgttggcctacagagaatgacacaattttattcgcctttggtgttagttgccatagtgctgtatttgaaaatcgatgctttagccaaaagctgaatgaccaccgtttccgtagtttccactgttttgtctgcatagaattttcctgaactacaagcaaaaatgtattttgtccaatgtcacaaaagtgaaaatgttactaatcttagatgtgttgcatattttgtgtttttacgttccaaactctttcaaaagctgccgttacaaagctgtttggctgtattgacagcatgtggtgtttttacaaaagcaattctaggagagccagtgtctaccatgaactcctgacatccccactccagggtcattcatgacattgaaatggcaacttgtacactgtaattcttcgaaaagtaacaggggatggaaatcagacctggccgttagtcactagtgtgtagtaccgtgatctgaagtaggaaatttaactgacatagaataattgtggtttttgaagcagctactcattgctttttccttttgctgtgaagatcatggattgggaatgtcctcgtgaggtggacctaaggcagtaacatttaaacttcatgtcctagcacccgccctccatctgacccaaagataaaaaaggcatcaagcttcatggttatgcctaagcttaaaaattcccttccccactactaatattgagttcagcagggccccatcttacttatttttcaaaaaagttatagctttgaattatagactatattactaaatttggtaaggtagttctttgcatgaatgggaatgtgtgtcaaaatactttcacaaaaggcatgattacaatggaaatgcccctttgcctccagttttgctaaccctaaaaagtatttcactaatttcaagcactgtttacactcaaatcccaaaattggccaaattatataattctcttaaattttcatttctgtaggtggagatttaactatggttctggtgaatcatagaagggagagacaatatttgaggggagtttatcagcagaatatcatgccttatgaccccattactgaaacacagacattacaatcagaaatagacctaataattccaatatccctccattaactagttccagtgatgctgagagacacagcaccctgtgccaggtatcagaaatataagcctcagcagagggtaactgaaaactttcaatcagaaacactctccaaggcttatggctagattatgtaggtcactaccattcaaaacttttctatacaaaggtggaaaagcactcagaatctgggaattttctggttggaagaacaatgttctccttttccaaattggaataaagactcagaattacccattcttcataatcatgtctgattggtacatacactccaggaagtctcaacctagaaacatttccaacctaagcatttaaaggaaaactggctcattcttctgacccaaactcaaaaaatatgagtacttgcgtacctccatttctgcatgaagattttaaaacagatttcatttttttctgtttattttgggaaggtgcgtgggggtgttctttcaagtgattcacatctcaaacccataccactctcaacttttatttgatgtgttcaaagccaaaaaataaaataaaataaagcagggctgaacacttaatttgacatgaagctgaaggactgagcaagccagaggagagaggttgaatgaagcatagccttggcttcataccacactttttgtgccttgtattatcaatgtaaattctgaatgttgtacagtaaacttggatggacttcttagaaaaggctgcactggcttctttttcagcacatgtacatatctataaatatatatacatatatatttggtaatgccaaacagctctgttatattgtattgaacaaaatggacggtttggatgttttatgtcgagtttgcaaaaaaaaaaaaaaaaaaaaaaactggatggttgcagacttttcaagataaatgtacagacgtaaattactgcatatcagttatttatgaataaagagtcttttattgacattttaggata

SEQ ID NO: 22820 - DNA, 3532 bp, Homo sapiens
  misc_feature 1..3532: note = ENST00000416672
  source 1..3532: mol_type = unassigned DNA; mol_type = unassigned DNA
ggcgaggagcatggggagagcggcggccaccgcaggcggcggcggaggggcgcgccgctggctcccgtggctggggctgtgcttctgggcggcagggaccgcggctgcccgaggaactgacaatggcgaagcccttcccgaatccatcccatcagctcctgggacactgcctcatttcatagaggagccagatgatgcttatattatcaagagcaaccctattgcactcaggtgcaaagcgaggccagccatgcagatattcttcaaatgcaacggcgagtgggtccatcagaacgagcacgtctctgaagagactctggacgagagctcaggtttgaaggtccgcgaagtgttcatcaatgttactaggcaacaggtggaggacttccatgggcccgaggactattggtgccagtgtgtggcgtggagccacctgggtacctccaagagcaggaaggcctctgtgcgcatagcctatttacggaaaaactttgaacaagacccacaaggaagggaagttcccattgaaggcatgattgtactgcactgccgcccaccagagggagtccctgctgccgaggtggaatggctgaaaaatgaagagcccattgactctgaacaagacgagaacattgacaccagggctgaccataacctgatcatcaggcaggcacggctctcggactcaggaaattacacctgcatggcagccaacatcgtggctaagaggagaagcctgtcggccactgttgtggtctacgtgaatggaggctggtcttcctggacagagtggtcagcctgcaatgttcgctgtggtagaggatggcagaaacgttcccggacctgcaccaacccagctcctctcaatggtggggccttttgtgagggaatgtcagtgcagaaaataacctgcacttctctttgtcctgtggatgggagctgggaagtgtggagcgaatggtccgtctgcagtccagagtgtgaacatttgcggatccgggagtgcacagcaccacccccgagaaatgggggcaaattctgtgaaggtctaagccaggaatctgaaaactgcacagatggtctttgcatcctagataaaaaacctcttcatgaaataaaaccccaaagatggagtaggagaggcattgagaatgccagcgacattgctttgtactcgggcttgggtgctgccgtcgtggccgttgcagtcctggtcattggtgtcaccctttacagacggagccagagtgactatggcgtggacgtcattgactcttctgcattgacaggtggcttccagaccttcaacttcaaaacagtccgtcaaggtaactccctgctcctgaattctgccatgcagccagatctgacagtgagccggacatacagcggacccatctgtctgcaggaccctctggacaaggagctcatgacagagtcctcactctttaaccctttgtcggacatcaaagtgaaagtccagagctcgttcatggtttccctgggagtgtctgagagagctgagtaccacggcaagaatcattccaggacttttccccatggaaacaaccacagctttagtacaatgcatcccagaaataaaatgccctacatccaaaatctgtcatcactccccacaaggacagaactgaggacaactggtgtctttggccatttaggggggcgcttagtaatgccaaatacaggggtgagcttactcataccacacggtgccatcccagaggagaattcttgggagatttatatgtccatcaaccaaggtgaacccagcctccagtcagatggctctgaggtgctcctgagtcctgaagtcacctgtggtcctccagacatgatcgtcaccactccctttgcattgaccatcccgcactgtgcagatgtcagttctgagcattggaatatccatttaaagaagaggacacagcagggcaaatgggaggaagtgatgtcagtggaagatgaatctacatcctgttactgccttttggacccctttgcgtgtcatgtgctcctggacagctttgggacctatgcgctcactggagagccaatcacagactgtgccgtgaagcaactgaaggtggcggtttttggctgcatgtcctgtaactccctggattacaacttgagagtttactgtgtggacaataccccttgtgcatttcaggaagtggtttcagatgaaaggcatcaaggtggacagctcctggaagaaccaaaattgctgcatttcaaagggaatacctttagtcttcagatttctgtccttgatattcccccattcctctggagaattaaaccattcactgcctgccaggaagtcccgttctcccgcgtgtggtgcagtaaccggcagcccctgcactgtgccttctccctggagcgttatacgcccactaccacccagctgtcctgcaaaatctgcattcggcagctcaaaggccatgaacagatcctccaagtgcagacatcaatcctagagagtgaacgagaaaccatcactttcttcgcacaagaggacagcactttccctgcacagactggccccaaagccttcaaaattccctactccatcagacagcggatttgtgctacatttgatacccccaatgccaaaggcaaggactggcagatgttagcacagaaaaacagcatcaacaggaatttatcttatttcgctacacaaagtagcccatctgctgtcattttgaacctgtgggaagctcgtcatcagcatgatggtgatcttgactccctggcctgtgcccttgaagagattgggaggacacacacgaaactctcaaacatttcagaatcccagcttgatgaagccgacttcaactacagcaggcaaaatggactctagtccacttcctcccatgagacagagtgatggccagcttggggacatttgctttaaatgggaaagaggccgctttctgcccagtggcgttgggggaattcagccttcatttataatcagtgagattcccctgttgaagaaactaaattttatataggtaaaacatgttaatagggaagagtacaagctctcttacatataagagggctctactatctccttggaatccacatttgggttaactcctcagatttggagtggcaaggataaaagtgagggcagaagtagctgtgggaaaagatgagctatgataatgctgggaaggcagagattgattaagtgcatgctttgaaataggtttttaatgatgtgccccaaagggccagctgattctggtactagattgtcagagttttctaccaactggcatctgtgatgtcagagatcattgtaaaaatggcttttagacgtgaaacagggttgccaacccatttgtatgacttcaacaacgtcaaggagggcatttagaatttagaatctgagcacatcacaccagcaccagctccctgtctcttctagccacttaatggagacacaatggagaggtaagacagaccacaaactagttcttatagtgtactccacctt

SEQ ID NO: 22821 - DNA, 7002 bp, Homo sapiens
  misc_feature 1..7002: note = ENST00000453357
  source 1..7002: mol_type = unassigned DNA; mol_type = unassigned DNA
ttaaataagtagggattgtttaaaaaaaaaagctgtaatatgttatctgggggtggatgatcctggtgttagttaaagctctcagtgatgtctgtgctgggacttccgggttcctgttggacttttcctcccaaacttcaccaggaactgacaatggcgaagcccttcccgaatccatcccatcagctcctgggacactgcctcatttcatagaggagccagatgatgcttatattatcaagagcaaccctattgcactcaggtgcaaagcgaggccagccatgcagatattcttcaaatgcaacggcgagtgggtccatcagaacgagcacgtctctgaagagactctggacgagagctcaggtttgaaggtccgcgaagtgttcatcaatgttactaggcaacaggtggaggacttccatgggcccgaggactattggtgccagtgtgtggcgtggagccacctgggtacctccaagagcaggaaggcctctgtgcgcatagcctatttacggaaaaactttgaacaagacccacaaggaagggaagttcccattgaaggcatgattgtactgcactgccgcccaccagagggagtccctgctgccgaggtggaatggctgaaaaatgaagagcccattgactctgaacaagacgagaacattgacaccagggctgaccataacctgatcatcaggcaggcacggctctcggactcaggaaattacacctgcatggcagccaacatcgtggctaagaggagaagcctgtcggccactgttgtggtctacgtgaatggaggctggtcttcctggacagagtggtcagcctgcaatgttcgctgtggtagaggatggcagaaacgttcccggacctgcaccaacccagctcctctcaatggtggggccttttgtgagggaatgtcagtgcagaaaataacctgcacttctctttgtcctgtggatgggagctgggaagtgtggagcgaatggtccgtctgcagtccagagtgtgaacatttgcggatccgggagtgcacagcaccacccccgagaaatgggggcaaattctgtgaaggtctaagccaggaatctgaaaactgcacagatggtctttgcatcctagataaaaaacctcttcatgaaataaaaccccaaagcattgagaatgccagcgacattgctttgtactcgggcttgggtgctgccgtcgtggccgttgcagtcctggtcattggtgtcaccctttacagacggagccagagtgactatggcgtggacgtcattgactcttctgcattgacaggtggcttccagaccttcaacttcaaaacagtccgtcaaggtaactccctgctcctgaattctgccatgcagccagatctgacagtgagccggacatacagcggacccatctgtctgcaggaccctctggacaaggagctcatgacagagtcctcactctttaaccctttgtcggacatcaaagtgaaagtccagagctcgttcatggtttccctgggagtgtctgagagagctgagtaccacggcaagaatcattccaggacttttccccatggaaacaaccacagctttagtacaatgcatcccagaaataaaatgccctacatccaaaatctgtcatcactccccacaaggacagaactgaggacaactggtgtctttggccatttaggggggcgcttagtaatgccaaatacaggggtgagcttactcataccacacggtgccatcccagaggagaattcttgggagatttatatgtccatcaaccaaggtgaacccagcctccagtcagatggctctgaggtgctcctgagtcctgaagtcacctgtggtcctccagacatgatcgtcaccactccctttgcattgaccatcccgcactgtgcagatgtcagttctgagcattggaatatccatttaaagaagaggacacagcagggcaaatgggaggaagtgatgtcagtggaagatgaatctacatcctgttactgccttttggacccctttgcgtgtcatgtgctcctggacagctttgggacctatgcgctcactggagagccaatcacagactgtgccgtgaagcaactgaaggtggcggtttttggctgcatgtcctgtaactccctggattacaacttgagagtttactgtgtggacaataccccttgtgcatttcaggaagtggtttcagatgaaaggcatcaaggtggacagctcctggaagaaccaaaattgctgcatttcaaagggaatacctttagtcttcagatttctgtccttgatattcccccattcctctggagaattaaaccattcactgcctgccaggaagtcccgttctcccgcgtgtggtgcagtaaccggcagcccctgcactgtgccttctccctggagcgttatacgcccactaccacccagctgtcctgcaaaatctgcattcggcagctcaaaggccatgaacagatcctccaagtgcagacatcaatcctagagagtgaacgagaaaccatcactttcttcgcacaagaggacagcactttccctgcacagactggccccaaagccttcaaaattccctactccatcagacagcggatttgtgctacatttgatacccccaatgccaaaggcaaggactggcagatgttagcacagaaaaacagcatcaacaggaatttatcttatttcgctacacaaagtagcccatctgctgtcattttgaacctgtgggaagctcgtcatcagcatgatggtgatcttgactccctggcctgtgcccttgaagagattgggaggacacacacgaaactctcaaacatttcagaatcccagcttgatgaagccgacttcaactacagcaggcaaaatggactctagtccacttcctcccatgagacagagtgatggccagcttggggacatttgctttaaatgggaaagaggccgctttctgcccagtggcgttgggggaattcagccttcatttataatcagtgagattcccctgttgaagaaactaaattttatataggtaaaacatgttaatagggaagagtacaagctctcttacatataagagggctctactatctccttggaatccacatttgggttaactcctcagatttggagtggcaaggataaaagtgagggcagaagtagctgtgggaaaagatgagctatgataatgctgggaaggcagagattgattaagtgcatgctttgaaataggtttttaatgatgtgccccaaagggccagctgattctggtactagattgtcagagttttctaccaactggcatctgtgatgtcagagatcattgtaaaaatggcttttagacgtgaaacagggttgccaacccatttgtatgacttcaacaacgtcaaggagggcatttagaatttagaatctgagcacatcacaccagcaccagctccctgtctcttctagccacttaatggagacacaatggagaggtaagacagaccacaaactagttcttatagtgtactccaccttttacttttttcctgagacaaatctacccttattctttcttcctcttccttaccccttgcagtagggaggtatcaaggagcataattaaacttgtcaatacggaaagttgttttttctaacacaacaaagtgggaccatctctattcccatctaagccactcaaattgctgagtgctattagaacacagcttattacatggatatggggacaggagagattaaagcaggttcaaaaacacatgaactgcagatgccataggcctcaaatcagctgtaattctaggagacacgtgttgatctagttatctaacattgttgttataagaaaatgagtttactgcatttttcaatccagattcttgaaattgtctaacatgtgggtactgtgtcatcacaaaatctctcagtaaggctatatgtgatcctcattttgcctcttgggaaattagcagatagtctttgctctaaatgatatctgagtaaatagacttgaggaatcctctaccacagtgtccctgaaaccacatgcatcattcaggaagccttcaccctgtgactattcagcctccctgaatatgctttctctatagaaccactaacatatggctattgctctatgatttttttttttacattaggaggcagtgatattgtggaagattgaaatccacagataattcatgaccctcatcttatcactttactccatctttttatcctattaaattatttttgacaagatgtcctggtagactaaaggtgaacagatttgctcttgctcatcttctggtggatattttaacttgctattcacaatcaggacaaccaaagtcaaggacccagatgaaccacaaggcagctagtcagctacttagaggttggttacattcgaataaaaagtagtcagggaatgggggaggtggggagttggggagtacttggcagttgggatatgatccatttttttaaacaagttttttgtagatcccttgtaaaataataataataatgttgtgaatctccatgccaagtgaaaaaggcctaaagatgagttgaatttgtgataccatgggtaaggcatggaagaactcttgaatgtgttggccattttctctaactaacatgtggtatgtatggtcccctatattagatagaagtctttgctacatgtaattcaaaagcatctcgcttttctcaggaaccaaaggcttatgatgtaggacaaagaaatcatcttagaactgtcaagcatattttcacaataccatgtcaagatcaggaaaacacccttttgctagtgtgcttaacttatttatttcttctaggaaacaatagataaacagcatgaaaatgtaaatcatctggcatcactgatagaatttctgaaagagaaagagaagtagatggtcaaccagtcactagttggttggcatgaggtggtgtgcagaggaaagctgcattcactattgagtaaaaacttgtagaaagcacattatagagcttatgttggaatccatcttggaggatttttgttttaaactgtctttagcattttccctcttcccttctaatgggcattataattgtttcatctactctgtgaatctacataggtctttttttttagatgtttgatacattttaagtatttttaaatagatgaaaattctaaatgattttccctcaaatctatctagattattttaagatgagacaagattattgtcaatccctgaatgtctggagttacctcccatggatttttttttcctttggcctgggttttataaacaacttgaacatcatatcatataggataacaaaggaggaagttaacttaattcacctcagacttcagcctaagattcaatcaaattcatccttcagcctgtcttgtttcttctttatgtttcttttacttattgctgctaggatcctacataggatttctatagaaatgtatgaaattctgtggtcactgcatgtcaggattgcacagtatgttacaatacaatttcaaagagaacccacatttgtgagatttacagaccaaggtgtggtggaggaggtagaattgcagatcagataaaaagtgagcttacacttgaacttagttattcactgtgacctaaatttagtcctattgtaatatgtgcctgtcacaacacaaatacccctcttgaaagagatttactcatctatccaagcacttaatttggaaattttattgtcctattgcaaaatgaaacaaaattaaaagtggcctcgagtacttggtaagttacttaaaatttttacaaaaatatcccactcaatgccaaatctttcagtcctcaaaggcatttaagtccaatagtcatgctttaaatatggctttaaattatgccaccaaaatggtgcacttcacagattcaccagactgtagcatcataaagttaatttacagtttttacaacattgcttctacattcttactggtttacattaaaatcctttaagccaaaaggaagcttgctctatggatttaaatgcaaacttcatttaccagtgcaggaagtctcataaaactcagatgtactcccacaaaaattttattggcctttttgtaagagatgaaaaagaattgacacagttctctttaaagagaagaacttttttattattatttttatctccaactgcaggtggtgtcttttgccaaggtctctgtatttttctttcagttgtctttgggaggggatgttaagtcaaatcactaaaacagggttctctttggattaaaagttctggatttattgcaactattttccttgagaaacattctcagcatcaggattgataaacaaatgtagatgattaaaataggataattggttttagataatatcttctactgccaaacttctggcaaatttacctgtgaatttcaaaatgttataaaatctcttgatatgcttttgtttttccttttagccattttctcttcaatttcttagtccctctgccctctgtaaatgtgttgagtgatatagctatcagatgtattgaaggcaaagttctcgcagaggtctctgttccagctctgtaaaggtcacaggaatcgtgaaggagctgagaaatcttcctctccggcccactgtctgtggcccattgtcattgtttcctcatgaaacattgcagagtttgaatcctcagtaactctcattgactggattagaggtgatggccacagcaaatgggagagcaaaatgttggcctacagagaatgacacaattttattcgcctttggtgttagttgccatagtgctgtatttgaaaatcgatgctttagccaaaagctgaatgaccaccgtttccgtagtttccactgttttgtctgcatagaattttcctgaactacaagcaaaaatgtattttgtccaatgtcacaaaagtgaaaatgttactaatctt

SEQ ID NO: 22822 - DNA, 2381 bp, Homo sapiens
  misc_feature 1..2381: note = ENST00000474634
  source 1..2381: mol_type = unassigned DNA; mol_type = unassigned DNA
tgaacaagacgagaacattgacaccagggctgaccataacctgatcatcaggcaggcacggctctcggactcaggaaattacacctgcatggcagccaacatcgtggctaagaggagaagcctgtcggccactgttgtggtctacgtgaatggaggctggtcttcctggacagagtggtcagcctgcaatgttcgctgtggtagaggatggcagaaacgttcccggacctgcaccaacccagctcctctcaatggtggggccttttgtgagggaatgtcagtgcagaaaataacctgcacttctctttgtcctgtggatgggagctgggaagtgtggagcgaatggtccgtctgcagtccagagtgtgaacatttgcggatccgggagtgcacagcaccacccccgagaaatgggggcaaattctgtgaaggtctaagccaggaatctgaaaactgcacagatggtctttgcatcctaggcattgagaatgccagcgacattgctttgtactcgggcttgggtgctgccgtcgtggccgttgcagtcctggtcattggtgtcaccctttacagacggagccagagtgactatggcgtggacgtcattgactcttctgcattgacaggtggcttccagaccttcaacttcaaaacagtccgtcaaggtaactccctgctcctgaattctgccatgcagccagatctgacagtgagccggacatacagcggacccatctgtctgcaggaccctctggacaaggagctcatgacagagtcctcactctttaaccctttgtcggacatcaaagtgaaagtccagagctcgttcatggtttccctgggagtgtctgagagagctgagtaccacggcaagaatcattccaggacttttccccatggaaacaaccacagctttagtacaatgcatcccagaaataaaatgccctacatccaaaatctgtcatcactccccacaaggacagaactgaggacaactggtgtctttggccatttaggggggcgcttagtaatgccaaatacaggtgggtggtaagtgtgtgtttgtgtattttccatcatttaaatgtttcatttttacacagttacttcccatcagattcattttatgatgtttactctcccctcatcagacctgcaaacactgcggctccactagtccacttgatttacacagcaaaccagaaccaatgctgagattagattttgcagtcttcatctcagcatggattgaatgctccctttgattccctgttagagctgataactatatttgcctgaaaggtttgggtagtccccaggctttaagcccctttggagtatatttcctaggcatgataagaaagcactgaaaaaattctctggcatgacagaccagggccccatgtttatacctaagcatggtttatgtactagtttgataatttagataatttagtgaaatgacatctcatcagtaactgacctaatgaacactccatagcccttgctatagtgttactttctggtgagcaacgatgaggggttgttgtagagttgctcttttgaatttaaacttcagttccagggctatgtcagtataatgaattctcacatattttgttcctccttttagctggaagagaggagattttcatgatgttttgacatgatacttaaagtatccagcccagatcacttttaaaatgatatcctttctatggattagttttcaaagttgctgcctaagacctaagtggatggtagacaaggtcaatttctgctcggatttctaagcaatgagaattaggtagtgcactgaagcaggtagtgatctgttggctgctaagagggaagagtatctgttggatctgtaagtgtttatcaaacaacaggtcagcattgagtcagggacattatagtctagacagatgtctctctagggtggagctaaccaacctctcaaatcgagcatttcattccataaataaaatctgtaataggactagtctgattctaccattctagctaactgacccctctagtagcttagagactggagactgaaattcatttctagttgatgaatgttgtcttgttctcccctagagcaattacttccttaaaatcttcatttcaaaacatattttacttcatcaaaatagccctcaatggcagccgtaattgaatggttttgttttttaaatttctaattctctaaatcttcattggtcaatgttttaggacatggtaaggatctttgttcaaatgtgtatgcgtgtcaatgtgtgaatgcctacgcatgatttaattcttccagttgataattggaagataatgagtcaatcagacatatttaccaattaacttttctgtaagaattc

SEQ ID NO: 22823 - DNA, 2448 bp, Homo sapiens
  misc_feature 1..2448: note = ENST00000449677
  source 1..2448: mol_type = unassigned DNA; mol_type = unassigned DNA
ttgcctacacttaaactcaacttatgtgtattgtaaatctctaagacaatattagtcttaccaaacttacctgaccattttgttttatttttatttttagccaagaatatcatggaactaatgatacaagaaaaatcctttggtaactccctgctcctgaattctgccatgcagccagatctgacagtgagccggacatacagcggacccatctgtctgcaggaccctctggacaaggagctcatgacagagtcctcactctttaaccctttgtcggacatcaaagtgaaagtccagagctcgttcatggtttccctgggagtgtctgagagagctgagtaccacggcaagaatcattccaggacttttccccatggaaacaaccacagctttagtacaatgcatcccagaaataaaatgccctacatccaaaatctgtcatcactccccacaaggacagaactgaggacaactggtgtctttggccatttaggggggcgcttagtaatgccaaatacaggggtgagcttactcataccacacggtgccatcccagaggagaattcttgggagatttatatgtccatcaaccaaggtgaacccagcctccagtcagatggctctgaggtgctcctgagtcctgaagtcacctgtggtcctccagacatgatcgtcaccactccctttgcattgaccatcccgcactgtgcagatgtcagttctgagcattggaatatccatttaaagaagaggacacagcagggcaaatgggaggaagtgatgtcagtggaagatgaatctacatcctgttactgccttttggacccctttgcgtgtcatgtgctcctggacagctttgggacctatgcgctcactggagagccaatcacagactgtgccgtgaagcaactgaaggtggcggtttttggctgcatgtcctgtaactccctggattacaacttgagagtttactgtgtggacaataccccttgtgcatttcaggaagtggtttcagatgaaaggcatcaaggtggacagctcctggaagaaccaaaattgctgcatttcaaagggaatacctttagtcttcagatttctgtccttgatattcccccattcctctggagaattaaaccattcactgcctgccaggaagtcccgttctcccgcgtgtggtgcagtaaccggcagcccctgcactgtgccttctccctggagcgttatacgcccactaccacccagctgtcctgcaaaatctgcattcggcagctcaaaggccatgaacagatcctccaagtgcagacatcaatcctagagagtgaacgagaaaccatcactttcttcgcacaagaggacagcactttccctgcacagactggccccaaagccttcaaaattccctactccatcagacagcggatttgtgctacatttgatacccccaatgccaaaggcaaggactggcagatgttagcacagaaaaacagcatcaacaggaatttatcttatttcgctacacaaagtagcccatctgctgtcattttgaacctgtgggaagctcgtcatcagcatgatggtgatcttgactccctggcctgtgcccttgaagagattgggaggacacacacgaaactctcaaacatttcagaatcccagcttgatgaagccgacttcaactacagcaggcaaaatggactctagtccacttcctcccatgagacagagtgatggccagcttggggacatttgctttaaatgggaaagaggccgctttctgcccagtggcgttgggggaattcagccttcatttataatcagtgagattcccctgttgaagaaactaaattttatataggtaaaacatgttaatagggaagagtacaagctctcttacatataagagggctctactatctccttggaatccacatttgggttaactcctcagatttggagtggcaaggataaaagtgagggcagaagtagctgtgggaaaagatgagctatgataatgctgggaaggcagagattgattaagtgcatgctttgaaataggtttttaatgatgtgccccaaagggccagctgattctggtactagattgtcagagttttctaccaactggcatctgtgatgtcagagatcattgtaaaaatggcttttagacgtgaaacagggttgccaacccatttgtatgacttcaacaacgtcaaggagggcatttagaatttagaatctgagcacatcacaccagcaccagctccctgtctcttctagccacttaatggagacacaatggagaggtaagacagaccacaaactagttcttatagtgtactccaccttttacttttttcctgagacaaatctacccttattctttcttcctcttccttaccccttgcagtagggaggtatcaaggagcataattaaacttgtcaatacgg

SEQ ID NO: 22824 - DNA, 2771 bp, Homo sapiens
  misc_feature 1..2771: note = ENST00000478701
  source 1..2771: mol_type = unassigned DNA; mol_type = unassigned DNA
agcagcgggaggaggcggcggcggcggctagcgaggagacagagctgggtcctgcagtaggactcccgggagccaccattatggtgaagaggaagagctccgagggccaggagcaggacggcggccgcggcatccccctgcccatccagaccttcctgtggcggcaaaccagtgcatttttgaggcccaaactggggaagcaatatgaagcttcttgtgtgtcctttgagcgagtgttggtagaaaacaagctgcatggcctctctccagctctctctgaagccatccagagcatttccagatgggaactggtgcaagctgctttgcctcatgtcctccactgcactgcaaccctgctttcaaaccgaaacaagctaggccaccaggataaattgggtgttgctgagacaaagctccttcacactctacactggatgcttctggaggccccccaggactgcaacaatgagcggtttgggggtacagaccgaggctccagctggggtggaagcagcagtgctttcatccaccaggttgaaaaccagggttctccagggcagccttgccaaagcagctctaatgacgaagaagagaacaaccgaagaaagatcttccagaactccatggctactgtggagctcttcgtgtttctgtttgctcccctggtacacaggatcaaggaatctgacctcaccttccgtctggccagtgggcttgttatatggcagcccatgtgggaacacagacagcccggagtctctggctttaccgcactggtgaagcccatcaggaacatcattacagctaagagaagttctcctatcaacagtcaaagccggacctgtgaatcaccaaatcaagatgcaagacacttagagggactccaggtggtttgtgaaacattccagtctgattccatctcacccaaggccaccatttcaggctgtcaccgaggaaactcctttgatggaagtctgtcctcccaaacttcccaggaaagaggcccatcacattccagaagcacctttcacttcccaccatgattctgaggccttctcagccatgtggaactgtaactccaattaaacttacttatgttcccagtttggggtatttatcagcagcaagaaaatgaactaatatagtaaattggtaccagtagagtggggcattgctgaaaagatacccaaaagtgtggaagcaactttggaactgggtaacaggcagagattggaacagtttgaagagctcagaagaagacagggaagtgtggaaaagtttggaactttacctagagacttgttgaatggctttgcccaaaatgctgatagcgacatagacaataaaaccaggctgaggtggtctcagatggagatgaggaacttgtagggaactggagcaaaggtgactcttgttatgttttagcaaagagactggtggcattttgcccctgtcctagagatttgtggaactttgaacttgagagagatgatttaggttacctggcggaagaaatttctaaacagcaaagcattcaagaggtgacttgggtactgttaaaggcattcagttttaaaagggaaacagagcataaaagttcagaaaatttgcagcctgactatgcaacagaaaagaaaaaccaattttctggggagaaattcaagccaactgcagaaatttgcataagtaaggagcaaggagcctaatgttaatccccaagaccatggggaaaatgtctccaagccatgtcagagaccttcacagcagcccctcccatcacaggcccagaggcccaggaggaaaaagcagtttcgtgggctgggcccagggtcctcatgctgtgtgcagccgagggacttggtgccgtgggtcccaactgctccagctgtggctgaaaggggccaatgtacagctcaggatgtgacttcagagggtggaagccccaagtctcagtagcttccatgtggtgttgagcctgcaggtgcacagaagtcaagaattgaggtttgggaacctccgcctatatttcagaagatatatggaaactcctggatgcccaggcaaaagtttgctgcaggtgcagggccctcatggagaacctctgctagggcagtgcagaagggaaatgtggggttagaggccccacacagagtccctaatggagtgctgccaggtggagctgtgagaagagggccactgtcctccagaccccagaatggtagttccactgacagcttggatcatgcacctggaaaagccgcagacactcaacaccagcctgtgaaagcagccgagagggaggctgtaccctccaaagccacagggtggagctgcccaagaccatgggaacccacctcttgcatcagtgtaacctggatgtgaggcctggagttaaagaagatcattttggagctttaaagtttgactgtcctgctggactttggacttgcatgccccctgtagcccctttgttttggccaatttctcccatttgaaacggctgtgtttacccaatacctgtacccccattgtatctaggaagtaactaacttgcttttgattttacaggctcataagcgcagggacttgccttgtctcagatgagactttggactgtggacttttgggttaatgctgaaatgagttaagactctgggagactattgggaaggcatggttggttttgaaatgtgaggatatgagacttggaggcgcaaggggtggaatgatatggtttggctgtgtccccactaaatctcagcttgaatgtt
